United States Patent Application Publication US 2015/0315605 A1 - sequence listing, part 12

SEQ ID NO: 18807 - DNA, 2180 bp, Zea Mays
cgcagcgtcacgagagagggggtggggcgcttgccagtaaattgcgtaggcgtaacgacgaatccggcactcgcaaccaccgcatccgtcctcgtctggtccggttgcctactcccctcccactgccccgctgctgctgcctccccgcgcaatggcgccgagatccccgcgctgagcgagcctcccgggggtcgacctccgaaccggcgctgccgtcccgcagaccaggcagctgttctctactcaaggaagagatggcccatgtttcgttcaaaagcaaagatgtggacagcggcatgtcccggtggtctgaatacctaagtgttgaagagccaattccttccgcaatggcaacctggaggaacatgagcgctgatgcgccgcaaggctcttctgctggtagccacaaacatcttcagatggagccggtggttcagctgtccaaggttgcggaaggcttgctggccaaaatgtaccggctgaacagcatcctggactatccagatccaaacacgcacacattctcggatgcattttggaaagctggtgtctttccaaatttccccaaaatttgcatcacgatgtcaaaaaaatttccggaacatcctaacaagctgcagctagaaagggtagataagtttggtcttgatgctttaaacgagaatgctgaaggttacatgcacaatcttgagcagtggatcctgttgcttcttgatttgctggcatttcgtgaacaagctttgcgacttattttggatttgagcagcacggtcataacattgctgccacaccaaaactctttaattcttcatgcttttatggatctgttttgttcatttgtccgagtgaatcttttctctgacaagatgccaagaaagatgatcctccaggtttataacatcttgcacataatgctaaagggtggtcgtgattgtgagttttatcaccgactggttcagtttgtggactcttatgatccacctatcaaggggttgcatgaagatcttaattttgtgagcccaagaattggagaggtcctggaagctgttggcccaattatatttctttcaactgatacaaaaaagttaaggaacgaaggtttcctcagtccatttcatccacgttatccagacatcctaacaaattctgcccatccaatgagggcccaagacttggctaatgtcacatcataccgtgagtgggttcttctaggatatcttgtttgtcctgatgaactacttagggtgaccagtatagatgttgccatggttgttctgaaagagaacttaatacttcctctgttcagagatgagtacatcttacttcatgaaaattatcaactttatgttcttccaaaagttctagaatcgaagagaatggctaaatctggccgaactaagcaaaaggaagctgatctggagtacaatgttgcaaagcaggttgagagaatgttaacggaagtgcatgagcaagcactggtgtcatgtgatgctatgcatcgtgagaggagaattcttcttaagcaggaaattggaaggatggttttatttttcactgatcaacctagcctcctagcacctaatattcagatggttttttctgctcttgctttgtctcaatgcgaggtgatttggtacttccaacatgtggggattgcatcatcaaaatctactcggttgaaaactgttgacattgatgcgacagacccaactattggtttcttactagatggaataggcaaactttgttgcctggttcgtaaatacatagcagcaataaaaggttatgccttatcatatttgttatccagtgctggaagaatacggttcttacttggtactccaggaatggttgctcttgacctagatgcgacactgaaaggcctttttcagcaagtcctccattgtctggagaacattccaaaacctcagggggaaagtgttcctgacattaccgctgacttggctgatttgcgtaagcactggctgtcaatcttgatgatagtcacatcttcacgatcctcgataaacattaagcacttggagaaggctactgtgtctactgggaaggagggtttggtgtcagaaggcaatgctgcatataattggtcaaggtaccttgctggctaccaagctgaaaaagaacacatcaggttggggggcgatgaccggcaatctaac

SEQ ID NO: 18808 - DNA, 1181 bp, Zea Mays
cttcacattttataacaagtagcagcctcaatgagcttcctgagcggcttcttctgacatacaaaccagaagaagaagttcatgataccgttccaattgtagcggagaaactgcaagttgttgaagaaattgctccagttccttcttcccaaatagctttgcctcccaagcctgagattgcagatactggtgatttactggggttaggtgattcaacccctactgtgttggcgatagaggagagcagtgctttggccttggccattcttccgacaggtattgataactcaacaacaactacacagcaagatagtggatttgatccaacaggatgggaacttgctcttgttactacaagcagcaatgcgactccactgtctatggagagtaatttgggtggtggatttgacaagctcacattggacagcctatacgatgatggaacctacaggcagatgcagcaacaacagctatacggatcagcccctcccaatccattcatggcaagcgatcccttcgccgtatcaaatcaagtagctcccccaccatcagttcaaatggcggccatggctccacagccccagcatttgcccatgatgattgaaccaaatcccttcggaccaccacagcagcatcacgcgggcgtcgctcctgcagcaaaccccttcctcgacgccgggttcggtgcgttcccggcagtaaatggaatgcatccacagaccaaccccttcggaggcgccgcacaacttctctagtcatatatactttgcaaagtttgcattacaattacatagaagatgtgcaatctgtagatacccacgcaacgatgcaagacaagcaattgacgtctgtggaatcgcttttctccgtcagaccgttaccaatcagggaatcgccatgttgcaccagcctcttctcgcccttccttaggctttggccgcttggcctttcttgtgtagctttctgttttgctgtgtctggttttccatcttccgtggcgagccattgcacccattgtaaagaaatttgtttcatcaggctttgggctgataaaatcatgagtacgtgccaataaggcaataacccatcagcgtttgcatttgtgtaactcctgatgaccgtgcgaatattttcgcaattggtcccaaaccacttttggcactattaaaaaacaggtagag

SEQ ID NO: 18809 - DNA, 2873 bp, Zea Mays
attaattcctggcatgcagcctaacaacctttctgtgagcgcatttgcctgcctgcaaacccacaacgtatatgttgtcatagcgcacgagcatcggagcatgtgatctttatgtccacaattaattcctttagggtgccatctgcgaccaagcttttggattgagagcgctcactcgtgcgtttatggttatgacaggacgctgttccagcccttcgacgtgccttcaaatgagcctcctcgttcatctgaaaagttcaaaggaaacactatcaacgggcagtctaatagtacaagaagagaacctttgaggatgtcctcacagaccaagaacaaggacgtctgtgcttcaaaatcaattgccaagtgcacctcacagcatagagtgggcaacaccatcatgtcttctggaaagaaagtggtcagtgatgatgaatttatggttccttccatctgttatcctagattttatcgacagtctactcaagatcatgcagataaatcaaaaccccaatctactacaaacccacacaaaagtcctgcaatgtccaaatcatctgtagagtgctatagtactgtgaacaagcacttggacaaaatcaatgaagctgataggaggttaatgaactctccaaaggttaaggagaaagaagcagtgcaaggatcaaaagctgtggaagttaaagaaaagagttcatcatttcaggcatcagaaaagttcaaagacaaatatgctaagctatgtcaaatgaggaataaggcaagtaatataaatcattgtgacaacaacggttgccaacctgcaagcgtgaatggaaatttcacagaagcaaagaaccctacagcagctagaaatacatcttcctgtaaaccatgtactgatgtagatagctctaacaggaagtctaatttactggaaagaagcccacgggaagttggtgctaagagaaaaagaggacatcacaatggagagcaaaatgatgatttatctgactcctcagtggaatgcatacctgggggggagatctctccagatgaaattgttgctgctattggtccaaagcatttctggaaagcaagaagagctattcagaatcagcagagggtttttgctgtccaagtgttcgagctgcataagctgataaaagtgcagaaattaatcgcggcatctccacatctgcttattgaaggtgatcctgtccttggcaatgcattaacaggaaaaaggaacaaacttcctaaaggaaattcgaaagttcagaccctgtcaatcacaaacaaagatgatatccagccaaccctagagcaaccagagttatcaaaacaagacacagaaggaaacttattggcccattctcatgatgatggacttggtgacaaccatcataatcaagctgcaacaaatgaaacctttacaagcaaccctccagctatgcatgttgctcctgacaacaaacagaataactggtgcatgaatccaccgcagaatcaatggcttgtcccagttatgtcgccttctgaaggtcttgtctataagccttttgccggcccttgtcccccagttggaaatctgctgacaccattttacgccaactgtgctccgtcaaggctgccttctacaccatatggcgttcctattcctcaccagccacagcacatggtccctcctggtgcccctgccatgcatatgaactacttcccgcctttcagtatgccagtgatgaatccaggaacaccagcatctgcagtggagcaagggagccatgctgctgcgccacagcctcatgggcacatggaccagcagtcgctgatctcatgtaacatgtcacacccgagtggcgtttggaggtttcttgcatcaagggacagcgagccacaggccagcagcgccaccagccctttcgacaggctccaagtccaaggtgatggaagtgctccgttgtcattctttcccacggcttcagctccgaatgtccagcctccgccctcatctggaggccgggaccgggaccagcagaaccatgtaatcagggttgttccgcgtaacgcacagactgcttcagtcccgaaagcccaacctcagccgtcatccggaggccgggaccaaaagaaccatgtaatcagggttgttccgcataacgcgcagactgcttcggagtcagcagcgtggatcttccggtcaatacaaatggagaggaaccaaaatgattcgtagctggttaccatatactttcgtgtcatccgatggcagcttagtgcagcattgcagtttacagggctacccgagctgcagattatggtggctcctgtattctgaccactgattgcgctttacccgatcgtcatagatattggatgatatgatcttgtgttctatgcagagttgtaagccaaagttgtgcccctgaagactgaagtgacagccctgaagttgggagtccttcctgattgtgctatgactggaattggtatatatataggttacttgaacggtttcactgtgttgagctcaccacacggccgcgcttctgtaacatacaatacaatagactatgagtggtacagtaggaagcagcagtcagaaaatgactgctggtaccatgctacggggtcgctatagattgatgtgtaccggtactctggttctggtagtatatgctgctgtataattcagtgtttaattatctatatattgtacattagctgtcaagcctgtaaggcattgtattgtgggcaatgaatttggttgcaaatgttcgtgtactgggaaccatcttttgattgtttgtgtttttgaacattgctttgcgcctttgcttgtggaccgccgtcgaaggctgagcatatatccattatcaccagaccagttcttg

SEQ ID NO: 18810 - DNA, 2330 bp, Zea Mays
atactacttatgacccttgctgataagctggtttgtcatgagtatttgctattcttgatcttattttaggcaattattgtctacatacaaccaaaccaccaaaattcaccgggcagactatgctaataattctagattattgtctggtttgtgataccagctataaagtattcctctgctgagcacaacaataacattctggtgctcatagttcttgctcagtatcttccaagattgtatctcatattccccttaacttatgaaattgtcaaagctactggagttgttgcaaagactgcttgggaaggagctgcatacaacatggtgctctatctgatagctagtcatgtgctaggtgcactgtggtatttgctatctgttgatcgccagacattctgctggaagacgaactgcctgaatgaaactggttgtgatcttaagtacctagattgtgacacgacaccaaatgctacatgggcgaatacgactgctgtcttcagtaattgtaatgctagcgataccaatataagttttgattttggcatgttcgagcctgcattgtctaatcaagcccctgctcaaagttttgcgatgaagtatttctattccctctggtggggattgcagaatttaagctgctacggtcagactcttactgtgagcacctatcttggcgagacgctgtattgtatattcttggcggtacttggtcttgtcttgtttgcgcatttgattggaaatgtgcagacctacctgcaatctattactgtgagggttgaggaatggagattaaagcaaagagatactgaggaatggatgagacatcgtcagcttccttgtgaactgcgggaaagggtgagacgatttatccagtacaagtggcttgcaacaagaggagtgaacgaagagtcaatattgcatgctctgcctgcagaccttcgacgtgacattaagcgccacctttgcctgggtcttgttcgacgggttccttttttctcccagatggatgatcagcttcttgatgccatctgtgagcgtcttgtatcatcactgtgcacaaaaggcacatacattgtccgtgagggtgatccggtgacagagatgctcttcatcatccgtggaaaactggaaagctccacaacaaatggtggccgcactggcttcttcaattcaatcaccctgaaacccggtgatttctgtggcgaggagcttcttggatgggctcttgtccccaggcctactacaaatttgccgtcatccactcggacagtgaaggcactgatagaagtagaggcctttgcgctccaggcggaggatctcaagtttgttgccagccagttcaggcggctgcacagcaagaaactgcagcacactttccggtactactcgcaccactggaggacgtgggcctcatgcttcatccaagctgcctggagacggtacaagcgaaggaagatggcaaaggacctgagtatgagggagtcattcaactccgttagattagacgaagtggataacgaagatgacgattctccgcccaagaatagccttgctctaaaattcatagctaggactagaaaagtgcctcagaacatgaaagagttgccgaagataacgaagccagacgagccagatttctcagctgaacccgaagactaaagttgtctttgcttatgctatcatgtacagtggtcatagctgactattgtgaattgctagtcctatttggttcgtgatggaggttacaagccaactaggtatggtgggtgaattgaacttgggttgacggtgccatctgtggatgtgaggaaggtaactcagaatatcaatgaaagcgtaatgaagcttctgactggtatatagactgaatggttgtaagttaactagttgctacgttcatgttgtatattcagacatctctgtgcctatagatttcttgaaaaaaaaaggaaagaaaaaacaagaatacatcattacatagactgtaatcttaaacatctgacataagggtgtggctacgttgtccgtggccgtggaggactgtaaatcatgagggtgtggcttctggtaaaatggctagcaccacgcagtgatgagagatatctcgttgagtcatcagggcgcagattcgaacaggggcggagctaggccgcggattcgaacaggcgcagagctaggcctgtttatcggtgtcagctgacaccggcggctttttgcaaaatcaatgagaaatatttgatatgcgttgtttatccatagagctgatatcagtgtctagtggaatcggctccttcagctggcttcgctccgcatttgtgagacaaaggttt

SEQ ID NO: 18811 - DNA, 501 bp, Zea Mays
ctaattttttgcggcaatgcatttaggttctgagatttatcaggaaacattggtaaatgcacttgcgaaacattttggtgctagacttcttgtcgtggattcacttttgctaccttgggaagagagtggctcttcactcccatcggattgacaaaaaaaaaaagaagttcgaaaactgagaggaaggataaggacgcaaagaaaagaagtaaaaagaggagaaagcataaaagttcatcaaagtcaagttccagctcatcttcagaatcttcaagcagcgacgatgaggataggggttcaaggaagtccagatcacagtcgagatcaaagagaacaaggaaggaaaagaagagccagtcaaggtccaagcacagaggcagtgaaagcgaggaggaaggcccggttgagcgagccgtttaccatggtgttctcaatatgatgctcagctgttaagagggtctggtcaagttgtgtggcttccaaaaactttgtaagcaactg

SEQ ID NO: 18812 - DNA, 291 bp, Zea Mays
  misc_feature (1)..(2): n is a, c, g, or t
nntgtagccagtgtactatgtacataggatgtgccctcctgtgggaaagaaaagaatgcagcagccatgctagaagagggaggggggctccttttgggatattcatcatcgagttagcaggcaatcatgtacagagttgtcatggttcgttggtttagtgcatgttggcctgcagatgacgctccagcattgtggtatttgaatgccaacttgggacaagggcgatttgccatgcatggatggctgactacatatgtctggagcttcgataacacttgaccaccaatttga

SEQ ID NO: 18813 - DNA, 1161 bp, Zea Mays
gccaagcccagaacaaagtggcgcacacacactagcagcaggcgcgcgggccttgcggacgccagcgtgtgccgagcggaggcaggcaggtgtcgctgggcgcgcagcccacatgtcccccgccgcttccgcaccggtcttctcccacctcggccccctcatccctcctccaactccaatgctctccactcttctccgccaccgcctcaccgccgccgcctcctcctcgtcgccgacccacagcacgcctctccgtctgcgccccctcgccgcagccatgtcgtcgtccgcgtccgcgcctcacggcggccggaagccgaaccgcctcgccgccgagcacagcccctacctgctgcagcacgcgcacaacccggttgattggtacccttggggggaagaggctttccagaaggcgcgcgccaaggacgtccccatcttcctctcgattggctatagcacatgccattggtgtcatgtgatggaggtggagtcctttgagaatgaggaagtggcaaagttgctgaatgattggtttgttagcatcaaggttgaccgtgaagagcgccctgatgttgataaggtttatatgacatatgtatcggcactgcatggtggtggtggttggcctctaagcgtctttttgtcacctgacttgaaacctctgatgggtggtacatactttccaccggatgataattatggaagaccagggttcaagactgtattgaggaaggtcaaggaagcctgggaaactaaacgtgaagcgcttgagcggacgggaaatcttgttatcgaacaattaagggacgcattatctgctaaggctagctctcaagatgtgccaaatgacctagcagttgtctctgttgatcaatgtgtcgaaaagttagcgagcagctatgatccaaaatttggtggatttggctctgctcccaagtttccaagacctgttgaagattatataatgctatacaaattccataagtacatggaggctgggaaggagattgaagccttgaacataaagaagatggtgactcacacattggactgtatggcaagaggtggagttcatgaccacataggtggtggttttcacagatatagtgtggatgagtgctggcatgttccacattttgagaagatgatttccgatcaggg

SEQ ID NO: 18814 - DNA, 996 bp, Zea Mays
cgtgtgcgcagccaactctacctatccccgcccccgggatgggcgatggcaactatcctatcgcaacaatatcctggggtgggggctataaaacggagcggcccgcgtggggcgcgcctccatcagccgcagtcgcgtcgcgtcgcgtcgcgtccagtccaatcctcggagcctcacacgggcggacgagcgggagcttctcccaatctcccctgccctgccctgccctgccgccgcgcttagcttcgcatcttcccctcctcctcctcctccttcctcggccaagcgaggagcgaggcgcgggcgcgagcgcgtcgttgagatggattcggaggcggtgcagcacggctgcgcgcattacagccgtgggtgcagcgtcgtggcgccctgctgcggccaggccttcggctgccgccattgccacaacgacgccaagaactcgctggaggtcgacccgcgcgaccggcacgagatcccccgccacgaaataaagaaggtgatctgttctctctgctccaaggaacaggacgtgcaacagaactgctccagctgtggggcctgcatgggcaagtacttctgtaaagtatgcaagttcttcgatgatgatgtaagcgtactcgaatcccagacgatgaacaaagaaactgaactcgatgcgttgtttactgcgtttcttttttcccccttcttcttcacgtacatactgtactgctcttggtccaggtctcaaagggccagtaccactgtgacggatgtggaatataaccggcggcgtggagaactttttccactgtgataaatgtgggtgttgctacagcaatgtcttgaaggattcccaccactgcgtcgaaagagcaatgcatcacaactgccccgtctgctttgagtatctgttcgactccacgaaggacatcagcgtgctgcaatgtgggcataccatccatttggagtgcatgaacgagatgagagcacaccatcaccctgtttggtctttgg

SEQ ID NO: 18815 - DNA, 1085 bp, Zea Mays
cgagcgagagagagagagaggagggtttccagagcggcagcggctgcggctgcctgccaacccctctacccccagctctgcaggctgcaccctaaagcagcgagcctttttaccactcttcctgctaccaccccacacggcgcacacaccaccatctctcgtcgcctcgcctccacttcctgggctacgtacccatctcaatcgcttcgactcctccgccgccgccgccatgtcggggctctacagccagggcttctcccctgcgcgaaacctctcccctcagattagaagcaacccggatgtcgatagccagtacttggcggagctgctcgctgaacaccagaagctggggccgttcatgcaggtgctgcccatatgcaacaagctgctgagccaagagattatgcgggtgtcaagcattgtccacaaccatggatttggcgatcatgacaggcatcggtttagaagtcctagtccgatgtcttctccgaaccctagagctaatctccctggcaatgggttcagtccttggagcggactacaagagagattaggttttcctcaacgaactagcatggactggcaaggagcaccaccaagtcctagcacccaagttgtgaagaagattcttcgtctggaggttccggttgattcttatccgaatttcaattttgtggggcgcattttaggacctagaggtaattctctaaagcgtgtagaagcatccactgggtgccgtgttttcattagaggaaatggttccatcaaagatccagggaaggaggacaaactacggggaaaaccaggctatgagcacctgagtgatcctctgcatatcttgatagaggccgagttccctgccagtatcatcgatgcaaggttgagacatgcgcaggagattatagaagaattgcttaaaccagtggacgagtcccatgatttctacaagaggcaacagctcagggagctggcgctgctgaactcaaccctgagagaggacagccctcaccctgggagcgtttctccattcagcaacggcggtatgaaacgcgcgaaaacagacacccatctgatcgaggttttcc

SEQ ID NO: 18816 - DNA, 161 bp, Zea Mays
acttgcctgggacttgagattctaggtaccaggatgatcttcagctgactcctaacctctcgctagtcgtagcaatacaaacaaacatggtataggcaaaattaacatcacaccaaacataagaacaaattatataataataatctacgcgtcattatgta

SEQ ID NO: 18817 - DNA, 2932 bp, Zea Mays
cacgatcaaccatttctctgtcccgcgcaacaccgatgtggccacaccatattgacttgacaattgctgcacttagggcttgggccctgtttggtccataactcattctagaatttcattatcagctaaatagctcctagattttgtattggtttttgccagaatttcacaatctcaaaataggttgataatagaattcgtttgaattttgcgtagtatccaactcctcaaaatatatgggaaccaaacaccagattatttgtcatttgcgacaggtagcttggatccataccgtcaatcgcatcagatcgtgaatccctttcctcctaccgcgctagggttttgcaacggcctcaatggcgtccaccgccgccactgtcacgtttggcggcaagggcgccgccctatcgccggccgccgtctacgcgctctccatcggcctcgccgccccgggcatcgacccttcggcgcacaaggcgctctccacccgcgcgccctcgccacaggagacccccgcgccccttgccgccgcgctcccggcgctggcgcccgccgagtcccgcgccgccgcggccgtgttgctgaacaagctggtcctcactgcgtccgactctgcctccgcgctcgtcaccgccgccacggccgtcggcctcgcaggctcgctcgacctcgccgccgcgctgccgctcggctcccgggacgaggtcgcggtggcagcggcttccgcgcctgtcgcggtcgggctcgcagcgctggtcgactgctgcgccgcgccgctcgcccgcgttgccgacgccgtcgccgcgctgtcgtgcgaagccgtgcgcggggacgccgcggccttcgacgtgcaggcctccggcgacgggctctcctccaaggacgaggccgacgtcgctgccgacatcaaggtgctcgtcttcgggtccaagcttgtcggcgctgccgggggcgcccccgccgccgccacgttcgccaaggtgcccgcgctgaacgggatcttccgccaggcggttcgggcgctgcacgcccaagtgcgcatcgagctcaacgcgcctgtgaaattggggaagaaggatgccggtcaaaccgatgctgtgtcagtcttgaagggggtgtacaaccacttgctcaagttcagggactttctctcctgggaagcagctatggccatggcagtaattgaaacagacagttcaattgagaagccgcaatctgctgttgacaacgaagcagctggttcaagtgaaaaggcacaggctggtggggacaaagcaaagggtgacaagaagagcaagaagaagaaaactttggggaagggtacatctgctgtgctgatgctgcttagggaccatgtgacaaatggaagtactgttgcttccgtgaattctgtgcttgttgcagagtgggcagcctctctctcattgctctttgatcctaaatgtcccggattggtgtcccttgtggagaaagtgaaggagattgttgagagcaatgaagtcaggagattgcctaaaattcctaagggtacacgtgactttgggaaagagcaaatggcgataagagagcgagcattttcaattataactagtgtattcaagatgcacggtgctactgcacttgatacccctgtatttgagctgagagaaacccttatgggaaaatatggtgaagactcaaaattgatatatgacctggctgatcagggtggtgagctttgctctttgcgttatgatctgactgttccatttgcccggtacgttgccatgaatagcataagcgcactgaagagataccagattgcaaaagtatataggagagataatccatcaaagggaaggcacgtatgagataaaattaaatcacagaaagttgctggatggaatgttggagatttgtggtgtgcctcctcaaaagttcagaaccgtttgctcgagtattgacaagctggacaagcaaacattcgaacaggtgaagaaagaactggtggatgagaaaggtatatcaaatgaaactgcagatgaaattggcaatttagtgaagactagaggagcccccttggaagttttgatggagttgagaaaggatagcagcaagtttatgaataatgaagggtctgttgctgcactgaatgagctggagatattattcaaggctctggataaagcaaatgcaatagacaagatagtttttgatttaagtttggccagggggcttgattactacactggtgttatatatgaagccgtttttaagggttcagctcaggttggctccattgcagctggtggtcggtacgacaaccttgtgggtatgttcagcgggaagcaaatccccgctgttggtgtgagccttggaattgagagagtctttgcaatcatggagcaacaggagaaagaaagaaatgagaagatccggcctacagagacacaggtgctggtgtcaatcctgggaaaggaccttacactagctgcagagctcgcgagcgagctgtggaatgctgggttaaaggcagaattcaagctcactactagggtggcgaaccacatcaagtatgccttgcaatcaggcattccgtggatggtgctagtcggtgagtctgagttgcagaagggaagtgttaaattgaaggatgttgaagccaaccaggaagaagaggttgataggaaggattttgttcaagagctgaagaagagattgagtaaacccaacattcatttgaggcaaaatcaattacggcagaggcggagaatgatactgcagcattgtagtttaaagtgctggggatgtttttgttagattacccgtctagggtttggtgtcttccccatgtaattaccttctcacccctttgtaatggaccagccccaattacctaagtctattaataccacacccaaccctgattagggttagggtttttattccaact

SEQ ID NO: 18818 - DNA, 1621 bp, Zea Mays
tccgaagtcgcctcctcgtccttccttcgctagatgttctccttcgccggcggtcttgttgctagaggcgcccccgacctgtgcatccgtttcaacgccaactcctccaccagctaactcattcggagtaggtttagaaattgattgggattcaattcagctagaccctagatgggaggaggaagactacaagaagttgttaacgtggaagtggtgtatgatacactgggcctgacaaatgaggtgatgggtggaaccaattgtgatggttggcaaaacgattatggtgatgcaggggcagctatagaatgcaaggacattgacgatgacattgtaatgtttgatatgaaaaatccagttatgaggcttggtaacatatatatatagtagcatgaaggagtttaggctcgcaatgatccaatatgcaattaacaaggaatttgagctaggcattgaagctactagtactcgaaggtatagaggttattgtaaaggggatgattgtccatggagtattcatgccagaaaagaagtagaagaatcgcctatcatcattgttactgccatgacagatatccacacttgtacatctagtggtaggtgaaggacaaagacacctactagtggttgggttgctgcccaagcaatacctctcttgaagaagaaacctggcatgggagccaaggagttgcaaaatgcactacatgacacttataatgttcagattgcatatctaactctttggagagggagagagaaggctttgtatgagttgtttggtagttaggaggatagtttccaactttgttctcttggaaggaagctgtgttggagaaaagtttaagaaagcttacgagggaagaatagagcaactaggagataagtctttttggccaaaagtggagatggcaaatgaggtgggggcaccactgggtaggagaggtgtgggcagacaaaggaaaaatagaatcaaaggttgcctagaaggcggtaggggcaagaaagcatgtgcaaacgaaactgtaaagcaatggaaggtaattcggggacaataaggatgtctttggtttgaagtcaaagtaggatgaggcgggggcgacaccgtcccctcaattttttgggatcacgccgtcaccaaaaaattactccggccaaggaagcagcgacattactcaaaaatggtttcctcgcgacgacagatttacacaagaacctagaacaccgcatttcgacaaagttatacaagaccctggtacaccacatgaacagccatcgtcttcgcagccacttccaagggtattgataaaaaaaatcactccaagaaagaggaagtcggttccactaagcatggacgagatgtagtatctgttagttgtatcatccatgtgttgtcagcatgtgactgcagacatgtgccatgtatcagacttattgtatcagactacgttcagcctactttggaagtctcaatgccctgggaaaagaagaagagagccacgagaaaggaaggggcaaaactggaagtctcaatgtcgctccctggttaacgcccagcgttctcagttccaaatgtgaaagaacatcagctttcaaccattgatagtcatggatctcctcctct

SEQ ID NO: 18819 - DNA, 1989 bp, Zea Mays
agttcacccatcgcccagttctctcttctctttctttcttccccttcctacaccgccgcaccccactcccagatcccactgctccccagatccgcgcccgagccctagtccccagatccgccgcggcgccggagatctactcctcgtcttggcgtccgcggcgccatggcgtgcctcgcgatctctctgcagccggtgaacggcccggacatcctactgcaaacgcggtcctggttccccgtctcccgcgccctcgccgccgtctccgcctttcgcctcgcgcgcctccaccttgcacgcggctctgaccatgctgcccctgctgtcaacgccttcgccgtcgccgacgctgtcaaccagtccgtctccgtcgtcgttgcagcctgccgtggcgtcgacgtcacccctgagaaggtgcaccgcaagtaccctgaggtctatctcgctctcgacctcgtcctccacggcgttggctccgtccgcctctctcagatcctcgccaccatccatggcgacaacctcgcgcgcatggtcaactcctcgcccgacgccgaagcccgggcccgtggcgcggatccctggcccgtcgtcgaacacctcgcgcaggaccgccacgctgcgagggagggcttctcgggcgcctctttcgagcttccccaggagacgctcgcggctggtgacgaattctcgtctaacatcgcccccgcgaccactgttgctactggggatgaaccaccacctgaggaggcagcacctgtggaaaaggatcctttcgcagccagtgacctgattaacaacaaaccggaggaggcattggtgggtgggttcaaaaagaacaaagagactgcccttgtggttgctgatcctgcagctgcgctagctggattggaggttacgactttgccaccagctgaggcgactaagccgacatttattggagttgaagggtttgagggtgattatggtggcattgagtttggcaacgatgagacttcacttgctgaggcatttgaagggctcaatgcgccatttggtggtggcctggatgcttctgagtttgttacaacaacgaagaaggatcacaaggacaggaccgtcactgggcttgagttgctagtagcaagtgggcagccaccgaatgcagctgctggtactccattggagaatctcttgctgactaagcgcgcagaaatgaccgctcctgagttgtttattgctgaggagatcaatgcagaattcaaggagtctattcttgtgcgtgttggattgaagggtacaatcttcctgcggaccttgccactgaataaggcagcgggtaaggagacagagttctcatttcgtcttgagggcacatcaggaatgaagagggctgcattgcagagtaatgtcttgagtaacctacaaaatggactgttccatgtcaggaccgtgtcgaaagaagaacccattcccctcatgaagtacagcttcctgccgaagcactcacctctccctttgaggatgcgcctagtgaagcgccatagtggaacgttactctcagtgatgatacagtacgcatccaatccaatgctgccccagcctctgagcaatgttacattcgttgttaagcttcctgtggatcctactctgctcaatgtttcacccaaggctgtgctaaaccgggcagagaaagagtttagatggcatatttcagacattcccctgaaaggtccagccggcaggctcagggcgcggatgcctgttgaccaagactccaaagatggtgagctagaggttgttgggatggtgaagtttgcttaccaaggtccattcacattgtctggcattaaactatgcccagccactgatggcattgcccaatttaatgaagttggccataccttctccagtgggagttacctgtgcatttgataggttttagttcagaatatattaaccggaagtagtagctgctgcttccattcatttctgaagtagcccaactaatgt

SEQ ID NO: 18820 - DNA, 1331 bp, Zea Mays
gccacgccacgcacttggtccacacgtcgtattcggatgaagcatgagagagaagagcaagaaagacttcgtcacgtcaggtcgacggcgaaagacgcggaggttggtgaaggagtgaaggaagaaagagaacgaaaggcggcctctcactcgcagtcgcagtagcaggttctagaccaccaaacccagcggctcccgctcatctcagttcggcttcggccttcgcattcctctacagatttcgcagttttgctgggggtaactacggaatggggggcggatccggatctttcctcaaggtcttggtcaacaacatggatgtcctcgcggggcctttggtttcacttgcgtatcctctgcttcctttctggtcttatgcaaagctgttcttcaattgctggttagtattgccacagttcaatggagctgcacatgtatatgagcattttgtgaggccaatgattgtaaatcagcaagttgtaaacatctggtatattccaaagaaggatgaatcaagtagacctgatgatgtaatttcagctgcacagaggtacattgagcaaaatggatcaaaagcgtttgagaatcttgttaacaagtttaagagttcgaacccaaggcgctcaattctggaggaggtagaggttgaaaggagggccaggattcaactagaatctgaagcgagggaagtgaaccctttcttcaatccagaatatcagtactaggcaaccattttcccttcacttgccaggaatgtgctaggatcggtttggaggaagatgtctggatattaggattgcgttttgcacctactgaatcgatgatattgtgtagatggacaaccataattgttgtagatatgttgtggcgatggaactcatgtaatggtcatgtcgcgaatgtttcatgctgctggaaattatgtattcacactggactctagttatgtgcctcactagtttcttgaaggtagttgttgaactaggtactagtaacgggtgcgcgctttgcgcgcatggtaaacaatatgcaatattgtttttaagttaattattaatgcttgttataattcatatattgccagacgaataaagcaagaataaagcgagagagttttttttaagatgatacagagcatgaaagacagtatagagcacaacagatttatataaaataaaatagagttaagtgagttgtggccgaaggtaatatgtttgttgcgatatttaaagctaccttgttatatttatatgaaatgtctttagaagagttgaacagttatatataattatagaggacattctacaaacttaaaggttgctaataatctg

SEQ ID NO: 18821 - DNA, 1738 bp, Zea Mays
gcgacgtttgcaggatgcacccacatcacggctgtaaaatccgctgcaagtccgtcgattgttgttttatctttcctctttctctatcgaaaacggagcgcctgatacgatagtagcagcacagctagctctcctccccagaatctcgccggattccgccccccgccgcgccctcgcttccgccgcaggttcgcgtctgtgcccgcgcgtgttgtactaccggcggacggcggtgttggtggtggttggtggagttgccgacgacggtaggctatggactaccggccctccgacagcagcggaactgatgatgatcttccacaatttccacataagagtatcagaggcagcggacgtgtcagtggtaatgggcgagctgttgttcctgctggttcatatgctagggcaccaactgatatggagaaggaaggtctcatgactgaacttaggaaggagctaagagtatctgacaaagcacacagggaactgttaaatagagtcaacaacgataatattatatgtagcataagggaatggagatcaacaggagggcttcaggcaagcttgtctaataacccacaactgattcatgactctgttcccagtcctaccacctctggccgtaagaggcaaaagacatctcaatctgttcctgctttacctgcaccgcctcctgcgatgcattcacaacagctggctacaccaacacagccatcatcttcaactgctaggaaagcagtacccccaggccataaaggcaaaaagatgaaaccaggtcagaaggtaccaggtggctctgcagccaagcctataccatcttcagcaggtcctagtggaagaggaccgcacatgaataggggtggttctgctcctgaagctcaagctcagaatgtcgatccattgattggtcgtaaagtgatgagtcggtggcctgaagacaatagtttctatgaagcagtcatatacgaatatgatgctgaaacgggccttcatgcactggtttatgacatcgatacggcagatgaaacctgggagtgggttgatcttaaagagatgggacctgaagacataagatggcaagaggatgactctgggatagaccctgttacatatctgcgcagccggggtggcccaactagtggcgttaggaagccagcaggtcgcggtgggcccatgccaggttctgtaagaggaagaggattacagaaaaacatgcctaagaaagattttccacctccacaaaatggtgttggcaagagaagttccgatgacattgatatccttcataccgagagcctaataaaagaggtggggaaagtttttagcgttagcaatcctgatccacaggaagtagaaaaggcaaagaaagcactgaaggagcaagaacagtcgttgattgacgccatagcaaggcttgctgaggcatcagatggtgaaagtgacgggcacaatcgtgggcgaaggaacttgtatgctgctaaccagcatcaagcaagctacgttggtgccatgcccgtcggtgacagagctggtgccatgtaaacactgcatgaacgcatgcacaacataaaataactgcctgttgtacaatccatcgcctaatatttatcctggatttaggtctctgtaggctcttttgctttgggatgcttttttttttacaattgtaattcagaacgctgaccatgtaaagcttgtagatgcgtgtttctgtctctagctttttgttaaaaaaata

SEQ ID NO: 18822 - DNA, 901 bp, Zea Mays
gtttgggcaagataacgggtttttagtttttacccattggcatcgcccgtctgtactgtacaacatccgatccgaaacctagcaacacccccggacagacgggcgcgaactcaaaccctagaaacggtagccatggattcgggaggcggaggagggagcggcgcgcacaaggcggcctcgggctccgcgccctcgccggcgcctaaccccacggcgatgctttcggcgctcatgagcaagcgcgccaagctccaggaggagctccgctccatcgagcgccaggtttatgatatggagaccacctacctacaggagactaatcaatttggaagtgtgctgaagggtttcgaatcttttttgtcatcctcaaaaaacacctctaaccttaagcgctctcggaaatttcaggctgacgagaggttattctccctgtcatccgttacttctccagcggttgatgaacatttggctggacgagatgatggaagagagtatggagcaggtcgttctaagggtggaagcacccctgcgaacgggcaaggcaaaccgaagaagggagggcgccctggcgggcgagacggcaagagactacggccgtcgaatgacccagacctggacgacgaagatgactactaactcctccatcatgtaggcctactgtagcgggttaacttcaatttagcgtctagcagcacatgattctttacgaattgcttcccttctcgtttgttttgcttggttgcatcttcgcttccttccccaactcttccgatttgtaatataacataggtcaatgaaaattagccagattgttaaaattttgtgcaaactttgttctcagacggtagctttttctggatttccgagttaatatatcttcgttacatccttgaatcctagt

SEQ ID NO: 18823 - DNA, 1648 bp, Zea Mays
atcgggtttcgggtacccattgccatctctacccgcgaagggtccagaacggttaccgaccccggtagcaagcaaagaagcacaatgcatcggcaactgagccacggtagcacgcgtcggcctccggtgcgaagcgacgcggcggtcacgtacgtgtcactggttcctgtctccctacatgaatcccacgtgtccatgcattcggatgtacgtgtcccgctctcatttctcaggagagcggtatttatctacacggcgtttcgaaaccagtaagacgatctgcgaaacaaacactagtgcgtttgcgagagaaaccgagaaagagaagctacagagtcactgaccgaccgctatggcatcgaggcagaacacgcgtgaggcgcgcgccgaggccgacgcgcggcgcgccgtggaggagctggctcgggcgcgggacgagcacctcgagaaggcggaggtgaacgcccgctcggccgcggacgagatcgcgcgctcccgcgccgaccgcggtgccgccggtggcggcggcatcctggagagcgtgcaggagggcgccaggtccttggccagcgccgtgggccgcaccttcggtggcgccaaggacgcgaccgtggacaagacctcgcagacggcgcacaccgcgggcgacaagctcggcgagtacagggactacaccgccgacaaggcccgggaggccaacgacagcgtctcgcgtaagacgggcgagacggcggaggccacccggaacaagctgggcgagtacaaggacagcgccgtggagaaggcgagggagaccaaggacgcgaccaagaacaagctcggggagtacaaggacgcggcggccggcaaggcgcgggaggccgcggacaccaccgccggcaaggcgagggaggcgagagacgtgaccaggcagaaggcgggcgagtacaccgacgccagcagggaggccgcgcaggaggccagggacaggtcccgagccacagcacagaccgccgctgacaaggctagggagacggccagcactcacgacactgatagggagcagggacaaggtctgctgggggcgctggggaacgtgacgggcgcgatcaaggagaagctgacgctgggccaaggtcagcacgtcgacgtccggctgggcggcgaggacgagcgcgcggcgaaggaacgcgcggcggagaaggcggcgtcggtgtacttcgaggagaaggaccggctgatgcagcagcgtgcggcggagcgggtggaccagtgcgtcgagaagtgcgtggagggttgcgccggctcgtcctgcgtgcatcgccaggggaagatgtgatcatgtgatgccgtggcgcgcgcccgcccctacgtgccgccccctactgtggcgtccgtgcatggtcgatgagcgataataaataaacttgttaaactagtagcctcccgttgtgtttaacttcatttccgggcccttgttttgggctgtatgttttcgctccttctgtactctggtagtggtactctatccaatacacctgccgttcgttactacttactacccatcatactacgattgtgttacgatcatcagtttgttggtcagccaacgatgtttgtctaatgtattttacgttactgtactttataattgttacattaccatata

SEQ ID NO: 18824 - DNA, 168 bp, Zea Mays
cttttctattttctgttttcctctttttattttaatttatttttcaaatcctatttcagatttggttctcatcgttaaattcaaactaagtgcacacaaactccatcatgagatgcaacaatgtatagttttattagcacttatttaattcccatatgcataagaaag

SEQ ID NO: 18825 - DNA, 2341 bp, Zea Mays
acactacatcccacctacctcctcgcatcaggcaggcgggcctcgcgtttataagccacccttcctctcctccacggccctcgccctgcaaagcacagacacaaaccacgagcgcgaggcacgacctacatcgaatcggccacgaaccaccatggcggcctcacgcgcgctcctccccagcccgcaggtgagccctgcgagcgcgcgggtccgcctggccgcggccgtgccgtcgtcgctcacgctcgcggcgcgcggcggggccggggccggcgcgcgtctccgcgtgcggtgcgcgatcttgtcgtcgcccgcgcccgtggcgcccaccgagtcgaggccgggctggccgtgctgcggcagttcgcggacgtggagtgcgcctacggcatgtcccccgcggagctcctcgccaaggcggcgcagttcgacgcgctcatcgtgcgcagcggcaccaaggtgacgcgggaggtgctggaggccgggcagggccggctgcgggtggtgggccgcgcgggcgtcgggatcgacaacgtcgacctccaggccgccaccgaggtcgggtgcctcgtcgtcaacgcgcccaccgccaacactatcgccgcggccgagcacggcatcgcgctgctcgcctccatggcgcgcaacgtctcgcaggcggacgcggcgctcaaggccggtaaatggcaaaggaacaagtacgtgggggtttctctggtgggaaagaccctggccgtcatgggcttcgggaaggttgggtcagaggtagcgaggcgagcgaaagggcttgggatgcacgtgatagctcatgatccctacgcccctgccgaccgggcccgggccctcggggtagagctggtttctttcgacgaggccatcgcaagagccgacttcatctccctccacatgccgctgataccgacgacgtccaagatcttcaacgacgagtcctttgcaaagatgaagactggtgtccggatcatcaacgtggctaggggtggagtgatcgacgaagacgctctggtcagggcgcttgactccggcaaagttgctcaggcggctcttgatgtcttcaccgtggagcccccgcccaaggacagcaagctggtgttgcatgagaatgtcactgtaacaccccaccttggagctagtactgtcgaggctcaggaaggcgtcgctatcgagattgcggaagccgtggttggtgcgctgagaggggagctcgcagcaaccgctgtgaatgcgcccatggtcccagctgagatcctgtcagagctggctccatacgtttctctggccgagaagctcgggaggctggcggtgcagctcgtggccggcgagagcggcatcaagggcgtgaaggtggtgtacaccacagcgcgtggccccgacgacctggacactcggctcctccgcgcgatggtgaccaagggcctggtggagccggtgtccagcacgttcgtgaacctggtgaacgcggactacacggccaagcagcgcggcctccgcctcacggaggagcgcgtggcgcacgacagccccgcggcggaggcgccgctggagtccgtccaggttcgcctctcgcacgtgcagtccaagttcgcgggtgccatcagcgacggcggggacgacatcgtcctggagggccgggtcaagtacggcgtgcctcacctcaccctcgtggggccctacgaggtggacgtcagcctggagggcaacctgatcctgtgccgccagatcgaccagcccgggatgatcggcaaggtcggcaacatactcggcgacacgaacgtgaacatcaacttcatgagcgtcggacggacgttcaggggcaagcaggcgatcatggccattggcgttgacgaggagcccgacaaggacacgctggagaagatcggggccatcccggcgatcgaggagttcgttttcctcgaactatgatggctagcagcgagttttctctaggattgatatttgttatagtacgtactgaactggggtttgacgtctcatgtcatggccacagggaggaacctgatccgctctggtctgtctgtctgtctgtctgtttggtgacctctacattttttatgcggggagaaggaagcaatatatattgtaaaaggtgggtgccttggcttgcccccctgcctaaataagaggtgtgtgccgtttgtttatctgtaaactgtgtatgtgtatgtgcttaatgcgtgattctaattaagcacatcatcattgcgtctgaaatgaagacgggatgtgtactgtgtggggcaacaaattgtggtactgtttgttcaactcgaaaaaaaacaggtcaccccaaaaaagaaagaaa

SEQ ID NO: 18826 - DNA, 2737 bp, Zea Mays
ccttctccgctgtatgtgagtctgtccctctcgtgtgtcgcccaaatccatcaccccccacgtctctcccatcccatccccgtgtagatttcaaatccgcgtcagagctcaggtctgggtctcctccttcgccgccagttgcctcctccagtcgagatccgccgtcggggagaccactgaccatggaggccatggaggagctatcggagctcgccgagtcgatgcgccaggcggcgtcactcctcgccgacgacgacccctccgacgacgccgcgccgcgtcgccccaccaccttcctcaacgccgtcgccctcggcaacgtcggcgctggcaagtcggccgtgctgaacagcctcatcggccacccggtcttgccgacgggggagaacggggcgacgcgggcgccgatagtggttgacctgcagagggagccggggctcagcagcaagtccatcgtgctgcagatcgacagcaagtcgcagcaggtttccgcaagtgctctccggcattcactgcaggacagactcagcaggggagcatctggtggatcagggaggggccgtgttgatgagatttacctcaaactgcggaccagtacagctccctcattaaagctgattgatttacctgggatagaccagcgagctgttgatgattccatgatcaatgagtatgctgggcacaatgatgcaatactgctcattgtcatacccgcaatgcaagctgctgatgttgcatcatctcgagctctgaggttggccaaggatatcgatgcagatgggacaagaacagttggtgttataagcaaagttgatcaagcaaatggagatgcaaaaactatagcctgtgttcaggccctactgtcaaacaagggcccaaaaaaccttcctgacattgagtgggttgctctaattggacaatctgttgcaattgcgtcagcacaatcagttgggtctgaaaactcactagaaacagcctggagagctgaagctgaaagcctgaaaaacatcttaactggatctcctcagaataagcttggtagaattgctttggttgacacaattgctaagcaaatccgtaaaagaatgaaagtgcgggttcctaacctattgagtggacttcagggtaagtctcaaatggtgcaagatgaactggcaaggctgggagaatctatggtacaaagtgccgaaggaacccgagcagttgctttggagctgtgccgagaatttgaggacaagtttcttgctcacataacatctgggatctggatggaaaattgttgcaagttttgaaggcaagtttccagacagaattaaacagctaccgttggaccgacatttcgatctcaacaacgtcaaaaggattgtcttggaagcagatggttatcaaccatatttgatatctccagagaaagggttgagatccttaataaaaatagtactggaaatggcaaaggagccatcacgactatgtgttgaagaggttcatcgtgtattgttagacatagtcaatgcttccgcaaatgccacaccaggacttgggagatatcctccattcaagcgtgaggttgttgcaatagcatcaaatgcattggagaccttcaaaaacgacgccaaaaagatggtcgttgcgcttgttgatatggaacgtgcttttgttcctccccaacatttcatccgcttagtacaaagaagaatggaaagacagcgtcgggaggatgaattgagaaatcgatcttctaagaaaacacaagaagctgaacagccaacatctaagagggcctcaagtccccaaacagatgctgagcaaggtggtggcagcttaaaatcaatgaaagacaaatctggccagcaagataaagacacaaaagagggatcaaatttgcaagttgctggtcctgctggtgaaattactgcaggttaccttttaaagaaaagcgcaaaaactaatgggtggagcaaaagatggtttgttcttaatgagaagagtggaaagcttgggtacacaaagaaacaagaggagagacattttcgtggtgtcatcactcttgaggagtgcaaccttgaggaggtagaggaggaagagccttctaaaagttcaaaggactcaaaaaaggcaaatggatcagaaaaaatctcaagtcttgtatttaagattactaatagggttgcatacaaaacggtcctcaaagctcacagtgctgttgtgttaaaggctgagagcatggccgacaaggttgagtgggtaaataagatcaaagctgttattcagagcaaagggggttctttcaagggtccaagtactgagggtagttcaatgaggcaaagcaattcggatggcgctttagatactatggcacgtagacctgctgatcctgaagaagaacttagatggatgtctcaagaagttcgtggttatgtcgaggctgttttgaatagtctggcagcaaatgttccaaaggctattgtgctttgtcaagtggagaaagcaaaggaagacatgcttaaccagctatacagctcgataagcgggcaaagcaatgctaagattgaagagctgcttcaagaggaccataatgctaagcgcagaagggagaagtaccaaaaacaatcatctctcctgtcaaaacttactcgtcaactcagtatccatgataacagggcatctgtttcctcttattctaatgacaccactgaagccgccactgcatcatgcacgtgcgtctagagagagcaca

SEQ ID NO: 18827 - DNA, 708 bp, Zea Mays
tgtcggcgctcttctggctcccgcccttcgcgggacagggtggcggcaaggagggctcggatccgggcgatgagtttggagctgctatagcggcaagctttaggctacacaagacagttcctgagctaagtggaaataaatcctagctcgtattggatatctgaggaagttggcattcctaattccacggtggttgtgaataagctacatccattagatggatcaaactggacaaacatcatcttcagcattgtccctttcccagagaacgcaactatatcatcaacatggttgagcattcttagatcaaagttcatgtccttggttgtacagcagtcaacaatccacttgactaagcctctattcgataattcatcatactttgaagtaattaaattcccaggaggaataacaattatccctccacaaactgcttttcttcttcagaagcctcatgcgacatttaattttactctgaactatccgatctacaaattacaagacaggactaatgagttaaaggatcaaatggaggcagcactactactcaatccatatgagctgtttgcgtgtccggctgcattgtcgaggagttacagatggaccagtccatgcagctgtacctcttgcgttcgccgccggaaaaaattgatggcagatcaaattccagaatgcaacaaattccaaatcattcggtggcttacgttc

SEQ ID NO: 18828 - DNA, 552 bp, Zea Mays
tccttctcaacacacatctttatgagccccttcatacaaggactaacatgtttataaagtttataaggacattatactatcaactcaagcatggttttcaacatacccaagattccaaaagtggggatatgggcaattctctgtgtttggatgaaacatggttttcaagagacatattcctgtaccgtctttcaaaggatttctttacagttgtatttgaagccccagtcgtggatggagaccttctgtcatgggctaggaaactaaaatcgcttctggagactacgtttgggtgggatcttgaggacgacgcagtgaaccttattgatgaagatgacgagtttgctcctgtcgttgtggagatggatggatcataagctaatgaagccagattccatgcagagaagtcagcagttgttcagcgtttctaccttttggtacagtggtgcgctgacttgtatgaagttttactgcttgtgctgacattgaatatacgtgctaattatcgacttggtttccacttgactgtttaaagatgtagataattaaggg

SEQ ID NO: 18829 - DNA, 117 bp, Zea Mays
cggagtggtagtggagggtacacgcgagggtgaggtctacggttcgattcctcacaaccgcgtagcgcgcgaattttgcgcgaaaaatgccgcgacttgcactggggtggtcctaat

SEQ ID NO: 18830 - DNA, 1386 bp, Zea Mays
agcgaatctgctttgcccatagatggaggaagaaacccaactttcgatgagaagttccatatacccctcattgaagggctccgcgagttgaatgttattgtgtggaatagtaatacgttaactcatgatgacttcattggaagcggaagagtatatctgcacaaggtgctgacaaatggctatgatgactcctcatggccgcttcaaacacgccacatgagatctgctggggaagtgaagctcattatgcatgttgatgtctcagcaatgaagaacaagatgggtagaagtgtcgccgcatcaagtgcacatcctgttcctgcactttcaatgccagccccatctccaaccccagccccagccccatctccagcttcggccgcaacccctgctccagcaccagcactagcatcagcgattccatacacgggagtctcaccttcatatccaccggtttcagcatatcctggtgcaaccgcataccctgcttacccaacttctagccatgcaccatataccactgctgaatatccaccacctccgcagcaaccataccaacccccacctgctggataccctccatcctatccaccacaaccatatgagcaatcttacccaccgcaaccatatgagggatcttacccaccacaaccatatgagcgatcttacccaccgcaaccatatgggcaacaaccatacccacccccgccagcagcagagtcgccgtacccaccagcgccttaccctggtacttatccaccaagaccctattgatatagcagcgtcagtaatgatctcaggtagaggcatcaaaagcaacaaacaacagccttgatgctatgtgatacgcgcctcagcgtggattctttatttctaattatttggttatgttcctaacaaaaaatagtaccaaccgtcactgagttgttgcacatctatcacaaatcagtttaaggtcagattccaatcgattggtgacaaattggagctgatggggtttcgttaagtgcaacggatggaaatgtattccttgatcagatcgtgtcaacagctcagtgaccagtcatatgtacaataggtagcttgcagattgtgtcagtgaaatccatcctatattgctttgcagtggtggtttagagaccagaactagcttccttcttctcctatcttggaatcacatctgactgatctgtgaccacacaattgtacatgtagtagggtaacctgtgaagtctgctgcttttccaaaacaacaataaatctgaatgtatttgtaacagtcaataaatttgcttcggtggtgaaagctgttggtgtgtgtgagaagtatttgtaacaataaatttgtttttccatgccttttcttctctggcacatggatttatc

SEQ ID NO: 18831 - DNA, 1275 bp, Zea Mays
ccttcccggcctgctcctccccggccctcacatcctctttcagttccctctctggatctcttcctgaagagaggcactgccacaccaccacgccacccatgctcaacatgatgaccgatctgagctgcgggccgtcgtccaaggcgaaaggagggcagccggcggcggcgccgggctccggcggcgacaggcaggggaggggcaagatcgagatcaagcgcatcgagaacacgacgaaccggcaggtcaccttctgcaagcgccgcaacggcctgctcaagaaggcgtacgagctctcggtgctctgcgacgccgaggtcgcgctcgtcgtcttctccagccgcggccgcctctacgatgtgaagtccaccattgagaggtacaagaaggccaacagtgacacctccaactctggcacagttgcagaagtcaatgctcagcactaccagcaggagtcctccaagctgcgccaggcgatcgatagcttgcaaaacgcaaacaggaccatagtgggagattcaatccacaccatgggcctcagggagcttaagcagatggagggcaagctggagaaggccataaacaagattagagctagaaagaatgagctcttgtatgctgaagttgaatatatgcaaagaagggagatggatctgcagactgacaacatgtacctgaggagcaagatcgccgagaataataatgaaacggggcagccagcgatgaacatgattggagtgccgtcgacgagcgagtacgatcacatggcctcttttgttgactcgagaaactttcttcaggtgaacatgcagcagcagcagcctcagcactactcccatcagctgcaaccaacgaccctccaactcggatgatgaaattaagaatcttcggccaacaatccatgcacgcaagcacgcagtaaatcatgtgtgtccaactcagataaaaaaatctactctagcgtttgtataattattaataatcgtgactagtaaactgttatatatatatgtatagccatgtgtgtggtggcgcctacatatatgtcatgtggctgtacggcgagtttttttttcacaagcgtttgcagcagcatttggtgttgctcatcgatcaattaatcgcaagaaattaaacttgtcaccactgtgggtgtacgtgttaatgcagttgttgtatctgttaattgtaccctccatcagataaacgcgggtgcgcgtatgcatacttatttatgtgtatgattatttgtgtggtttatatcgccagtacgtg

SEQ ID NO: 18832 - DNA, 2198 bp, Zea Mays
gattagacttcactattattagccaagctgtaacttcaagcaagcgactgtgatgtcatcccaagattctattggcacggtgctcaagtgtatgcagaagggtgcggtggacttccttgtgaaaccagtaagaaagaatgagctgggtaacctgtggcaacatgtgtggaggaggcatgcaatgaattgccagacaaatggatcagaaaataatgcagccagcaatcatgtaagtaccaatgttgctaatgggtcaaagacaggagaaaacaatgatgaggaaagtgatgcccaagtgctccaagtgaaagtgagaagaatgtgcgttccaaatgccttaatggtattacttctgcaaaggtggctgagcaaataatggataatgccttgaggatcacggatgcaagttcacgtcgtccaaccaatcttggcaaagatttggctatgactgaaccagcagctgatagaaaatgccaatctttagtgatggaaaataatgctgtcaaagaaaagaaccctggtgaaaagtcgaagagtgctgtaataggtcatgctgattcttacccctcccaatttctcgagaccaacttgggaaaacaacagtatcgtaatggttacaagaatcaagaattcagggaaaaagatatctttaatcactcgaattcttctgccttctcgagatatggcaatagaaggatagaatcatcaggtgagatacagtttcttccttctcgttgcattgttgggcaagagcagcatgttcatggcaaggacccagttttccaacccaatggggtcttgctgcctcccaatgaccataatacaggtgagagtacaaggcaagctcgaattactctggacagtagcatggagggtgctgacatcatttgctccagtagtgctagggaagatgctggtgcaagtagttcttcccatagaaaggacagtatgagccatccctcatatgggtttgtacctgttccaattcctgtcggtgccatgatgccctatcattgtggtgcaattctgcagccagtatactacccacagggtccacttatgcactgtaattcatctgcaatcaacaaggcaacaattcatcaaacctctggccaatctaactaccgtgaagattgtggtagtggtagaccatctcaggttgatgaacacaaacagtcagaggaaaagcaccagttgcatcattcaagacaaattcatcgggaatcaggacaaccagttgacatggttagagctcacatggatcatgctaaccagagtgcaagctgcagccgggatatctgtaaaggaagcggatgcacgggtagcggtgaagccgataccaatgcgaacacgacggttgccctagagagtggcaacgagagtggcatccaaaatagtgacaggtctcaccgagaagctgctttgatgaagttccgcatgaaaaggaaagacagatgcttcgataaaaaggtcaggtatcatagcaggaagaagcttgcggagcagaggccaagagttaaggggcagtttgtaagccagaagctgaaagcagctatggcaacggaagccgaaactgactcgtgacgggcgctagtccagaactgtaattttggttcttcccttcgcgccaggtgtgggcgattggactggtaagtctgaaggctggcaaaagtttttttttcttccttccatggttagcctttctgtacaaaggtgaactccacgtcgggtgtttgttggcatccaagccttattttttgcgaggtacatcaagttgacaaaatgttcggagggatagggtgaaaacggtgcaagcgccatatttcgtccatacgcttaggtgtttgtggagtgtgaaagcagagcctgtacagcatattcaccacccattctgttgccattacaattgtagtaacttgtaattactactatgacaaaagtagacactgttgtagaacttacagccagcaggtcttttccatatgggacagtagcattttatttattaattggttgatcatatgaggacagtcccgaatgcaggacagttaagatttgtttgatccaatccaatcatccagcattttgcttgccttaaactggacaaggaatcagcagggtgcacaccttgtccttgtcagctattggtacacagcagcatatatcctttgcctgtgtttgctgtactactactctgg

SEQ ID NO: 18833 - DNA, 3008 bp, Zea Mays
ggccacgccaaggatggaggagcagccggtggctaaaattttggctggctccgcgggcgcacgtcgtttagcgtttccgctcgccttgggaccttgcccctggccctccgagatgccgggaccggccgtggaggcagcggccaggggcggcggctgctgcgggaagacggccggcaagtgggagaagacgtacctggatgtcctgggcatctgctgcaccgctgaggtggcgctcgttgagcggctcctggcgcccatcaacggcgtgagggcggtcaccgtcgtcgtcccctcccggaccgtcatcgtcgaccacgacacggccgccgtctcccagttccacatcgtgaaggttctgaacaaggcgggcctcgaggcctccgtccgagcctatggcagcagcgccggcgcccccgggcggtggcccagcccgttcatcgtggcctgcggcgtgctgctcgcggcgtccctgttcgcgccgctcctccctccgctgcggtggctggcggtggcggcggcctgcgtggggtcccagcccatgctgctgagggcgttcgcggcggccggcaagctcaccctggacatcaacatcctgatgctcatcgcggtggccggggccgtggcgctcgggagctacacggaggcgggcgccatcgtgttcctcttcaccgtggccgagtggctggagacgctggcgtgcaccaaggccagcgccgggatgctgtccctgatgtcctcggtgcccaagaccgtggtgctcgccgagacggggcaggtcgtcggcatgggtgacgtggcggtcggcacggtcgtcgcggtcagggccggggacgtggtccccgtggacggtgttgtggtcggcgggcagagcgaggtcgacgagagcagcctcaccggcgagtccttccccgtgccgaagcaggcgcagtccgaggtctgggccggcaccatcaacttggatgatgtcgtgtgatgccgcaggttacatctccgtgcggacgacggccctcgccgagaactcgacggtggcgaagatggagaggctggtggaggaggcccagaacagccggtccaggacgcagcggctcatcgactcgtgcgccaagcactacacccctgccgtggtcgtcctcgccgccggggtggtcctcgtgcccgtcctgctgggagctcccgacctggagcactggttccggctgtccctggtgctgctggtgagcgcgtgcccgtgcgcgctggtgctgtccacgcccgtcgccaccttctgcgcgctcctgcgggcggccaggatggggctcctcgtcaagggaggcaacgttcttgagtcgctgggcgaggtcagggtcgccgcgttcgacaagaccgggaccatcaccagaggcgagttcagcatcaaggacttccttgtggtgagggacaaggttcaaatgagccagctactttactgggtatctagcatcgagagcaaatcaagccacccaatggctgctgcacttgtcgagtatgcccagtccaaatctatacagccgaagccggaggacgtgactgagacttgcatctaccatggcgagggcatctatggggccatcaatggaaaacacatctacatcggaaacgaaaggatcatggcaaggtcctcgtgtcgtcaacaagaagctggccaccgagaaacagatggcctcaaaggcgtgtccgttggtctcgtgatctgcgacggcgatctcgtgggcaagttttcgctctccgacacctgcaggaccggggcggccgaggcgatcttgcagctgcgatcaatggggatcaagtcagtgatgctcaccggggacagcgaagcggcggccaagcacgcgcaggagcagctcggcggcgtcctggaggagctccactcggggctcctcccggaggacaaggtccggctcatccgggggctccaggcgcggcacggggcgacgctgatggtcggcgacggcatgaacgacgcgccggcgctcgccgcggcggacgtgggcgtgtccatgggcctgtccgggtcggcggccgccatcgagacgagccacgccacgctcatgtccggcgacgtcctgcgggtgcccaaggccgtcaggctcgggcgccgcacccgccggaccatcgccgtcaacgtggcctcctccgtcggcgccaaggccgccgtcctggcgctcgccgtcgcgtggcgccccgtgctgtgggtggccgtgctcgccgacgtcggcacgtgcctgctcgtcgtgctgcacagcatgctgctgctgagggacgcggcccgcgcgcggcggaggtgcggcggggcgtccaaggcgtgctgtgctacggcgtgcaaggcgcccaagacagcgtgctgcgctacggcgtccaaggcgtgtggcgcgacgacggtgaagcctgtggccacgaggccccagcccgcgggcgcagggaagaaggccgataggccaggaggtgacaagcatggtaatggtaaagacgactgccatcgttgctgccacaagcagagcaagctgcccgaggacgccgtcgtgatcgccataccggtacgagccgtggagcaccggaaggacgcggccgctcacgagaaggcggaaggcaacgccgccgggggatgctgcggtggcgctcccgcttcggccgcgtgctgcgcggaagcacacggtggcgaggacgaggtgtgcattgtcatcagcgcgaggtcgccctgctgcagcacggcgaggagtcggtctgcttctcccaaggacgccatgtgctgcggctccggtggtaaagacggcggcgccatctcagcccttgtgtgctgacctgacctacaacactagcatctgtggaatatcacgagtacgacttcgtagagtgctcttgtactacgctccccttagatcagttgggaatagtggctggcccattgtcagccttgtttttttttcatcaccgtcgccagcttgtgcgttgccatggtgaaatgaaaacagctgttcaattttcagctcctg

SEQ ID NO: 18834 - DNA, 853 bp, Zea Mays
caagaagccgttgccagttgccacggttttgcccgtatcccagcaccagcaggccagaaaagcccagccaagcggagccaaccatccccgcggcagtcaaccccccaactccgttcattgcggcagccaaatcgagatctcgcccgtgctgaatcccaccactctcgccgacccggccggccgcagcaagcgcagcgcatcgacaggagccgaagaaccgaagaggagatggcgtcggcgctgtcctccctgcgctacggcgacagcctctcggtggtgggcatctccgccgcgacggccgtgctctgcgaggccatgtcctggctcctcatctaccgcaccgccacctacaactccctccgcgcctccatcgagcgccactcccgcaagctagacgccatgaagtccggctccacctccgcctcctccggcaccgctgcctcctccgcgcagcccgcatcgtcgcgggctaagaagatggaccgcgtcgagaccagcctcaaggacgctgcgcgggagctctcgctcgccaagctcaagtcgggcgccgtcgtcgctgtcatgctcttcgtcgtcttcggcctgctcaactccctcttcgagggccgcaccgttgccaagctgcccttcgcgcccatcccgctcgtccagcggatgagccaccgcggactgcccgggaacgatcccaccgactgctccatggttttcctctacttcctctgctccatgagcatccgaaccaacctgcagaaactgcttggcttcgcgccgccacgcgcggctgctgcagccggcggtggcctcttccccatgcccgatccgaaagttaattgagagtgaagtttaaaatagt

SEQ ID NO: 18835 - DNA, 780 bp, Zea Mays
gatgctgagcttctatctaccccacagatcgtggaagctagagcaatgcttatgcaacgtttgcaataccagtccaaacttgaaactgagcatctaggtcatcataaggatgaccttggagttcaattacgaggagacaccttgaaagatgctacagaagcattcccattcacgcgatgggaagcagcttctgttatgcccataacagaaattgagattgagaagcatcctatccaagtaactgaagttgcagttgtggacaaatcggtcatcgaagaggagctgcccaagggtcatgctgagacctcaaatgttttgcaagaggcctttgatgatgacatagacgattggttcgaggaggctgatcttgctggccacccaactatccacataggtgacgaggaagacgtgtcttttagtgacttggaagaggatgacgtgaaatgatttatagttgcaattgcaatttgcaaagggagaaatcgacctgtgtattggaaactggacacctctgctgtaaaagaaaatggaggtgaaagttgttcgtagacacctctgctgtgcaagaaaatggagaggtgaaagtttttcgtgaatgggattgggtgtacattgaaaactgagcggtgttgttcgcgaaaagggtgtacattgaaaactgagcggctttgttttgcactcaagctgctagggtgaacgcaatgtgatccactcaagatatgatggggaagttattggaaccgacgcaccaatggaagcgtctatgcagaacaacaggtg

SEQ ID NO: 18836 - DNA, 1636 bp, Zea Mays
gagagaggctcgatggcgatcaggatgccggcgctcatcttccgccgccgggcggccgccgcagctccaaagccgatacaacagtacctcgctggtctatccaccgcagtggagcacgttattccagaagataacggtcacattgccggtggggaggagaacaagaagcggtgggtggagcttcctcccttcgcaccactcgacgccaacgccaccgctcgagctatctctcggggagatggtggggaaggagcatgctccaatgccacggctatcaggtgggtccgacactgctgcccacacgtaccagcgtcgctggtccagaagctgttccgcctccgcaaggtgaagaagaatctggtgactgctgatacctcttcaacagacagtattactctgcaactccggttgagaagggtttcagcaaaagatgaacttgtgcctggtgatattctctttctacctgttaacattcaagaatcttctgttaccgagaagaccaagaaatttggtaacaagaatgagattgattttctacgtgaccttgaaatctacaaggatagagccatcattgtgctcaacaaaccacctggaatgccagtacaagtccacaggcttgatagggattgcagtggcgtccttgttctgggaagaactcaatttagcgcttcccttatgcatgctatatttcgtgagaaaactgctgatgctttaggtgatggtactcaacaagtactgcaaagaaaatatgttgcacttgttattggaagacctaggcatcccaagggtttattgtcagcaccacttgcgaaggttgtattacaagatggcaggtcagagcgtctgactgtttgcgctggttcaaatactgcttctgttcaagatgctttgacagagtaccgtgtgattgagtcttttcctcaagggtacacttggttagaactattccctcgaactggaaggaagcatcagctccgagtccattgtgcggaggttctgggaacacccatcgttggggattacaagtatggacgccaagcacaccagaactggatgcctctccccatgccacaaacaatcgacaaggaaatgctgaagaagaggaagcttccctttggtcttactttgggcggtggaagcgtagctgagcagcagcctcagctgcatctacactgcaagcagatgatccttcctgacatctcagcagctatgcaacagctgcggtcttcagatgctgaccacgatttctctgatctggagaagctgagctttgtcgcgccattgccattgcacatgcagttaagctggaagattttgttgtccgtaggcaagtagtgttgtcatttcttctttaggcatgcttgcttgctgtgctgtaataactttataactgcgaggtttgcgttaagacgtcgtagaaagcttaatttgggctgttggagcagcggacctctaatgaggtgaaagatgacatcacactcagaaacgatgttgataaatattttattgttttttcttttcgttctggtctcccaacatgacttttcatatgatggcggcggcggcacgccgccgttcaggcgctggggtgtgagtccacgacggcgcgaccgcaagcagtcgctgttgatgtagg

SEQ ID NO: 18837 - DNA, 376 bp, Zea Mays
atccgggcggaagacattgtcaggtggggagtttggctggggcggcacatctgttaaaagataacgcaggtgtcctaagatgagctcaacgagaacagaaatctcgtgtggaacaaaagggtaaaaggtcatttgattctgatttccagtacgaatatgacccgtgaaagcgtggccctatcgatcctttagaccttcggagttgaagctagaggtgtcagaaaagttaccacagggataactggcttgtggcagacaagcgttcatagcgacgttgctttttgatccttcgatgtcggctctccctatcattgtgaagcagaattcaccaagtgttggattgttcacccaccaatagggaacgtgagctgggttt

SEQ ID NO: 18838 - DNA, 1710 bp, Zea Mays
gccagatcccccgcctcgccctccccgccggcctgcgccgccgcgagcaagcaaccgctccatcgcccaccatggcgctacgccgcgtcgcctccgttctcctcagaacccgcctgcgaggccccgtcacgtcccccgcgcgcaaagccctcgtacaccctctccaagcgccgccccgccgccaattctcgccgcggccgcctcctcccgtccccttcgccgccgccgccgccgcggatgccgcggaagaggcgttcgaggcagcgaggtcaactaacgacatgctcgctgcattctcccgcctcgaggccaccgtgcccgccaacgacaagcgcctcgccctcgcctgcctcaagctcggccagcacctcgaggcgtccggctccgccgacacgtcccgcgtcctcgcgcttgccctccggtgcctgggcatactcgaggccagccccaacgcctccaccccctcctccgcctcggacgccgtctcgctcgccatggcactccacctcgccggctccgcctccttcgacctctcccgcttccacgacgcgttgtccttcctctcccgcgcgctacgcctcctcgccccgctcctccccgaaacaggcgtcgcgttcgaggttggggaggaaccgggagggttcgacgtcaggcccgtggcgcacgcggtgcggctgcagctggccaacgtgaagacggcgctggggaggcgggaggaggcgctcgccgacatgcgcgcctgccttgacctcaaggagtccattctgcctccgggcagccgggagctgggagtcgcgtaccgggacctcgcggaggcgcacgccaccctgcttgacttcaagcaggcgctgccgttctgccagaaggcgctggagctgcatgagtcgacgctcggcaagaactccgtggaggttgcgcacgacaggcgcctgcttggtgtgatatacactgggctagagcagcatgagcaggcgctggagcagaacgagatttcacagagggtgatcaagagctggggtgcagctagccctgacctcctcctacatgctgagattgatgcggcaaacatcaatattgcattgggaaagtttgatgaggctgtcagcgtgttgaagaatgtcgctaagcaggtgaagaaggatagcgagacgcgagctctagttttcatatcgatggcgaaggcgctcgctaaccaggagaaggctggggacacaaagaggtgcttggagattgcttgcgacatcctggagaagaagaaattcgcgacacccgacaaggtggcagagatgtacatagaggtatcctcactgtttgagacggtgaatgagttggaaaaggcaatatctttgctgaagaagagcctgggaatgcttgagaggatgcctcaggcacagcacctggagggcaatgtcgcagcgaggattgggtggctgttgcttttgactggtaaggtctctgaagctgtcccgtacttggaggatgcagtggagaggatgaaggacagcttcggtccgaagcattatggagtagggtatgtgtataacaacttgggtgctgcttacatggagatggaccgtccgcagtctgctgcacagatgtttgcgctcgctaaagaagtcatggatgtctccttagggcctcaccattcggataccatcgaggcttgtcagagccttgctaatgcctacaatgctatgggaaggggaggac

SEQ ID NO: 18839 - DNA, 1013 bp, Zea Mays
cggcagcccagcagctaaggtagttgtttcgttgggctgagacctcccacgctatgttgggccgtgtgtgccatacgcgggcctcttcgtgacatccaatgcggttcccctcccctcctacagtcccacagcagacagcaccaccggataaggcaggcaaccgctgcccgctcacgtctggcgtctgggagcctccgattctgagagcagcccatggcgcggggcgcccacgtcgtccgagcactctcccagccacctcgttttgtccgagccagcagctgcgccaggccggtgccgggagcctcgcggcggcggcggcggggccggctcatggtggtgcgggccggtgggccgcccagcaccaacgcgctcatcctcgccttcgtgcttccgctctccctcttcgtcggcacgctcgtcaccgccgcccgcgtcgccgacgacctcgacgaccgcttcctgagggagatggagataaaccgagcgatactggaagagaacgaggcgtccgacgaggacggtgccggtgaggaagacgacgatggggaggaggaagagggggtcgacctgccggtggtggtggaggaggagcccgccgttgtcggtccacgcaccaggaacaggccgagaagacgagtgttctcttctcaatagtgttggttctgatttacaggattatgtgcaccaaaggttcgtgacgacgtagtgttttgaattcttgtaaggctcctcttcaaagcccacgccgaagcacatctgagtacttcaaatttaatgtatatccatatgagcaatctaacgagttcaagaattttaatttatcgcctgtgcaatcatagtggacagaagcgtggtccgggtcagtggccgatccaggggtaatttagatggaaaaattcctactatgccatcagattttatactcattccttatgtattattgagtaacatgtatgtatacttttttgtgtatgacatgtggggccgatgacatagaagtaacgagctctcga

SEQ ID NO: 18840 - DNA, 169 bp, Zea Mays
agatatttaaaggtggtcatgagtgggtaagttggttttagatagtagaggtttaagtggtagaatttgccgggacaggtttcatatttttcgggtccaaacggagtttctacattatttctacgattatttaggagtggaaaatattctactaaatgagcatggcttg

SEQ ID NO: 18841 - DNA, 1280 bp, Zea Mays
tccaagatttgatacagtcaagttcaatgctggaggcacaaaaggctacatcaggtgctgctggatcaaatactacaggtcaacccgaaggtggctctgattctagaactgtctttgttagcaacgtacattttggtgcaacaaaagatgctctttctcgacacttcaataagtttggagcgatcttgaagacccatattgtgaccgatggtgtcactggtcagtcaactggctcagcgtatattgagttcttgcacaaagaatcagcagagcaggcgttaaccctgaacggggcatcatttatgttacgcattttgaaggtcgttcggaaaaactccactgaagcaacccgatcgcctggcttgcttcgtgtttcgcggggatcaccatttgcttcaaggctcattagaactgcatacccaaggccaacgtttcctggtgcaatccgtggacgactgccactcaggggtgttgcccagagcttacagtggaagcgcagtgccacagattcctcaaatgctgtaaaaccaagtcaggctgcaccttcagctcctgggaatcagttggtcaccccgaccccacgaagcttcacctacacacgcacggagccaaaaccaaatgacggtgcgatggcttgactgctcagctgcagcatgccgcagctcctgatgaatctcgcagaaagagttcgtgatactgttacgtggttcattcagctgcttttggtaaatatttaagtagctgcagatgttagtttgtagcaggctggtttttgtggaccaaaacctttgagcgatattctgtgaggttttctgtgctgtttttcaccgtcagcacatattctgtgctggctggctgttcggagttcgtggatggagagtaaaatatatataaaaaaagtggtagtaaaggaaaacacggacgcgataaaaacgttgcaacatttgttattattttttgatggattatttagcctccacggtttccttgtcaaggggggtgatctgtgagattgatcataatatccaaactaccggatggtcttgctgtctcagttttgtaaatagaaaaaccttcacctgtggggtatggttgcctactgcacgtctgcacattagcaagtgatggtgcgtgtttcgactcaaatgtttttttgcatcctgtcttgtgtagaaaaagaaaactgaagacctgtctgttctgggtgtctgctgtatctattttctcagagagaagtgcattttatcttggaatcagcgggactcacgggtggctgaagt

SEQ ID NO: 18842 - DNA, 1968 bp, Zea Mays
gcggacgactctgccttcctcctgctgctccttgacccgcgggtcacgggaaatctcttgccaagaactcagtagaaatggagttcttcacagagtacggagaggcaagccagtaccagatccaagaagtcattggtaaagggagctacggagtagttgctgcagctgtggacacccgcaccggtgagcgggttgctatcaagaagatcaatgatgtgtttgagcacgtctcggatgccacacgcatactgcgggagatcaagctcctccggttgcttcgtcacccagacatagtcgagattaagcacatcatgctccctccttctcggagggagttccaagacatctatgttgtttttgagctcatggagtcggatctccatcaagtgatcagggcgaatgatgacctcacccctgaacatcaccagtttttcctgtaccaacttcttcgagctctcaagtacatacatgccgctaatgtattccatcgtgatctaaagcccaagaatatactggctaactcggactgcaaactgaaaatatgtgactttggacttgcccgtgcatcattcaatgatgccccttcagctatattttggacagactatgtggcaacaaggtggtaccgggcacctgaactatgtggttcctttttctccaaatacactcctgcaattgatatttggagcattgggtgcatatttgctgaacttctcactggaaggccactatttcctgggaagaatgttgtacaccaattagatattataacagatcttcttgggactccatcatctgagaccttatcccggattcgaaatgagaaggccaggagatatttgagctgcatgcggaaaaaatatcccgtgccctttactcataaatttcgacatgctgatcctttggctcttcgtcttctagagcgtttgcttgcatttgatcctaaagaccggcctagtgcagaagaggctctagctgatccatactttgcatcccttgctaatgtggaacgtgagccatcaagacacccgatttctaaacttgagtttgaatttgaaagaaagaagctggccaaagatgatgttagagaactgatctatcgagagattttggagtatcatccacagatgctggaggagtacatgaaaggcggagaacagattagcttcctctatccaagcggagtcgaccgcttcaaactgcagttcgctcatcttgaggagcattacagcaaaggagaaagaggttccccactgcaaagaaagcatgcttccttaccaagggaaagagtggttgtatccaaggatggcaatactgaacaacaaattaatgaccaggagagaagcgcagattctgttgcccgcactaccgtgagccctccaaggtcagaggatgctgacatggatgatgtgaaacccacaagcttaagctctcggagctacctgaagagtgcaagcataagcgcttccaagtgcgtcgttgtcagaaataaacacccagagccagaggatgatggaatacctgaggagatggaaggcaccgtcgatggattgtctgaaaaggtctccaggatgcactcctaaggcaggactgtccatggcgacagcaatctcgacacaagatttctgtctggtgcactgtaatgccgacgacacactgtttggatcttgtgtacacccacagctagttcaactaagatgtagcactagttcgtccatggaggaagcagaatggacgatgaagtgtggtcagcctgtcgaccatgaggtgttttcttccaatggagtctagggtatgtttgagttctacaacggcttgtgccgtacgaagtgtcagcagtgtacgaggaggaggatatcgttgtcagtacacattttgcctgtctagaaaattatgagtactttctccgatcacaagtacatgtacatccatgtttgtcttaagataaaaaaagaaaattcacaaata

SEQ ID NO: 18843 - DNA, 1254 bp, Zea Mays
cagcttccccaagccagcggcgaccatgatctccccggacaccatccgcacggccatcggcgtccatgatctccccggacaccatccgcacggccatcggcgtcatcggcaatggaactgcactcgtgctcttcctctccccagtgcctacgttcatccgcatctggaagaaagggtcggtggagcagtactcgccgatcccgtacgtggcgacgctgctgaactgcatgatgtgggtgctgtacgggctgccggcggtgcacccgcacagcatgctggtgatcaccatcaacggcaccggcatggcgatccagctgacctacgtggcgctcttcctcctctactcggtgggggctgcgcggcgcaaggtggtcctgctgctggccgccgaggtgggcttcgtcggcgccgtcgccgcgctggtgctcagcctggcgcacacgcacgagcgcaggtccatggtggtcggcatcctctgcgtcctcttcggcaccggcatgtacgccgccccgctctccgtcatgaaaatggtgatccagacaaagagcgtggagtacatgcccctgttcctgtcgctggcttccctcgtgaatggcatctgctggactgcttacgcgctcatccgcttcgacctctacattactatccccaacgggctgggcgtgctgttcgcggtggcgcagctggtgctgtacgccatctactacaagtccacccaggagatcatcgaggcgcgcaagcgcaaggccgaccagatcgccatgaccggggtggtcgtcgacggcggcaagaccaacaaccaagccggcgcgggccaatactgaccgacgatcaagtgacgatcgacaccaatatgctcaagcaagaagccagcggcaaatcaattatgtcgccgctgggttttatgtattttgtgattctatatgcacgctgcttgtccgtcccggccaatggaaaaaaaagggggaagaaaaaatgtctgtcggtatatgtgttctcgccgaataactctcgcgcatagctagctggtggggctgagtcactgccttcgctatatgtatacgtgcaaaaattagaggtggagggttgttttagctaatcccaccttaattccaaggcagagtgacctttttttttctccttctgtttcggctaggattttgctataattgagcaatttagcgcgacttgttattggtgttggtgtgtctcaatcaaatagtaaaatgttcattttactctttcaatcgcatc

SEQ ID NO: 18844 - DNA, 2085 bp, Zea Mays
aagacatctcgtttagtcattttagtcaatggatatctattgtttcatctcgaggtacctgccatatttttacattgtccccatttggtggtgatgccagtctgcagccacagaattctcacagtgatgggccccctcttgccccatgtcagtcaaggccatggtggtcaaagccatcctttcttatggaccaacagcttcaccaagttccctcaactgtgacacattcggttgtcagtaggataaagaataacacttctggttggctaaataatgtcagcaatgtggctgcttctgcaagtggaaaactatctgtaccatctggcgctgtaactgctgttttccataattccatctaccagggttctttgccagttccatctaaggctaatgctttagagcatctactggtgtattcgccatctggtcatgtcattcaacatgaacttttaccttcttcaggttctgagtcctctggtagcagcccaagagttggttcaggtcctaacttgcaactacaagatgatgagatgcatgttactgctgaaccaattcaatggtgggatgtgtgccgtaggacaaactggccagaaagagatgaaaacattgccaacattgtattgtataaccaaagaagcagtatgatggctatgggtgcttctgactgtgaagatagcgagcattcggattccactgcatcaaatgatggtatctctgggaaagagattatgagaatccgagaaaggtcaagctggtatctatctaatgcagaagtacagataaactcgtggcggattcccatctggcagaaatctaagatttgcttctatgtgatgggctatcctgctgcagagttggtcgaatcagttagcagtggtggtggagaaattgagattgagaagttacctcttcacgaggttgagatcaggagaagggaattgctccctgtattcaagcagttccaatattctgatcgacattccagtgataggctttcagaatgccttgtcccacatcagtaatgcacagaatagctctgtaaaggataatggtgaatatgaaaccaaaccggtggctttgtctgggttttacgcagacacgaggaaaacagctaacacaaatggtctagctaggcaaacattctcagctgttaatcttcagcaagtggggaagtgcaattctattgaatctcttaacactgcaattgtgtctggcaaaacagagaatgggaacaatggctatatatccacgccacctgaaacaaaagcgtctatcagatcattgagcagctattctctcttggatggacatgtggacggaatgctgtctccaaatagcgcatcacacaagccagaaacaacaaataattctgtgctcagcaatgctgcaagcactgatgtacaaaatgggtgtctcaccactgtcgattctggacagcaggaggcgtctcattctcacagctcagtggagtttacccagtatttccaagagggctattgtaaaatatcagaactcgatgactgccgtgagttaactgaagctgttactgatgctgacagcagcagcagccactgcgagagagagaagcccgaggaagatggggataacgatgatttgctcggaggagtttttgccttcagcgaagaaggttgaacttactatatactgccttacttgagatcgagatataacgaaaaatgtgctcaaaacaaaacattcagtgtgcaatagtatgtaggggatggctttcatggaataaagctgtgtggaatcgatcatctggtacatatttttcaaggagttggtgttgtcgagaagttgctattgcctgccgtaacaccagttccttagcgttggtttgtacatatactgtaagacccatttgttttgtgccatacttccgggacatttgggtggttctggatctcgtaccttggcagccgtatttgttgaccgcctctgccagggcctgtgaatgttccatgtttatttgtacatatactctctgttttttttgggagaaaggaaaaaaaatgtagtgacaaattaactttataaacattcagtaaaggatttgcgttcatg

SEQ ID NO: 18845 - DNA, 3431 bp, Zea Mays
  misc_feature (3430)..(3431): n is a, c, g, or t
aagccccaaccacccttagcacccgctttcgtctcgctgcgtgcgctctctgtcactccccctcccctcccccctcctcatcagatccggccacctcctgctcacctcgcctcgccgccggtcccgcgccccggagccctagagctctccccgcggcgtgggccgccggagtccccgggcgcgcggagagaatggaggcggcgctggaggcggcgcgcgccaaggacaccaaggagcgtctggccggggtcgagcggctgcacgaggcgctcgacgccgccgcgcggcgcgggctggcggcggccgaggtcaccgcgctggtggacacctgcatggatctgacgcgggacgccaacttccgcatcgcccagggcggcctccaggcgctctccgccgccgccgtcgtcgccggcgaccacttcaagatccacctcaacgccctcgtccccgccgccgtcgagcgcctcggcgacggcaagcagcccgtccgcgacgccgcgcgccagctcctcatcacgctcatggaggagatgtacaagcacatgggatcacaatttcatgaagagttgcagcgccataatctgccttcatacatgctaaaagaaataaattcaaggttggataaaatagaaccaaaggttcgatcctctgatacagcaatgcagtataaggctgtagagtctagatctgttagtgctaatccaaaaagaggcagcccaaggacaaaaaacataccaagggaaagtacactatatggaggtgacacagatgttacagaaaaacctgtggaaccagtaaaagttcattctgagaaagaattgcttcgggagtttgagaagatcgcggctacccttgttccagaaaaggactggtctttacgtattgctgccatgcaaaggattgaagccctggtttatggaggtgcaatcgataatccatcatttcttatgctcctgaagcaactggttcctccattgtctactcagctgtctgatcgacgttctagtattgtcaaacaggcatgccacctacttaatatactatccaaagaactccttggtgattttgagccatttgctgaactattcattccgatgctttttaagcttgttgtcataacagtgcttgtaatcgctgaatctgcagatacatgcataaaaactatcctgcggaattgcaaggttgctaggattcttcctcgcatagttgacacagcaaagaatgatcgaagtgcaatactccgtgcaaggtgctgtgagtatgcacttctggtactggagtattgggctgatgcaccagaaatacaacgttcagctgatttatatcaggatatgataaaatgctgtgtagcagatgcgatgagtgaggttcgtgcaactgcaagaacttgctatagaatgtttgcaaagacatggcctgagcgctcacgccgtcttttcatgtcatttgatcccgcgatacagaggataataaatgatgaagatggtggtgtgcacaaaagctattgtcgcaatggacaagagtgcagctatttcttcagattcatcttttccatcaaacactcttcggttatcacagtcaaagacgattgacagaagttctgagaggagcctggagagtgtgcttagctccagcaaagaaaaagtttccgccattgaaagtttgctgaaaggtgtcagcatgtcagggcaaaatttctctgctgcacgctcaacaagtttggaccttggagttgatcctccatcatctcgtgatcctcctgtgccgcttgcagcaccagcatcaaacgttctgtcattgcagaactcagcactgttggactcatcccttcctaccatcccacctagttcacgaaatggaggttcccgcttattggatacgatgacaacacacttgcccaccaaagaacgatcaaggtcaccatacttgagtaatatgtcatctgagtccatgtctggcttatcactgccttactcaagaaaatctttggagaggctccaagaaggtggccgcatggatgagagctatgatatccgttcaactaggcgaatcccccaaatgcacttggacagaaactatgttgatatgccttatagggattcacataataaccacgtccctaatttccagagacctcttctaagaaaacaagtaatgtcaagagcttctgcaagtggcagacacagctttgatgatagccatgtaccattaggtgatgtgcctggctatacagattctctggcttctctaaatgatgcactttccgagggtctcagccctagttctgactgggtagcaagagtttcagcttttgaatttattaggaatttattgaaacaaggacagaagggcattcaagaaattattcaaaattttgagaaggttatgaagctgtttttccgtcatttggatgatcctcaccataaggttgcacaggcagctttctctacacttgcagagattatcccagcttgcaagaagccatttgaaagttacgtcgagcgaattctaccatatgtattttcacggcttattgatccaaaagagttggtgaaaaaaccatgctccataacattggagattgttggtcgaacatatgctattgatatgttgctacccgcgctagtacgctcattagatgaacagaggtccccaaaggcaaaattggctgttctggagttcgcaaataaatcattcagcaagtactctgtggactctgatggttatagtaacagtggctttcttaaactatggctttcaaaattggcacctttggtaaatgaaaagaatgcaaaattgaaggaggcatctatttctggtatcatatctgtttattctcattttgattcaacagctgtgctaaattttattctcagtttgtcagttgaagatcaaaacctcctgaggagagcgttgaagatcaaaacccctcgtattgaggttgatctggtgaactacttgcagagcaagaaagaacgcccgcgccccaaaccttatgaccaggtggattttggaacttcttcggaggatggctatgcactgacatccaagaagagctatccatttgggcggttttcttctagttcccttgatgctgaagggggcaagatgatcagctcgatgcaagaaccagcgctgcataatgtctctataggtcgaacagtttctgatatgagcatggatcatgctattcaaagtttggagtcatctacaggagctgaagttcatttaactaggggtagagaaccaaagaataacagtaacttagttgcggaagctgctcgctcttggacaagctaccctgaaaaaactgatgcctccgtagatggtgaaactgctaccggtactcctcggttagatttcggtcggtttattacttctgatgggcataatactgttggttcaactaccgaaggaagtgttcaagacnn

SEQ ID NO: 18846 - DNA, 905 bp, Zea Mays
gcgataacgagcggcgccgcggcgggtcaggcagacgccacagcgctagcggcatagccggcgacagaaacaaccgatgccactcctcgccgtctgtccccgccgcgttccgccgctttcgctcgcgcgccgccaccgccgcagcttgtatcgggcccggtccctcgcgctcaaatgcgaggtctcctctcctccgctacttctgacccggaggatgtccgccgctggctcgctgcttgtcgctgtcgtccccgtccccgcgccgtcgccgcaactccccgtcgcctccgcgtcggagttggagacggagacggcggaaggagagagcggagcttctgaggggttagcattggagcgttacaccgaccaggagcagggcttcaccctcctcaagccggcctcctggcccaaggtggagaaggcgggcgcgacggcgctgtttcagcaggagggaaaagggagcaacaatattggggttgtcgtgaaccctgtccggctcaattcgctggcggagttcgggacgccgcagttcgttgcggacaggcttctgcaagcagagaagaaaaaggaaagtaccaagtctgccgaggtgatttcagtgggagagaggtcaggtcatggtggcttgacagtgtatgagatcgagtacacgctggacagcacaaggggagggatgaagcggatcttctcgggtgcgtttgtcgcttcaaggaagctctatctgctcaacatagcctattcagacacccaggagaagcccttggacagggagacaagaaccgttctggaaaaagttctccattcttttgattctgtataggtgatatttttttatagccgaggacacagattgctttctcatatggataaagcatattctcagccttgaatgtttaagcacctca

SEQ ID NO: 18847 - DNA, 1746 bp, Zea Mays
ggaggacggcgtataaaaatagaaatttttgcgtggccacccgggggaaagttacaggagggaagctaccggccctatttcaccttccgtacgtctcaccccacggtgaggaggaggaagcaaacgtcggagcacgagcacgcgttcttcgcctctcaccccacgggagggacgggaggcgagggcgcggcgagccggcgggcgcaatcggatttggggaggcaaaaggaaaattccggagagcagttcctttccgcctccccatttcctccggatagatttgggtttggcctgcgtcgattagtccggcgctcgaacccgcaccaatccattcgccgagggatcgagcaagcgaggcgtggatcgcaggcgatcattaattttttgttggcatacattcccaaccttgatgtaaagacctccttcattcagaaccctgtgttttggaagggtatttcacaatgaagcccaatcagttgattacatcccatgttgatatacataggttcagctttccaatgagggaagagcaagcagtacaactaattttagcgaggcttgcaagtgcaacgattgggcgactgttaaatgagcagcaacgtgcatgcaatcttcttactctagctggcgctgttgctattgtacctccacttgaaaatatatcatcaatgatgcttgccgagtcaatcacatcacgaaatattgacagtgatatcagaagactggtggatcagccttatgtagaaggaaagtgcctaagttgtgcttgcccttctgtgcctagtactatatttcaagaagatccaattgaaccaaaaactggaataaaatttccaacatttctggaagacgactccagtccatctgcagcggtccttgttgggataggtttcaaaggcatgagagtgatgagggtcaaaaatctgaacctctacgcttttggtttatatatgcaaccgacttctatccgtgagaagctgggtcctaagtatgcttcatttccaactgacaagctgatggagaaccctgatttctatagtgatcttctcagggaaaaccttgatataagggtcaggttggtggttaactacaatggccttagcgttggtgcagtgcgagatgtgtttgagaagtcccttggcctgcggctgcagaagactttcactgcttgaagacctttggttctcacttcacagaagatatcgctataccttcgggtacgaagattgacttctgtcaaacatcagatgggaagcttataacagaaattgatgggaaacaaattggtgctgttcggagcaaagatctttgcaaggctttcttcgacatgtatattggtgattcaccggtttcactggaggccaaaaaagtcgttgcccagaacgtggctgggctcattggaagacgctgaggatagcgagaggatggttatttcattcttctgtacagttagagaggattcatatgagcgggaaaataggccaagtatgtagagtgatctgtcttgtatagaaagcaggcaaaaaggtccaatgtatatgtggaaggtagcatcttcagttgtgctaggcctccattcttttttttttcttgtttggatgggccttttgcctcttcgtagctgctgtatcatgtatgctcccattgagccaggagttgtaaaatattaaattgaaggtgcttcttccataaaatgatgcatacctgtaaatctttgttgcatattgggatgttcctggtttggcg

SEQ ID NO: 18848 - DNA, 1992 bp, Zea Mays
aggaacaaaacgactggctgtccgaacggggacgcctggttcctctcattccccttccacctctctctttctttccactactcgccctctctctcttgcgcgcgcgtgacaacatccctccacgggcgcgcggcgcgggagcacccaccgacttatcgccggtggggcggggcgggggcgatctgatgccggcgcggcggtgatggcagcgccgtccggcggtgggggcggcggtgcgggggagggctcctcctcggccgccgcagctatgacgatcggggcccacggggtggaccaagtcacagaagcgatgtggcagatgaatttaggagatgccatggaactggggccatacccagagcgtgttggtgatccagactgtagctattacatgaggactggcatgtgcaggtttgggatgacctgtaaatttaatcacccagcagacagaaagctggctgttgctgctgcaagaatgaagggagaatatcctcaaagaattggacagcctgaatgtcaatactatctgaagactggcacatgcaagtttggagcaacttgcaagtttcatcatccccgagaaaaggctgcaatggcaactcgagttcagctgaatgaactgggctacccactccgcctgaatgaaaaggaatgtgcttattatttaagaacagggcagtgcaagtttggaagcacatgtaagtttcaccatccacaaccatccactatgatggttgccgtacgtggctctgtttattcacctggacagtctgcaacttctcctggccatcatgcttaccagggggctgtaacaagctggcccttgtcgagatctgcttctttcattgcaagtccaaggtggccaggtcattcaagttatgcacaagttattgttcctcctgggcttgttcaggtcccagggtggagtccttatgctgcgcagattggttcttcatcctcggatgaccaacaacggacacctggagctgcccaatactatactggctcacgccagagtggaacacctggcataggcgatcgaggaatgttttcatcctaccaagcaggttctgttcccgttggactttatgcagtacagacggagaatgtatttccagagagacctgaccaacctgaatgtcagttctatatgaagaccggagactggagaaccaatatgcagtttctataatcgctatggcatgtgcaagtttggtccaaattgcaaatttcatcatccgatgggaaaccctatgtatggccatgcttcatcaccgacaagtgaggcccaaacatctcggcgtatgctggcacatgtaccatcgcatccagaagtatcacctgacagtggctcgggaaggtctaggaggattgttcattcagattcccagcaaataccctctgttgaaaggatcaccgagagagaggcgtcctaagccatcctcggtgtcttcgttcatgctgcctcccctcccctcccctcccattcttgacgagtaattaaatgcaacaacatctgagaatccgaagctgtacaggtcttttgcctcatctttgagctttacataccggagcttgcttcaacatgtattgcatccaggcatgaaaaagttcttgccggttcgggatgctcatttgcccccataaaaacgggaacaaacctaccttatttaaacatatgtatgaaactcactcacctctggacattcaaacccattcgagtaatggtcccggtgttgtagtttatagagctgtgtttcagtggacaaacctttgcgaaactgactggggatgcgcaagcatagcctcctttattaattattatctcgtttttttcctagcatctctcttttcataagggcaacccaaagtgttggaataatagattgccaccataatgctctgtattacccaccatatttaaacctggttacttgtgagtaattttctctttgtagttctgacttactcgatcaatctgccaggagattt

SEQ ID NO: 18849 - DNA, 1965 bp, Zea Mays
ttctaccattgccaagcgacgagtgctgatcacctgatccaacagctaccggcccacaggagcgggcgtccccgcgacgccacgactcccgccaaaccatagccacgagttccctgctcccccggcccccgctaccccgccaatcctgtcccgggtttctgccgccggccgccatcacgcgatggatcccctctccctcctgcagctccctcgcgcctcgcgcccaccgatgcccctggccgcggccgccgcgccattggtctccgcgaggctaagcgtaagcggcggcgcgcgctccgttcggaggcggcgacggcgccgcgccgctgggctgtcggtgttcgccgtggcgaccgagacgccgcggaccgaggagcagcagccgtcgccgtccggggaggagcggttcgactggctggaccagtggtacccgctggcgcccgtgtgcgacctcgacccgcgcgcgccgcacggcaagacggtgctggggctcagcgtcgtggcctggtacgaccgcggcgccggcgaggggcgcctccagtgcgtgtaccacggctggtgcttcgacggcgccggcgcctgcaagttcatcccccaggcacccgccctcggcccgccggtgcacacgagcagcagggcgtgcgtggcgtcgtacccctgcgtggtgcagaacaacatcctgtggttctacccgagggctgaccccgagcatagcgacgtgctgcagaggaagcgcccgccgctcatccctgagattgacgacccggacttcgtcaccgtctatggcatcagagacctcccttacgggtatgatattttggttgagaacctcatggaccctgctcatgtcccgtatgcacacaaggggatcatgcgtggcattcgcaagaaggaagatcctggaagagtcgactacgataaagagggcggcggtccagtcaagatgaagatcgagcaggcaaacatagaagggtttgtgtcaccgcaagagcggggctacttccagttcgtcgcgccctgcacgttcttcggcacgccgtttgtgcaggagaagaagaaggcgcctcgggtcatgctggtgttcttctgcatcccggtcggtcctggcaggagcagggtgatctgggcgttcccgaggaacgtcggggtctggctccaccatatcacgccacggtggctgtaccacgtcggccagaaccttatattggattcagacattttcctcctccacgttgaggagcgtaaatttgctgcggcagggctggataactggcagagagcttgttacgtgccgacgtcgtcggacgccatggtggtcgccttcaggaactggttcagaaaattctgcaagaaccaggtcggctgggcaaccttacaagtcgaccagctgccaccaacgcgtaccaaggaccagctcatggagaggtactggtcgcacgtggtgcagtgcaggagctgcaacgcggcgctcaaggccatgaaggcgctcgaggctgccctgcaggtggcctcggtcgccgtcgtcgggttccttgccgtcgctaagggaacggtcctcacgtcaactgttcagagggccgcagtcgtgtcggcgaccgtgctgtgcttcgctgcctcccgttggcttgccaacttcatccagaagaatttctactttcaagactacatccatgcctacaagtgacacgctcatgaatacgtttttaaaggtttttgttgctaggagattgttgtttttactgtgaatgcatattattaggagaattgggtgggtagaaagcagtatctatactgcattaacttgtatataataatgcatataatcgataataaaacggaagacacgcggcttcagttgtgtttactggaactgtaaattagaaacgcttaggaaggcgactctagccgagttggttagatggtctttacctgaattggttagatagaatgagtatcactttttaa

SEQ ID NO: 18850 - DNA, 1194 bp, Zea Mays
atttactcatctcctccaagcctgaagcctcgccctcaatcatctgttcttcattcccaaccgaagtcaactgttggaacacctgcttatattgcacctgaagttctgttgaaaaaagaatatgatggcaagattgctgatgtttggtcatgtggtgtaaccctctatgtaatggctgttggtgcatatccttttgaagacccagaagagcctaagaacttccgcaagacaattcagcgcatcttgaacgttcagtacgccattccagactacgtgaacatatctccagagtgcaggcatctaatttcgaggatttttgttggtgatcctgctatggcaagtccttgtagttataatcgtgctttgatcctgatacagtaggttcagaagatacgttgtttcaggtttggtcatatttatccgattttgttgtatttatgtgttatataaaatatgcagcgaataacaatcactgaaatccggaatcatagttggttcctgaagaaccttcctgctgatcttatggatgatgatagcatgagcaaccaatatgaggagcctgatcagccaatgcagaccatggatcagatcatgcagattttaacagaggccaccataccacctgcctgttctcgcagtataaatgttctagctgatggactggacatggacgacgacatggatgatcttgactccgattcggatcttgatgttgacagcagcggtgagattgtatacgcaatgtgagtaacatctcagtaaccatctcagtatctcaccagtcaaccaaagaaccaatcaggcatgggacaccctgatgttgtacactctgccaaagacctagcatccttttgtaaaatatctccctgtagttttctcaaagaagcgcaagcccaacctgttctggggaacacggatgctgtagtcaaactggggttattcagattgtaaaactggcctcttgcttcctgcttactctcaggcttcgacttgtgtgttgctgttgaatatgtacttacaagaaacttctacggagtactcatgttgatctgttcgaagctaacatcggaaagagcatttaaaaattctgttggtggctttcattggaacttgtgcctgctaatgggttgggttgcaaggctgtctagaacaggtcacataaaatagggatttgtactgtagataatactattt

SEQ ID NO: 18851 - DNA, 646 bp, Zea Mays
ctttgagtactcactctgtttttacaagtttagtgccatccatcttgaaccaagatgatttgcatggttccaacactgcacctgcacctccacctccaagtagctcctcaaatgacaatgacaatatgaaatctgttctctctcttgatgatggtcgatggtctgtaccagcagaagaacacactccacttccttctgctaatttggaagaggagttgttccaattgaatatcaaacaaccttctcctccaccagttcttgcagaggtacaaagaccaatttctccatcaagagttgccgatccaacaccaggacttccgacctcaggaactgcccgatttcagaacttgcatgttccgatcaagttgatggagtgttttctaagggttgctgagtcaaacaccaaaagaagcttagaaacctgtggggttcttgctggtaccctgaaaaatagaactttttatgtgacaaccttaattattccaaagcagaaatcgacatctgatacgtgtgaagctacaaatgaagaagaactatttgaagttcaggacacatactcattgttcactcttggttggattcatgagttgtaaatatcttttacatttcatgtggtgtttgatgttctgtacctgcaaaagtgcaa

SEQ ID NO: 18852 - DNA, 5937 bp, Zea Mays
cactttaaaaaaggacatccatgggctccatctcgtcaaaatctgggcggtgaaaccctcaaaccctaatcctttggcccctcaccatggcggacgctgacgacgcgccgccaacgccgcctcctgaggtagtagcccccgaggagcatcccgcggtcgccgaatccgccgttgccgcgcagcaggagggggcagcgacggcccaagtcgataacaagcggaagctcgaggaggctggcgccgacgcggaggcgaacggcaccggcgaggacgccaagcgcccgcgcgtggatggtgagcccgacgctgccacaggcattgagcagcagaacgatgggtcctccgtgaatgtctccgtgaatgtggaggaacccgcagctgcagaggaggataaggttgctcccaccgatggggcagcgacggatggtgataatgacacggccgctcctgctacggattcgcaggcgggttctgatgacaaaccgcttgaagcagcagctgaagctccacaaccggaaagtgatgcagcagctgttgcccaggagatctctcgtatgatcgaagtacccaacagcagggtcggtgtccttattggaaaagctggtgagacaatcaggaacttgcaaatgagctcgggtgcaaagatccaaatcaccaaggacgccgatgcggactcaaatgccctgactcgtccggttgaactagttggaacccttggaagcgttgataaagcagagctgcttattaagagtgtcatagctgaggctgaggctggcggttcccctgccttaatagctagaggatttggaagtggacagcctgggtcagagcaatttgagatgacagttcctgataacaaggttggtctcattatcggaaaaggtggtgatgcaattaaaggcatgcaaaccaaatctggtgctcgtattcagttaataccccaacatcctccagagggcgttacattgactgaaagaattgtacgtgttactgggaataagaagcagattgaacttgcgaaggatttgatcaagcaagctatgaatcaggtgatgtgatcttcctttgtgcctttttgtagtctatttgtgttttcagttctaagtgttgctagatgctggcatataactactttatgcttttgattgttcattcattctgtgattttgctctgatggttgctgatgatgtgatcatgcttcacgattgattgttcttggttcatgatatggttacttttgtgattgtagatgccaaaatcatgttgtctttaatatttgtgacccaacacaaattaatgacatgcctattgagaacatggccttatttcaatcctattatggaccaattggtttcttagctttgggtttcataatacaccttctttatcattgcatgcaatttgtaccatctttctgatcaagccaagttcgagaattccctgataagctttgctgcttctgtaggtgtcccaagtgtactggtattttttgctataaacaaacacactttgcttttgtactttgttgttcatactatgaatatattgccatctctcttgtgttacggagtgttgggccctttaagatttgttataaactaatcactcctctacaattggccttgtatgaagtatctatcttgatatatagcaatgcctaattgggctggaaggtaagtttttcttcatgtttgagttttcatcttccgatgaaagacaaacgagatgccattgctgtcaagatcaatgatgtaaaatttgtaaatcagattcattacctcaacaaatatttcacttcctttcccttgccaaaatcccttatcctcggtgctagcactgtgaatatggtgtatttttctttctcgtttttactggatcatgcatgcttccattccattacctgtccattggagcaaaattcttgatttatttatttaattaataatatggattattgaagggtcaaaaggagtacatgattatacaattcagaaatgaacttttgagctgtaatacatagcaaatgatatgtctggagatctgggtactgtttagattcttgatcccattagcttgattattcttcgtaggacatacactatgagtaggactttcctcatctatcaccattaacaatgtccatgactataggtttgcaagtgctgtcttaccataccagcggattatcgagttgctagataagagatattattctgtttcctacataagcagtctgaactgacacatcaagttcactcgcttccagtttccgtcaattatttttgttgaaggtgccaattggagttggttgggcatcctaatggagatacagctagctttcttcatgggcgccatcgttcttcaacatttacttgcaccggagagggatattgaccattatcccttacccttgcatggtttatgtagttggtaactggtaaggctgtctattgtcgaaaggaaacagaaactgtatggcattggaagactgcaacaagtgtttcattgccatgacaaggctactacagcaccatgtataggtttgctaaactgaatcgtttgtgactgtatgttgtttgcagaacaaaacttacatatgctatatataaatgattaaggatttacacatcgttacttacatagtgttgtactcttaactagagtttgggttacttagcattattatttttccccattagtaacggttgctattggataatgtgcgatgcagtgcatttaatctcgatactatcgtgttttctattgaggctgtttatgtttatgagatgcatctatatgttaaattctgaagtaacccttctttttattctaaatttcttgttgcaattctcaatgatggttaaccaacaattgatattcctattgtattaatggtgttgcataatgttgtccacagaaatttgtggagattttaagggtttattttcttgaacattgtttcttgaacgatttagtgatcattactggacagtgtttactaagtattgagatatgagctactatgcaggcggatattctcaatgctgttcttatttaactgcattgtgaacagtctgtttcccattgatggattcctattacagttggctttatgtttttctgcggtgtctgttatttacttctctttttggtttcttacatggtttcttgtacagacattttcaaggcatacaaaccagtctggcggatatggtccacaaggttaccgccctcagggtcaaggtgccgcttctcagtggggaccacgttctcagaatcatggctatggatacccacctagaggtatgcctccacctcaaaactacaacacaccctacggcagctacccgccgcagcagggaccaccaagaggtggcatgggctgggaccagaggcagggccctccaccccatccttcgtaccagggtggtgcttctgattactacaagcagggatctcagccatatgatagccagccaccgagctaccctcctgggccagggaattacaacagttatggtcaatcacagggtcctaactatggccaacctcaatacccgcaacatgcgcctcagcagaactacagccatgggtatggtgatcctagatacaatgctccccctccgaaccagcagtactatggtcagccgccaatgggcccgcagcaaggctatcctcaacagccagatccctatgctaggcctccatacagtggacctggtcaatggcctcccaggggtgctccggctgcagatggctcttaccaggcgccagctgcatcttatgggccgccttctcagcacccttctgcttatgggcaaacgtacagtgcagcaactggatctgatggatatgctcaacagggttacccacagcagggtgggcaggcaccagctccatatggtcagagtgcaccagcagctccaggctatcctcagcagcaaggtggctatgcacagtacccacagacccaaccagcatatggtgagcaagcagctcaaaccaatgcgagctatgggtaccagggagctccagcagatcctaactatggaagtgcctacccacagccaggatatggtcctcctggtcaggctactggtcaggctggttatgcctcctcagcagccagccagcctgcgtatggccaggcaggatacacccagccgcctacaaatcctccaggttatgagcagtctgcggcaccagcaacaacccagagcggctatgctgcgcccccagcaaatccacagcagcctgctgcagcaaaaggggtctcgccacagcctggtggtggtgctgctgcatatggtgctggtgggcagtggacagcatgaccctcctcgaacctcaaacatggctcgctggtagcaatatcgtgctcaatatttgcaccttccggatgcatccttggttatcggaagagattgtgtaactccttgattagtgatacttggcatctctgtagtagcacctactagtagttcgttggttaactgtgactataaacatcctaattcctattcacttcgaatcaaacttcgcagcttgccaagtaatttttttggatttgtgtttattcatgtaaaatagttactggtttggctcacagaatgatgattctgtttctgcagttcattcaaatttggttctgatggatgttaaacctagtgatgacaatttaacccgcaaatctgaaattcgataggtgcgtgtatgtgtgaagattttgacccgtggttgcaacccatacctaacctgaagtttcgtgggtgttagatgcgggtttttatttcaacctgtatttgacccgaaattcaacccgtatttgactccaaatttggtttactccttattttgcgcaataatgactaaagatacaatagtaattattttcaattagtgacttggttaatgattcatgaagtgttttgttggtgcttaacgtaaggtttaaatccataaatataactcaattattgctggtatttaaatacttataactaaattattgcttgaaagtgtataatgagtaaaacccacgggtgatcttaaacccactcgaaacctgatggatttggatgtgggtttaaatttgcacccgcgtgtgcgatcgcgggtgagtttaggtagatttcacgagtttgatcgcgaacatggtttttctccaccgactcaaatctgattcattgtcatccctagtcaagccgaacatactatccctagtcaagccgaacatactgttgctcttgcaatgtgagaagcgttatgtacatatggatcgattagcggttgattgcaactatagtaagatcttgtccagtagtttatccatatggtcacctaaaatactgttttgcacctaaaatattgttttgcacggtagaccgcactgttcgcagagtggagtttaaaataggagatcataaggaaactgtaccattgtcgaatagtattctactccctctattttcgaatatttgttagctgctagtttatttttgaactaaaacacgataaataaaaaaactaaggaacatactactaagattgtctcaacgggtaatctaaaataggggtcacaaaattgtagatgacattgtttgatgctgtttgtagagtaaagtttgaaataggagacacgatagggaatctgctagagatagcctaaggtcttgatcggttatttccatgccatatgaattggagggaattggaaaaaaataggaaggattttgatttgttatggatttaagtccatccgatcttctccaatctatatgaattaagataaaaatgaacatatgttgagtgtgggggtgaagtagatggtgagggttcccatgctccaagtagatggtgagggtgaagtagaatgtgggtggtgaccccactccaaattgatggtgagggtgaagttgaagatgtcgatggtgatt

SEQ ID NO: 18853 - DNA, 1301 bp, Zea Mays
gtgagcagccgcatccggccttcctcttcctcctcccctctcccccgttggcttgttcagttgctcttcgtctcctcccctcccctccgccggctctccggcccctcttcgtcccccctcatcctccgcgcacatttccagacgaggaaccagggaggctaagtgcaggaaggcaggatgcagtacaagaacctgggccggtcggggctccgcgtcagccagctctcgtacggcgcgtgggtgaccttcgggaaccagctggacgtgaaggaggccaaggcgctgctgcaggcgtgccgggacgcgggcgtcaacttcttcgacaacgccgaggtgtacgccaacggccgcgccgaggagatcatgggccaggccatccgggacctgggctggcgccgctccgacgtcgtcatctccaccaagctcttctggggcggccagggccccaacgacaagggcctctcccgcaagcacgtcgtcgagggcctccgcgcctcgctccgccgcctcgacatggactacgtcgacgtcgtctactgccaccgccccgacgcctccacgcccgtcgaggagacggtgcgcgccatcaactgggtcatcgaccagggctgggccttctactggggcacctccgagtggtccgcgcagcagatcaccgaggcctgggcagtcgccaaccgcctcgacctcgtgggacccatcgtcgagcagccggagtacaacctcttctccaggcacaaggttgagtctgagtttttgccactttacagcacctatggcatcggattgactacatggagtcctctagcttcaggagtactaactggaaaatataccaaagggaacatacctgctgatagcaggtttgcactagacaattacaagaacctggcaaataggtccctggttgacgacacgcttcgaaaagtgaatgggctaaaacctatcgccgctgaactcggcgtttcgttagctcaactctccattgcttggtgcgcgtcaaaccccaacgtctcatccgtgatcactggagccaccaaagaaagccagatcgtggagaacatgaaggctctagatgtcatcccactgctgacgccggaggtcgttgacaggattgaggcggtggtccagagcaagcccaaacgcactgaatcatacaggtgaaggcgctctggctggagatgaggcataggcaaggatgcggtcaacaagcatgtgcggtggcactacggctcgatgtcgatgaggttgagccaggcggagatgcggtcgacggatctccgacttgacggctagccaag

SEQ ID NO: 18854 - DNA, 1539 bp, Zea Mays
cctttggctgaccgctacaggagcacgggcaacgtagggttcccaacatatcccgcagacatattgaatatctatttcaagaagaagctggaagaacttaatagtattatggctggatcttatgagagtgatcaacttgtggatcatgaaccttttcaaaggagtaatacatctgactggcattctggaatggacattgatggttctgaagtttcagaaaatagctccttggtaaagaacattggcaaagttgttcgtgatcttagatgtattggttttacatcgatgactgaagatgcttattcctctgcaataatctggcttttaaagtctaaggtttatgaactagctggtgatgattatagagtgtcagtcctttggtgtgtgaagaagtggattcaggctgttcctcttcagtttctgcatgctcttttaacatatctcggtgactctgtggaccatggcagtggatcttctggtctcaaatcaccattagcttcacgcccttcttccttcccagggattggtgttccttctgaagcccttgtgagatggcacatgcgccttgaatattttgcttatgaaaccttgcaggacctacgaattggcaaactttttgaaataattgtagattaccctgagagctctcccgctattgaagacctaaagctgtgtttagagtacacgggccaacactctaagcttgttgactcatttatctcatcgcttcgatatcgtctacttactgctggtgcatcaacaaatgatatattgcaccaatatgtgtccactataaaggcattgcggacaattgaccccaccggggtgttcttggaagcagttggtgaaccaattagggattatctgagaggtagaaaagacactatcaaatgcatagtgacaatgctaactgatgggtcaggaggaagtggaagtggaacaggcaatgcaggtgacaatcttctggaagagttgaacagagatgctgaaaaccaggaaaatgctgattacgacgatcatgcaaacattgatgagaaacaagcatggctcaattctgaaagctgggaacccgatcctgtagaagcagacccattgaaaggcaacaggaacagaaggaaggtcgatatacttggactaatggttagtataattggctcaaaggaccaactagtcaatgaataccgtgtaatgctggcagaaaagctgctcaacaaatctgactttgaaattgattcagacattcgcacattggaactcctgaagattcattttggtgagagcagcatgcagaagtgtgagattatgcttaatgacttgattgactcgaagagaaccaattcgaacattaaaacatctttgctgaagtcatctcaaactgttcctgggcaagaggaggcagaagtgtctcatgatgttttggatgccactataatatcatctaatttttggccaccaattcaggggtggcacgagcggatcctgtccttgccgccccagccctccaacaccggacttctccatcctcgtcgccgcctgagc

SEQ ID NO: 18855 - DNA, 1573 bp, Zea Mays
atccggttcccggactgcgttttccgtttccgggcggaccaatgagcctttagcacgtaggacgccggctgaaatgggggaaggggagaaagggaaaaccccaaaagacccgggcgaaacggcgcagtagcgaggaagtaaacgcggcggagcggaggaagcaaaaggagacgggaggaaagaagaaaagaaagcgtctccttcgacgcagctgtgttcccttcccttctccccctacctcgtctccgcccgagtggaaggaaaccaaaccatcgtggtcgtggagtggaagtggaacaaacaaacgcacgggcgcgcgccccctccctcctccatcttgcgcatcgccgctacctcggaggcgtgaagcctctcctccactctccggcgcagcagccgtcgccgcctccgtcccctgccgcgggccgccgagatccgcccgggcttgggctgttctgctgtgatggcggcgcaagcttccattgcggcgggatcccaagtttgggtcgaggaccccggtgtcgcttggatcgacggggaggttgtaaaagtcaatggagacacggttacggtcagatgttccaatgataagacggttacggtgaaagcgtctaatgttcatgctaaggatcccgaggaagcgccatgcggagtcgatgacatgacaaagcttgcctatctgcacgaacccggggttcttcagaatctgaaagctagatatgacatgaatgaaatttatacatatactgggaatattttgattgctgtaaatcccttccgaagactgccccatctgtatgatactcagatgatgcagcaatataaaggggcagaatttggtgaattaagccctcatccttttgccgttgcggatgttgcatatagattgatgcgcaatgaaggtataagccagtcgattcttgttagtggagaaagtggtgctggtaaaacggaaagcaccaagatgatcatgcgatatcttgcttacatgggtgggaaggctgcttccgaagggcgaactgtggagaagcaagtccttcagtccaatcctgttcttgaagcatttggaaatgcaaagactgtcaggaacaataactcaagtcgtttcggtaaatttgttgagatccagtttgatcagaaagggaaaatatcaggagctgctgtaagaacttatcttcttgagagatcccgtgtctgtcaaatatctgacccagaaagaaattaccattgtttctacatgatatgtgctgcccctcctgaggagcgtgagagatacaaactcggagatcccagcacatttcactaccttaatcagtccaactgcattaagcttgaaggcctcgatgaatctaaagagtaccttgaaaccaggaaggctatggacattatcggaattagttctgaagagcaggaagcaatctttcgggttgttgcggctattctccacttggggaatgtcgagtttgcagaaggggatgatggtgattcatcaaaacccaaagatgaaaaatctctttctcatttgagaacagctgctgagctcttcatgtgtgatgagaaagcttaaaagatc

SEQ ID NO: 18856 - DNA, 2003 bp, Zea Mays
acccttggcatcatccctggatttggaggtacccagcgtttgccgaggcttgtaggtctacccaaagcaattgaaatgatgctgcaaagtaagttcattacggcaaaggaagggaaggaacgtggtttgattgatgccctttgctctcctgatgaattgataaagacatcacgtctttgggctctggaaattgctaattgccgtaaaccttggatgaggtctcttggcagaacagataggcttggaccactctctgaagctcgtgctgtgttaaatgcagcaagacagcaagcaatgaagatcgcaccaaacatgccacaaaaccaggcctgcctggatgtgatggaggaaggcatattatgtggaggccaagctggtgttttgaaggtgccaggtgtaactgatgttcaactgaaaccaaggccaattagaaaagttgctgttattggtggtggtctgatgggatctggaattgccacatcacttcttgttagcaacatttctgttgtgctcaaggaagtaaaccctcagtttctgcaaaggggagagaaaacaatagcaggtaatcttgagggcctggtcaaaagaggttcactaacaaaggataggatgcacaaggccatggcccttctcaagggtgctttggattattcagatttcaaggatgttgatatggttattgaggctgttatcgagaagattcctttgaagcaatcaatatttgctgacattgagaaaatctgtccaaaacattgcatacttgcaacaaacacatccaccattgatttgaatgttgttggcaagaagacaaattctcaagatagaattataggggctcactttttcagccctgctcatattatgcccttgcttgaaattgttcggacggagaagacatcaccacaagctatccttgatctcatcaccattgggaagataataaagaaagtccctattgtggtcggcaactgcacaggatttgcagtcaaccttacattttttccttacacacagggttctcatcttctagttagtcttggtattgatgttttcagaattgatcgagtaataagcacctttggcatgccaatgggaccttttcaactccaagatgtggctgggtatggagttgccttggcagtaaaggatatctacgctgatgcctttggagaaagaaatttggactctgaccttgtggatttgatggtaaaggatggacgacaaggaaaggtgaacggcaaaggttactacatttatgagaagggtgggaagccaaagccagatcctagtgttaagcatgttatcgaggagtaccgaaagcacgcaaacacaatgcctggtggaaagcctgttactttaacggatcaagatattttggagatgattttcttcccagttgtgaatgaggcatgcagggttatggatgaaaatgttgtaattcgagcttctgatcttgatattgcttctgttcttggaatgggctttcctaaatacaggggtggtcttgtcttctgggctgacactgttggagcaccttacatacattctaagctaagcaagtgggctgaaatttatggccccttcttcaaaccatcatcatatttggaacagcgagctaagagtggtgtaccattgagcgcaccaggagcttcgcagcaaggttcggcgaggtcacgcatgtgaggtgctgtccagcattgagcagaataatgcagaatacttgcgggatgagccattgacggctgcttcgctgatcaaaacacctccgtgaacacaaacatgaggcacagaagaaatgatgaaaaataaagggattgtaacagttttggtgcctttgactgtaactggcagagtttctggggacagagtggcatggattaattgcacctgatcactctgtatgtcgctgtcatgtgtgcaatgttcaatacgtacgtaataaagaatggaaatatatgccgcaatcagtgcgtcgtcttctcgagttaatcgcttgcgccaac

SEQ ID NO: 18857 - DNA, 289 bp, Zea Mays
ggtatttttctcaaatgattttatctttcacaacccggactgaactcactgaagcagaaagaaagagtacaagtctactactgcagaaagcaaggaggatgccaacagaagaaaattcatgtatggatcgggtattgaccttttttcaaggatgagtatgagtctgatgattctgatgagggagaaggtgaaactgaagaatgcgcagatgtggctgttcatggacgacagcatcaagaaacctgcaacatgcaaccagattttaagaaatctgccacctgcaacatga

SEQ ID NO: 18858 - DNA, 1441 bp, Zea Mays
gttctggcaataaatgttgtgcacagatagtaattttgtaactgtcaggggcacgttttcatgatatgccaaattgagatcacgtgagtttaggagcgaaatggacgaggctgttcctgctttggctaccggccaagcttcaaccgacgccgtgacagagcagcctgtgaatgtgtacatatgggacatggatgagacactcattttgctcaagtcacttctggatggctcatatgctggggcttttgatggcctcaaggatcatgagaaaagtactgaaataggaaagcgatgggagaacctcattcttgaactctgtgatgagcacttcttttatgaggagattgagaactacaatgaaccctatctcaatgccttgaatgaatatgacgatgggagagacttgacctcatatgattttgaggctgactgttttagttcaccatatgatgatgcgaacaaaaagaagcttgcttacaggcatcgtgctattggagagaaatatgcaaagggtttggaaaaggttctggacggacacatggtcaaagtctgcaatgatcagtacagtttgactgacaaatatactgatggctggctgtcttcagctcataagttactggaagaagcattgggcaaatcagcatcagcaccttcagccaactcttcaagcatcaactgcatagttacatcagggtcactgattccaagccttgccaaatgtttgctgtatcacctggatgatgtggtctcatctgagaacgtctacagctcatgggaagtgggtaagctgcagtgcttcaaatggatcaaggagcgcttcgacggtccaaacgtccgcttctgtgcaatcggtgatggccacgaggagtgcagtgctgcgcaggtcatgaaatggccattcatcaagatcgagttccgccctgaagcccatcacaggttccctggcctagacttgcccacagtgcagacctacatggatgtgatatacgagtcatcgagcaaagatggttgaccgacgattgatgtcgattctgttttctcctctgacctccaccacccatggagctattgtttgaggaaactgtaagcaaagagatgtcgtgggaaaggaacgtgtcgtcctccctagatctttcaccttggcgaattaggaggcaggtgtgataaataagagtcttgctagttcgtcgtcgtcgtccatgttgtcatagatcctgtcttgtgtgttcatgttactgtgatgcaggcaatggtgtgttgtgtccgggcgttatttcctgtgttgtgctttgccaatttgccagcttcagtttatgtgtatatgctttttaggctgtcttcggcagatcgtgtaaaataggggacgtgacagtgtagatgacaccgtttaacttgtttttaaaatgaagtttgaaatatacacacatcatagttcatcatc

SEQ ID NO: 18859 - DNA, 2251 bp, Zea Mays
tccttggtgagagcacacaaataccttatacaaagcagcaagagaagaaggaagacaagtcagacaaaacagaagacgagaagaggttcctaccataacacttaagcaaggaatcctgtacacttctctcctggggttgtgacttgtatattgtcaaggatcacttggatgtggtaaatgctatactggacactgatgatagctgcataaggattgtgcgaaaaaacgggaagacatccctacatactgctgcaaggattggataccatcgtattgtcaaggcactcatagagagggatccaggaattgttccgatcaaggataggaagggacaaactgcacttcacatggctgtgaaaggcaagaacacagatgtagtggaagagttactgatggctgatgtttccattctcaatgtgcgggacaagaagggaaatactgctttgcacatagctacatggaaatgggagaattttgggattatgaaacaccgcagacgtggcttcgacgaaacggaggcgtaggcgagggattcgacattatgaaaaaccagagaagatactacactctaaaatggacatgaatcctctattaccagggaaggatgatgtttattacactgaaacagacgctgtctcacatccgttacccgcactagacgcacccagtctttctacagagagaatcgcgccgttcttgaatctgccattcgctgaatctgccattcgctgctgttgtttctggacagtgaagcagtattccggacagtgaacaaaaatctgggaacacatttcattttcactgtcattggctaccagagtccgggaacaaaatctgggaacaaaatctgggaacacaaaaatctgggaacaaaatctgcctttggctaccagagtttattgctcccatatcattcgctgtccatttcactgtccattcgctgaacacaaaaagctgggaacaaactcattttcccagtgaacaggtagcacaatttagttcacaaaatctgggagcacaatttagttcacaaaatctgggagcaataaacaggttgaacaggtagaacaaaatctgggagcaataaactgccatcccagaacaaaattcgcagctcacatttcagttcacaagctagttcacaatttagttcccaggtaccacaatttagttcacaagctagttcacaagctcacatttcaatggagcaatacacaggtagcagtttgacaagctattacacaagctcacatttctgggagcaatacacaggtagcagtttcacaagctatcacacaagctcacatttctgggagcaaaaaacaggtagcagtttcacaagctcacatttcagatctatggtttttcagtttctttctaggggtaattttcttaactacccatttgacacttctaggtggcgtagtagcagtcgtgtgttcatcttcatttgcagcaacgacaagttcacggcttggtgcttcatcttcatttccagctacaagtattggtgcttcatcttcatttgcagcttcgactattggtgcttctacttcatttgcagcttcgactattggtgcttctacttcatttgcagcaacgacaagccacctgctttggcgcggactagggttgtggtcgcagcgccgccgccacctgctttggcgcggggccgcgagcagcaagggagaagacgcggagtttggagagaaggaggtgcagcgccgccgccacctgctttggcgcgggaccacgggcagcagatctccgggcagcaggggaggagactagcaggggagggaaatggagattgaagaaaatgagatggaaggaagaggcttgacgggagagagaagaaccttgaagagagaagaacggctctggacggcagaagaaaacggcgcgtgggctgatagcgacggaagatcattattcgttctcctgaacgactaataacgatgggatctggaataacaggagcctgatggttgcatcagtagagttgaccacttctcagtattgcgagatgcatcttacatggtcaagaagataattcctattctgaactacttgctcgtgttgatcagttttgcctagtcccagtaccatacaaagatgttcaggtgaacctgaaaattcttctcaatttgacttgcaagctttctgatgcgagcactaaatagtgatttttttgcaattttgtatgagccttgtttgagtgaatctttcctttgggcagcatggatataaa

SEQ ID NO: 18860 - DNA, 769 bp, Zea Mays
gtgaaatcatttaaatgctattgttcttgctgaagttaaaccacatgagaaaaagaagttcatatctgaactccagaaagagcacaaggtagtcgccatggttggtgacggcattaatgatgccgcagcactagcttcagctgatgttggaatcgcaatgggtggaggtgttggggcagctagtgatgtatcttcagttgtacttatgggcaacaggttatcccagcttatcgatgctttagagttgagtaaagagaccatgaagacggtgaagcaaaatctttggttggactacccattgctgctggagcattgcttccagctacggggacgatactgacaccatcaatagctggagctctgatgggttttagttcggtcggtgtgatggccaactcgttgcttttgagggtgaggctgagctcaaggcggaagcgagaaccactgaaagccatctctgatgaggttgagaaaaattactcatcgaaatggagtacctgagtagttcggatcttagaccatgttcacgttcactcattcatatgatttggacacacgcatcaaaggcagttgtcagttgaacaaatgaaacagatgtagtatgcaattgctgaggtcagtcagttcctgtggtttggtagatcttcatggtgtgctataatataataccccctctattccaatttataaattttttgacttttttttaccaagtttgattagcttgtcttatttattttttttcgaaaaaatagaaatttcacttaaa

SEQ ID NO: 18861 - DNA, 1716 bp, Zea Mays
aaagaaacaggtctgtagtagcaactagcaagtgcagtccgcatcatcgtcctcattgatcatcgtggtcgtcatcatcataccatacagagaatatgcatgcggtgccggtgcagcgctagctgcagttgggttgcggccgcagagcagcagcaggaaggatggcgaccaaggtggtggtggacctgcggtccgacacggtcaccaagccttccgaggccatgcgcgcgtccatggccgcggccgacgtcgacgacgacgtccggggcgcggacccgaccgcgcgccgcttccaggaggagatggcggcgctcatgggcaaggaggccgcgctcttcgtcccgtcggggaccatgggcaacctcgtgtccgtcctcgcgcactgcgacgtccgcggcagcgaggtcatcctcggcgacgactcgcacatccacctctacgagaacggcggcatctccaccctcggcggcgtgcaccctaagaccgtcagaaacaactccgacggcaccatggacatcgacagcatcgtcgctgcaatcaggcctcccggcggtggcctgtattacccgaccaccaggctcatctgcttggagaacacacatgggaattccggagggaagtgtttatccgcagaatacactgaaaaggttggcgaaattgccaagagtcatggcctgaagcttcatatcgatggagctcgcattttcaacgcctctgtggcacttggagttcctgtggacagacttgtgagagctgcagattcagtttcggtatgcatttctaaaggtttaggcgcccccgttggatcagttattgttggctcgaaggccttcatcgacaaggccaaaattctccggaagaccctaggtggtggaatgaggcaggttggagttctctgtgctgctgctcatgttgccgttcgtgacaatgtgggaaagcttgcagatgaccacagaaaggctaaagctttggcagacggactgaataaaatcgaacagttcagagtggattcagcatcagtccagaccaatatggtattcttggacatcgtggattcacgcatatcatctaacaagctgtgccaggttctgggaacgcacaatgtgctcgcaagtccaaggagtccaaaaagtgtcaggcttgtccttcattaccaaatttcagatgatgatgttcaatatgcactgacgtgttttaagaaagctgctgaacagctactaatgggcagtactgaactcgagcatttggctgaacagctactgatgggcactaccaagaactcgtacgggcaatagggcaccctgatgcataagctcggtgtggtcttatctgtaatcagctcgaaatattgtagccgcaccaaacctttgctgaataactgttgcttctcacttgtttattggatgtgttcgttcctgtgctttggcctgtttggtttaacttttctctgaccggtttttctgagaatctggttgtgcaaaaaatcctgctatagagagaatctagtatcatggggattacgagtggaggaagatgaaggtgttcataaggttcaggatctagaaataaatggatttctactatttcaaagactcggctgattatgtgtttatgtcaattttagatatattaccaaatcggttcttatagaagctagccgaaaagctgagtgtttggcagtccgcaacagcttttggtggctagaaaatgaaaaaa

SEQ ID NO: 18862 - DNA, 925 bp, Zea Mays
gccttttttttccctacagactccagtccactgcgcaaactccaccagttgctttgctcgaaaggcggatgcgcgctatgcgcgcggaggccaccgagagcagcgccttaaccgccggggctgcgcatttgctctgctttgcaggcctcgctgccgcccacaccctcgctggccgcggcgcgctcgtctcagaccccgcgctcgccctccgccttctcgtggtctgtgaagcgcccatagtcatcgccgtgttcagctacctccggcgtgatgccaaaagctgctcgattttcaaagctgttgcgagaggattgatctgcttgcccgtgggagcattccttaatgcatttggagcaatcgttcttggtgcacctgttggaatcaaatactggatacctactatatattggtcactcctcatgtccctgttcacgtttgttccagcagcatgtgtctttggagcatccaagattgattggcaaaatgtgctttctcactccatttatttcatgccaaatgatgttgagaactacatgatctctgcaccttgtcatggagctgtgctaggagcatggctcggtggttggcctatgccccttgactgggagaggccctggcaggaatggccaatctgtgtctcttatggtgccgttgctgggtatttggttggaatggcagtgtcagtggtcctagtagctgttcacaatagaagggttcgtgcaaaagctgactagcctgtggtcctgtggatgatgagtgcagctgtcctaatagctgttcacaagaacaatgtatttgctgataacctatcttgttagtctgtacattgtaagggtctcagttcagttttttttccacagagaagagggagatactagtttattacgtattctattttatgatgaataaacgaaactttccctaa

SEQ ID NO: 18863 - DNA, 1563 bp, Zea Mays
ggcctccacccagcgtacatgcgctgcggtcgtctgttgccatctcgcgttcggtggtgactccgggctccgggcgccctgcgcccctggatttcgaaccgagaaagaaagctgctgcccaccgtttcccaagtcccatcgccgcccaagaaccggagccacgccgcagatccgccaaaatcacacctcctagcccgtcctccgtcccaatctcttctcgggccagggaggcggcgggacttggtgcctgcatccgagccctagacatggatcaacctgaggaaaaccctgaattcccaagctgtgatgcctactttgaagctatccagtccaagaagaagttgccactgactttgcaagaatcactaactgctgcctttgctcagattccagtctcatccttccctgaggttccagctggtcgagtaattgaaattcctggtgatacttctgttattgatgctgtaaggactctctctgaacagaacataagggcagcaccagtactgaatccagaacctggggctcctactgattggcaggggaggtaccttggtgtcatcgattactcggcaatcatcctttgggtactagaaaatgctgagcttgctgctgttgcactctcggctgcatcggcaactgctgctggagttggcatgggtgctgttggtgctgttggggtggcagctttgggaacaactggcccagctgctgtagctggcttaactgcagctgcaattggggcttctgttgctggtggattaactgctgaaaagggtgtggcgaaggatgggctaactgctgcagatcatttaggggaggatttctacaaagttttacttcagcaggaacctttcagatcaacaacagttcgatcgattgttgagtcgtaccgctggtctccttttgtccccattacactggacacttccatgctgactgtacttctgttgcttagacccaacttattttcaaatttcaggcagttgacagtcattgaattcatgaagactctaggctccactcttcctgattcagagagcaattgcctggtgaagccaccacccacttgcactcctgacgcttcccttggtagtgttattgacagcattgcatcaagaataacacacaggatatatgtagtggatgatgaccttgaggttgttggtgttgtgactctgcgtgatgtgatctcatgctttattcatgagccacccggttattgcgacaactatttggcttcagcgatggagaagcttgaggggaaaggagtcagatcagtggagaaaatttgagcttttctgtagcgtgaatgttgataataacaggtcagtatgtgaggaaggtttatttggttggaacggtgcattcgtgtcgtgttaatccagcaaatcctgtgtaggttaagtaacaaggcttctgtgctgttaaaaatattttactatgtcatttctttggacggttttctgaacaaatgtgtggtaaccattaggccttgttcggttattcctacaccaaatggattggatgtgattgaaaaaaaaatagtagagatttttgact

SEQ ID NO: 18864 - DNA, 1727 bp, Zea Mays
atggatgctggagagagctcggctgatggtggagatgcacgagatggtccccgggaagcggttcgaccgttaccacgagctggggcagcacgcgttcggggaccggctgggcctgtggatcgtggtgccgcagcagctggtcgtcgaggtgggcgtgaacatcgtgtacatggtgaccggcggcaagtccctgaagaagttccacgacgtgctggtgtgcggcgacacgggggtgtgcgaggggaaggacaacatcaagaccacctacttcatcatgatcttcgcgtccgtccacttcgtcctctcgcagctccccaacttcaactccatctccggcgtctccctcgccgccgccgtcatgtcgctcagctactccaccatcgcgtggggcgcgtcggtgcacaaggggaggatgtcgggcgtcgactaccacctgcgcgcgaccaccacgccggggaaggtgttcggcttcttcggcgcgctgggggacgtggcgttcgcctacgccggccacaacgtggtgctggagatccaggccaccatcccgtccacccccgacaagccgtccaagaagcccatgtggaagggcgtggtggtcgcctacgtcgtggtggcgctctgctacttccccgtcgcgctcatcggctactgggcgttcggaaacacggtcgaggacaacatcctcatcacgctcagcaagcccaagtggctcatcgcgctcgccaacatgatggtcgtcgtccatgtcatcggcagctaccagatctatgccatgccggtgtttgacatgatagagaccgtgctggtgaagaagctgcgcttccctcccggcctcacgctgcgtctgatcgctcggaccctctatgttgcgttcacgatgttcatagccatcaccttccccttcttcggtgggctgctcggtttcttcggcgggttcgccttcgcgccgaccacctatttccttccctgcgtcatgtggctcgcaatctacaagcccaagaggttcagcctctcctggttgaccaactggatgtgcatcattcttggggtgctcctgatgattctgtcgcccatcggagggctccggcaaataataatggacgcgaaaacctaccagttctactcgtgagctaccaccagccatgacttgtaagcacgattggagaaatctgtcaaagcctcaaccacgagtttttgtttttgttttttgtcatgccaaacacatacatatacgtactgtttttttaatattcaaaggtgttcttcgtggcttgcgtgtgtacagtattatgtgtatgagggagacataagtttaatgatgctggctgtcaaagataatggcggttcaattacactttcatctcacttgcttcgtagctaggactttggaaggggctacagtatgtatttgggattatttgagcagtgtgttttttgtcgtttctaaagcgcaggcttctttccttggcgcttttccttgcgattacaaggatggatggcacactgaagccacacacaatcaagtttgcctgtaaatctctaatagcacgcttgcaagacgcaaattgatcaccggaaggaacctatgcgtgtgattggtaggaatccaggttcttttagcgcctgtgcttgacaatttaagactgaaatagagaaattaaaaattagtcactaaaatttaaaaccaaacgtccctttaaggctttgtttggataaggagagattga

SEQ ID NO: 18865 - DNA, 2200 bp, Zea Mays
attgaaattgaataaaaagggatggcagccaaaagggattatcctcttcaacctcctgggtaactaaaaattccccggcatctcgtgctgtcttctctctctcctttccccttccccggctccccgcggcccgcaccgctgtgttgtgctggttggttccgtcgcgtcgcttgcttagatcagatctctccttctctccccggatcccgactgcctccctcccccttccacctcaggctagccgagagagatctcggcaccgccgcccgttgccatggcggcggccaacgcccccatcgccatgcgcgaggcgctcacgctcacgagcctgggcatcgcgccgcagttcgtcaccttcacccacgtcaccatggagtcggagaagtacatctgcgtccgcgagacctccccgcagaacagcgtcgtcatcatcgacatggccatgcccatgcagccgctccgacggcccatcaccgccgactccgccctcatgaaccccaacaccaggatcctcgccctcaaagcccaaatacctggaacaacacaggatcacctccaaatattcaacatcgaggctaagactaaggtcaagtcccaccagatgccggagcaggttgtattctggaaatggatcactcccaaattgttgggtttagtgacacaaacatctgtttaccactggtcgattgaaggtgattctgagcccttgaagatgtttgataggacagctaatctggcaaacaatcagatcatcaactatcgatgtgacccagcggagaagtggcttgtacttattggaattgcacctggagccccagagaggccacaactggtgaagggaaatatgcaacttttttctgtcgatcaacagcgtagccaggcacttgaagcccacgcagcatcttttgcaacatttaaggttgttggtaatgagaatccatcaactcttatttgtttcgcctcaaagacaactaatgctggacagatcacttcaaagttgcatgttattgaactgggtgcacagccagggaaacctggtttttctaagaaacaagccgacctcttcttccccccagatttccaggatgattttcctgtagctatgcaggtttcacaaaagtatgggcttatctatgtaattactaagcttggccttttgtttgtatatgacttggaaactgccgcggcagtttacagaaatagaatcagtccagaccctatattcttgacggcggaatcttcctctactggtggattttatgccatcaacagaagagggcaggttttacatgccacagttaatgatgcaactgttgtaccttttgtcagtggccaattaaacaaccttgagcttgctgtgaatctggccaagagagctaaccttccaggcgctgagaacttggttgtgcaaagattccaggaactgtttgcacagacaaaatacaaggaagcagctgagcttgccgcagaatctccccagggtctcctgaggacgcctgagactgtggcaaaatttcagagtgttcctgtgcaagctgggcaaacgcccccactcttgcagtactttggcacattgcttactcgagggaagctcaatgcctttgagtctcttgagctatctcgacttgtcgtcaatcagaacaaaaagaatcttcttgaaaactggttggcagaagataagctggagtgtagcgaagaactaggagaccttgtcaagactgtggacaatgatcttgcactgaaaatatacataaaggctagggcaacccctaaagttgttgctgcttttgctgaaaggagggagtttgacaagatactgatatactcaaagcaggttgggtacactccagattatctcttcctcctccagaccatcttgcgtacagatccacagggagctgtgaactttgctcttatgatgtcacaaatggagggaggctgcccagtagattataatacaataactgatcttttccttcagagaaatatgatacgggaggcaacagcttttctgttggatgttctgaaaccaaacttgccagagcatgcttttcttcaaaccaaggttttggagataaacttagtgacttacccgaatgttgctgatgccattcttgctaatggtatgttcagtcattatgatcgccctcgtattgctcagctgtgtgaaaaggctgggttgtacttgcgagccctccag

SEQ ID NO: 18866 - DNA, 1165 bp, Zea Mays
cggccatctccgcatccactaccgcaggccgcagcccagcaccggccgctctacgccggcacgtcctcgtttctgtccgaggtcatcgcctccgcaacttcgtggccggtgaggtcgcaccaccatggcgtcgctcctagcccggcaggcagcgcaggcgctccgcgcgaggcaaacggcagctcgggccggccgcgtcggcgatgcaagggcacctccgtacctacatgaacgcggggattcccaagcggttcaaagaggatgaggagaaagaacagcttgcaaaagatctcgcaaaagattggaatgctgtgtttgaaaggagcatcaatacattgtttttgactgaaatggtccgtggcttgatgctaactctcaagtacttctttgatagaaatgtcacaattaactatccgtttgagaagggtcctctgagcccccgcttccgtggtgagcacgctctcagacgttatgaatctggggaagagcgctgcattgcttgtaaactatgcgaagctatatgcccagcgcaggcaattacaattgaggctgaagaacgtgaagatggcagtcgccgaaccacaagatatgatattgacatgaccaaatgcatttactgtgggttctgtcaagaggcttgcccagtcgatgctattgttgaggggcctaactttgagtttgccactgagacacacgaggaactactgtacgacaaggagaaattgcttgagaatggtgatcgctgggagactgagattgctgagaacttgagatctgagagcctctatcgctgaatctgtcttccattatggttgataaactgggttcttccattttccatattttgctcaactagctgatgaataagcaaacgatgtatcataacttaggtacgatgtttttgtaccttggcaccatctgtgtgttttgttcattgccttgctaaaggtggcaccagatgttctttgatgggaaaattccttttgtagcactgagctgttttcagtcaccttattttgtatacaatgaaacagaacgctgtgttcatggcacagtgatttggtgaatgttcacatgcttgtttccgactccgttttaaaacaaaacaaggtttgaactgattagcttgttgtaaatgtcgtttattttgaaaattgaaacaaac

SEQ ID NO: 18867 - DNA, 955 bp, Zea Mays
acgtaaagatcagcgttcccatgtgatcaacaagcttagttgctgtgagctggtttcctgtagcaaacggcgcgggtgtcggtagccagtaataataatgactccatgaagttcgtccagcaagtggtcctggaagattttagcaaggtgaagggcatcccttccgactgctcagaggtcatggtatggcacgtcgatacggctgcgccgtctttgcagaacaagaagagaagatagagagctcaactctagaacagaacggggacgagctggatggaggacggctgagtgtgttcgttgtacatgcatgtctacgccgtcaagaatcaagatgctggttgccccctgctcggtacctgcaaagaaggaaaatttttgagtttctcaccggaggatggatcagcctctgaacaccacccccccccccccttctccatcatgatgtacaattttccactgttcttttctttttttttctaaaagaagttgtgatatatgtatatttttttcttttctagagggtttaggtgaatacatacataatacccccttgaagtgcctctcaacaaggatgtaatggaaagaaaggcaagctaaagaccagcttaacaatgatggtacacatgagaatgttctcttctgttcagaagttatttccaatacaagatatccagttcgtagcaaagatagacgcctgtactgttcagaagttattccaataccaaatagcatgcttcagaagcacacaaaaactatggcattgttcttggtggtccgtgtgcccgttcactaggagcgagattgggggaccttgagtaccattgcatggttgttgttaggctgttagcccatcgccatcgtgcgggaaattaactatggtgagcctagagataatgaactgatgtggattggacacgcgcttttgaaaaaggaagctccaacagtctacctgcaa

SEQ ID NO: 18868 - DNA, 1607 bp, Zea Mays
ccgactcgataaacccttctctcgtccgcctccgcgcctcactccctctcctcctctgcttcgtcttccccacccgcggcgcgcagcacacccaaaaccgtaaccctagattgcaagaggacatgaccagcaagtttgggctcgccggcggcatcccggagcggcgggtgagaccgatctgggacgcagtcgactcacgccagtacaagcccgcgctcaagctctgcaccgcgctcctcgccaagcaccctacatccccctacgcgctcgccctcaaggctcttattctggagaggatgggaaagcctgatgaagcattgagcggggccctgaatgctaaggagctattgtattcagacaacatttttcattttgatgatcttacacttagcactctacagatagtatttcaaaggcttgaccgattggatcttgctacttcatgctatgagtatgcctgtacaaagtatccaagtaacttggaattaatgatggggctttttaattgctatgttcgagagtactcatacgtgaaacaacagcagacagctctcaaaatgtacaaaactgtaggagaagaaaggtttttgctttgggctgtttgcagcattcagctgcaggtgcattttagcagtggtggtgtgaaattattggcactagccgaagcattgctgaagaagcacataaattctcatagtttacatgagccagaagcactttctctctatgtttcaattttggagcaagagaaaaagtatgacactgctttggaagttctttctggagacttgggatctcttcttggaagggaggaggacaagcttcgtttgcagggatgtcttcttgctcaagcgagtagctatctgtctgcttctgaaatataccagaaggttctggagtcttgtcctgatgactgggagtcctttctccattatataggatgtttgctggagcatgatgtgaatctccctaaaccatccactggcgaacacacttgtccttcttgctctgttgattcagcattatccaacaagacttctcttgacaaggagctggttgaatctcgccttacaagtgcgttgtcatttgtgcaaagtctacaagaaaataactcaagcgattgtgtcagaggacctcatctggcaaaaattgaaattgaacggcagcggtgcctcaatggaaacccagataatatcaagcttatggaagctttggtgcagtacctccacagttaacacactgggttcaacaattactcttttcaaggtccaggaacttttgggaacttcattcacaaaaccaacttcagaacttgagggcattgcaaaaagaatggttgataccttttacaaaaacctgcctctatcaaattacttggatcctcaggaaagcatgtacggtgaagagcttctgtcaatggccagcagtatccttgtgcagctatactggcgcaccagggatttaggatacctacttgaagcaattttgatactggagtttggattgactgttcgcaagtatgtctggcaatacaaggttactctggtccatctgtactcttacctgggggcacttcctttagcacataaatggtaatttctcctttg

SEQ ID NO: 18869 - DNA, 5097 bp, Zea Mays
cccaaatctcgcgtgctgcctccgtcctgcccccagcgcgtgcgctccgatccgccgggtttcagcgctgcggctgtcgatttacgcgatttgtctggcagaatacagttcagagcctcgagcgctgcagatcgaggacctggtcgtcggattcgggcgccgcgggtgagacctaggcgccggagtttttgtgacggagttttggcgtggttggtggagggggggaggaaggagcggtctcatatgcgcgtgacggtcacgcccaaggacgaggaaaggctggttgacttgatggcgcgcgagcagccgcggtcggcggtggttgcggcgggcggagatttggtcactgctgccgggggcgggggcgaggggtcggatagggactcttcggggtccatagaggagattacggctgacgacttcaagaaggactcgtcgtcggcgttgggcggcgcggcggcggcggcggggccgagatctaggtcttgggtggccccgcccgccgtgggttacatggcccggaactttcgctatgccttcaatagctttgcgtggtcgcaggccgtgcggaataagccgctggggctacaaccgcctgccccagacgacgacgaggtggagcacgccgtggacgtctccgacggagagaaggaagagggcgagattgaggagggggaggctgtggaggccttggcctcgcctgctcctgcgcagcctgagaccatcgatttggactccgacgccccggagaagtcagagtcggtggctatcgatggaagtgccagtgttgtgcctgtcccagctgctgaggaagaggaggtgaaccttgatcagcgtgtggggagtatactggaggagctcgagatggtctccattgaggaagctgagaagtcgttcgagggtgcatgcgcacgactgcatacctgcttcgagaacctgaagcctctgttccaggaactggagaacgggagcccgatggctatccttgaacccctcatgcagcaggcgtttattggaattgacacactcaccactgtggcgaatttgtataacttgccgaggagggagcagaataagacaacacttttgaagttgttgttccacataaaaaacagatattcggacatgctgacgcctgagcagcgagaagagatggacagccgcgtgaggaagttagtttttggagagaaagacaatgtcagtgacccaagtaccagttgtggcaccagtgcgataaatgtttcagctccatctgggcaggtttcaaacacaggaggactgccatttgaatcaggtgcagcaaatctatttagtagcttgccaaggttggaagtacctgccaaaaggaatagtcccttgttgaatcttcatgcagattatgatgagaacagcttaccctcgccaacccgggacaatgcaccgccttttcctgcgctaaagcctattggttttggagcatttccaatggtacctgagaaactatctttcctagacagagttgagcctacaaagaattcgttatatccacccttaaatgatcctctgaaggctgtctcttcctatcagcagaagtatgggcagaaatctgtatatccaagtgatgatctaccaagtccaactccatctggtgatgagggtaaacctgcagataaaggtggtgatatatttagtgatgtttccagcttccctgttccaaagagtattgtattaccaagtacaagtcagatgcctgcttctcaacctagcacagtcagcagcagcagtattagttatgcttcaagtacaagtcagatggctgcttctcaacctatcacagtcagcagtagcggtattagttatgcgtctggtccacctggttttgctaaacaaattgagcagtcgactgcaggtccgaatcatgcaataaaggcagcatccaaaagtagagatccgaggctcagatttttgaaccgtgattctgctggtgctacagatgtaaattggcgtgcaaatttttcagaactgaaggatgggaacttgggtggagtttcagttggtaaccgtaaacagaaagcagttgatgatcctcaggtggatgacaatgcgttaaaaagatttaggggcggaattgcgaatcagagagacatgcagcctacggggaaccccaatcagcttatgaacatcagggctcctacacatagtagcagtatcaatatgaaaactttgcaacctcctcaaactactgctccacatgtcagtgcggctcctgctgtcccattgcctcctatgttgttaaaggacattgctgtgaacccagcattgcttatgcatttgatccaaatggaacatcaaaagaagtcagcatcagaaagtcagggtggcatgtctagtgggatgaccaacaatggaattgcaggcatggttttcacacctggcaatgctccgaagatcacagaagctgcacaagtcccatctgttaggccacaggttccagtgcagacacctcctttgaactcacaaaatgatggtggaatcgttcgcatgaagccccgtgatccacggcgcatcctacacaataacatagcacagaaatctgatgcaatgagcttggagcaagtgaaaaataatggaactacacagccagactctcagggcaccaaggaccagactactccagtgccttctcaaccagccttgccgtctagcattgcaaggccattcagcagcgcaaaacatgttgatcctgtctctaattcacagttagctgctacagctattatggctccgacacaagctttgagtagcgtaaataaggtggatccaagactagcagttgaacagaatggacaaaatgctgatgcaacaacaaatggtgcttctgcaacaacacttgaagctacacagcctgttagtccatggggtgatgttgatcatctccttgatggatatgatgaccagcaaaaggctctgatacagaaggaaagggcaagacgaataacagaacaacacaaaatgttctcagcacggaagctatgcttggtgcttgatttggatcacacccttcttaattctgcaaagtttatagaagtggaaccaattcatgaagagatgttacggaagaaagaggagcaagacaggactttgcctgaacgtcatctctaccgttttcatcatatgaatatgtggacgaagctgaggccaggaatatggaactttcttcagaaggctagtaacctgtttgagttgcatttatacactatgggaaacaaactgtatgctactgagatggccaaggttcttgatcctactgggaccttgttcgctggacgagtcatatcaagaggtgatgatggtgatccttttgacagtgatgaacgagtgccaaaaagtaaagatctggatggggtactgggtatggaatctgcagttgtgatcatagatgattctgtaagagtctggcctcataacaggcacaatttgatagttgtagagagatacacctatttcccctgcagcaggcgtcaatttggccttcctggaccatcacttctagagattgacagagatgagaggcctgaggatggtacccttgcttcttcacttgcggtcattgagagaatccaccacaattttttttcacatcctaacctcaatgaggctgacgtgcggagcatactagcatctgagcagcgaaggatacttactggttgccgtattgtctttagccgggttttcccggttggagacgccagccctcacttgcatcctctgtggcagactgcagaacagtttggtgcagtctgcacaaacctggttgatgatcgggtcactcatattgttgcaaactcccctgggacagacaaggtgaattgggcattatccaaaggcaaattcgtagtgcatccaggatgggtagaagcttcagctctgttgtaccggcgcgccaacgaacatgactttgcagtcaaataacaccctccctgagcccgaattcatcatataggcttcggggaagaattcttctcagggatggaatgtgttcatggtaacctaacatgattaaaaaaaaaccataacaacatatctaaaatgggaccatggtaagaaggaaaaccaccacccaaagaatttcaggccttaaaatgaatggtaacgaagaaaacgctttatgatagcctggaagaggagactgggtctgttgtggatgtcattacctaggtggtgggtggtcaagattcctttttagaaagccagcaaagatgcgcgaaaaaagtgatgatgagcagatgctcaccgcctcatcctttgtaacatgtagtagtaaaagtggtgcagttttggtaagggtcctaggttcagaaatgttgcttctggccaagggaacttgggggattttgccgttttggtagctgccgctggtcgcctgtcgaaagtgtggcctcagctgaacggcgtcatgaatcattggtgcagcgcatttaataggatgggtttgctatgtcagtgtttgtgttaggagtagcttgagtataaagctggttcaaaggcacgggacacctggtgctttgcctgctgctgctcgaaacgtactcgtcccccttccgaaactttaaggcagaaaaacgttttgttcagttgggtcaggtaaaggggttgagttgatggcatcagagtcagagaagaaccagctgattcaggttaacgggttgaagatttcatgccgtcagtgaacgcgttggttgctatatggaaggttggtattccaaaaaagaaacgcgtgacatgtcttctaactgaaaaggaaaaaaaccgttataatttaactgttttcgcgagaattggttcttttgggatgatgcggccggtttttttagtgtttgttttccgaacaagcttttgtttgcggccttactgacaaggatgttttggccattttggttgtttcaactttcgatgggatttggagaatgatgatccgtggtcaaactttccttgcagcttgcaacttccaagttaatacgtcaaaaataccatgtatcttatgaacgacataaagacgtttttcttgttgagtacaataaaaatgctattttcagaaaaaaaatcattgactctagg

SEQ ID NO: 18870 - DNA, 1085 bp, Zea Mays
cacggagacagtttcctgatcgttataattattagatgggcacaagcagtggttggctgaagtccagttcctgggtgttcttgagcacccgaacctcgtaaagctgataggctactgcgccgtggattcagaagccagcaagcacaggctgctggtctacgagttcatgcccaacaagagcttggacgaccacctgttcaaccgagctcaccctccgctttcatggagactgaggctgcagatcatgctgggcgctgcgcggggcctggattacctccatgaaggagtgccagaagttcaggtgatctacagggatttcaaggcatccaacgtccttctggacgctgaattcaagccgaagctgtcggatttcggcctcgcaagagagggtccaacagaagggaagacacatgtctccaccgcggtggtggggacgcacgggtacgcggcgccggactacatcgagacggggcacctgacggtgaagagcgacgtgtggagcttcggcgtggtgctgtacgagatcctgacgggccgacgctcgctggagcgcagccgccccgcggaggagcagaagctgctggggtgggtgcggcagcacccgccggacggcgccgggttccgggccatcatggacccgcggctgggcgggcggtacccgctggccgccgcgcgcgaggtggccaggctcgccgaccgttgcctcggcaagaaccccaaggagcggccggcgatgagggacgtcgtcgaggtgctcgagcgggttgtgcagatggagccgacgactacgaccgcagacaagagaggaggtgacggcaggctgccggcgaagaggtgacggacggcggcggcggcggcgttgccgggatacgccgctccgtcgtcccgttctggccctccgggtgtgttctaacttccgaagtttgtatgtatcggaaagtatacgtcaggagaaacgaacaatttcctgaacaggctatatactacatgtgagattcgatggtgaatttgtgatttgaacacgcaaatgaagattcagtaaaaattcacataactaactaacacgtgttgcagaaatgcatgag

SEQ ID NO: 18871 - DNA, 1834 bp, Zea Mays
cccttcccgtctcatatctacctcgaaagaggggtcgcagacggaacccttccaccctcccgacaccaccttcgattcctctgcgatttccccccgcgcgctcgccgattccttgatcgactcccgcgtgattcgctttctggtcggattctctctcctcaagcatgcagtcggatcagcctgtgatcagcttgcgccccggcggcggcggcggcccgcgcgccggccgcctcttctcccccgcctttgccacctccgtttccggagacttcctccgcctgcacgtcggtggcgcctccggcatctccaagatcggtgattcacattttgagccacgtgagcgtgttcgttacacaagagatcaacttctcgagctgcgtgagcttgttgatgtgtctgaggacattttaaggctcaagcaagagattgatatagagcttcatggtgaagatcagacctggattcacaatgattcagctgttcaaggacaagtccaaggtcaaacacaagcacagaatcggtatgctgagacggataatcgtgattggcgtgcacggtctgcacaaccgccttcggctaatgaagagaaatcttgggacaacatacgcgaggctaaagaagcctacacctctagtggtaggcaacaagagcaagctaacagacaagatcagttaagctcccagtttgcttcgaaagctcagtttggctctacccctgctcttatcaaggctgaagtgccctggtcagcccgaagaggcaatctctcggagaaagaaagagtgttgaaaacagtgaaaggtatactgaacaaacttacaccagagaaattcgatcttctgaagggtcaactaatggaagctggaattactacagctgatatcttgaaggatgttataaatctcatatttgagaaggcagtttttgagcccactttctgtcctatgtatgctcaactttgttccgatctcaatgaaaagctcccgacattccctcctgaagagccaggtggcaaagagatcacattcaagcgtgtactattgaacaattgtcaggaagcctttgaaggtgctagcagcttaagagctgatattgctaaattaactggccctgaccaagagatggagagaagggacaaagaacggttggtcaaacttagaacacttggaaatattcggctaattggtgagctactcaagcaaagaatggttcctgagaagatagttcatcacattgttatggagctattggggtctgggccagataaaaaaacatgccctgaagaggaagatgttgaggccatctgtcatttcttcaatacgattggtaaacagcttgatgaaaacccaaagtctcggcggatcaatgatacctactttatccagatgaaggagctaacaatgaatccccttcatttcacttgctcccaaacaagccctagatgtccaaggaacgcagtaccaaagatgcgaggaacagccagttttgggctgtataattttgcgagatcagatgagtgttaatttattattattattattgtttggaccaggatggaaagaaagaagccatggattttacccttgggcgaccagcttattttgctggaggccccagatgaacaaggctaaatatatgatgttttcgtgtccacttaaactgttgctagttcttttcctgcgactacactttttgtaacgttgtactatggttttggaccgttttgtctgttacagtatattttgcctttatttaggagtcatgactcgatctgcctaggttcttgtggtgtttcttcctttgggctttggatttccatgctgtttaactgaagatt

SEQ ID NO: 18872 - DNA, 1603 bp, Zea Mays
gttctctcgttcctctcctttcctaccgcacccgtctcctggcgcacctcgcccttgccccaccccggatctcagcctccagtcctcgctgctgctgctccagcgccacgaattgctcgcctcgtctccctctcccttcgaccccgcctcgtcgtggtcgtggtgaccaaggaacccaagctcggtggtggcggatcgggggccggcgacggcgacgacccgagggaagaagctcacgccgctgcacctggccgcgagcccgcgacactagcggaggacaagcgcgacatcctacggtaggccatcacaggggcgttgggggacgacggagtggctcgggacttgttcgagcacgcgttgagcaacgcgccggagaagcttccattgcagtcctcgccgtcaaaatccgtccgggtgtccacgacactggtcgaggtcctgcgccgcgcgcagtccacgcagaaaaagcgcacgaacgctgctcgatctgctccaggactcacagatctccgtggagtagctccacatccccactcgctagataagatcttccctcgcttgtttcttccgctgctggtccgctgtttgctcactgttctgatgttttttcaggtccacatgccgaaagcaatggcgacgctgaggagatagctgctcgtgaagcctgcccgagcctcctcgtgccagatctggccaaacttgaatcagttgtttactgatttctcccgagcatatgtgtgctgctggcaacttaccacatggggtattcttcatcttactagatcaagtctcacctaaattgaattgaaactgaatatttttaacaaattgagcagcgacttacagctccaggtttataataactgtagctaacatatattttcaatttgcttctactggcagtggcggtgttgtatgtttcttttcttataaggtggtccaaagcaaaatctgagtcgaaatagtcatgattcgacaactatagaaacaacttcatatatatttgttggatgttgccatattagctgtaaaattggccatgattcttggtatattttcatatgacacagtgtttcgtatctgcctccaaactacccaacctaatgcagatgataaatatgtagctattgataaatatatgattattacagttgaagaggccaaagagttctacccactctttgggctaggtgccaatgtggcactcatcttttctggacacacattgaagtatttctcaaatatgaggaagattaggtcctagagtggatggttggccaaattcgttgaaggacatgacgagcatattggttgtaccgggtcttgtcatcactggtgtctattggggagtgaacagatttgttattgatacctcatcaatgtagcggaaaaagaaggtcaaaccaaagctcatcatgggtgagagcttgaaggttctattgtcatcttggtatgtgagggattttgcaacattggtcgttgattatggaataagcattaaccttatcgaggtggatcctttgattctattgaaaatgcaatgctcaacatttttattgttgttaacttttctaattaaacagaatgcagagtttttaacaac

SEQ ID NO: 18873 - DNA, 113 bp, Zea Mays
gtcgcgtcctgcatgtgtgcatggtcaggaaagagaggaagtagaatggcatctcagaaccctgtgctgtgcggttatagttgagaggaaatcatgcatcggccccacccacc

SEQ ID NO: 18874 - DNA, 2359 bp, Zea Mays
ctcaacactccactacggtacctcagcaacaatgaactgcttgcgaattaacactaggaatatactactggtaggagtagaccgtagtttttagagctgatcactgtttttagagctgatcactgatgaagatgaaaacggcagtaaacaggggccagaccgcacaaaggaaggaaggaaggcggttttttcggacgtggcgtgtccactcatcttctcacctctttcttcacgctgttttgtcctctcctcgcctcgcccggccccatccatctcggcatctcgctcgtcgtcctcctctcccctccataaaatccgatcggcagctcctggccgctgcccactcctccccgctctggctcttcctcgcgcctcgcgcgcccacccaccttcacgcgctctcccagctagatcgaccccactggcaatcgcgcaggctcccctatcccttcctgttccttcaaaaagactggactggatcttcccagagttcccgttcggagagccgccggatcttcttcgacgaggcttcgatctgctgctctccgtcggcgtgttggggacttgcaccttatccgaagatgtcttttcggagcatggttcgtgatataagggaaagttttgggaatatatcgaggcggaactttgaggtgagaattcaccacagagggaagtctcttgggtcttcaggtgacttgcaagacaggcctgctgaagttcagcaaagcaggtgggctagccttcctcctgagttgctctgcgatgtgatgaaaaggttggaggaagatgacagtagctggccggatcgcaaggatgttgtttcctgtgcatctgtttgtacaacctggagggatatgtgtaaggatattgttagaagtccagaacattgtgcaaagctcacatttccagtatctcttaagcaggtaatgagtgggttcagtgaatgtttatgaattgtgaatcctttccctctaaattcaccttgcctttgctgaaattctctcatatcacctaatattggtgaggagcgggggcatagttttagttattcagatttagaactcttaattaacaaggaaactctctgtccacgaattctgtttcctgtctttcttaacacttgtttgaatttttcttgttcagcctggaccccgagacggggtaatccaatgtttcataaaaagggacaaatcaaagctaacgtaccggctctacttgtcccttagctctggtgtgcttgatgagaacgggaagttcctgctagcagcgaaaaggagccgcaggatggcgcacacggagtatgcaatttttatggactcgaggaatttctcccgatcgagcactggctacattgggaagctaaggtcaaatttccttggaactaaatttatcatctacgacacacaggctccgtacaatggcgggagagtttgcacacaggaacgtgcccccagccgtcggttgtcttccaggaaagtttcaccaagagttccaagcggcagctaccccgtcgctcaggtgaactacgagctgaatgtgctgggaacccgagggcccaggcggatgcagtgcgctatgcattccatccccgcatcagcggtggagcccggcggcgtggtgcctgggcaaccgaaagagctcctcccgaggctgttcgacgagtccttccgcagcaccgcaacttcctctttctccaagtactccgtcgcggacagctccatggacctgggcagctgcccgttctccgaggtcgaggtgggcgggggaagtctgcgagaaggtgacgagtcggagaaggagaggccactggttctgcgcaacaaggcgccgaggtggcacgagcagctgcagtgctggtgcctcaactttcgcgggcgcgtcaccgtggcctcggtcaagaacttccagctgatagctcctgcaaagacgcagccgcagccgcaggcctccggccccccgccgccgccgccgccgtcgtcgtcgtcgtaccatgacccggtgatcctgcagttcggcaaggtcgggagggacatgttcaccatggactaccggtacccgctgtcggccttccaggccttcgccatatgtctgacgagcttcgacaccaagctggcctgtgaatgaatgaatgaatgaatgaatgaacgaacgaacggtgagagagtcgttcgttttatgtgttccaaagtgataagcattctgagccttggcatgtaaataatttaagaagtaggtgtttgattcaagtattgtattgtttcgtgagacaagacaatgttgcttctgaaacctaaaagtgtttcttggtcagtgaagcaaatctactaaactagctgcctgcaattatttattcttgtcc

SEQ ID NO: 18875 - DNA, 2058 bp, Zea Mays
tttttcaatcttgtgagcagatggttgattttgtcagggaaggttttcttgggagtactcatgaattccgaaacaggttccagaaccccattgaaaatgggcaacacacgaattcaacatcagatgatgtgaagatcatgaaccaacgatcacacatcttgtttgaacaactgaaaggttttgtccagcgaaagagcatgaacgttgtgaagaatgatctaccaccaaagaaggtttttgttattactgtaaagctctcacagctgcagaggaagctatacaaaaggttcttggatgttcatggtttctcaagtagtggttattcagaaaaatctcacaggtccttctttgccaagtaccagacattatcccaggtatggaatcatccggggctcctccagatggctaaagaacaaagaggaaatttgcgtcgtgaagacgcggttgagaattttatgatggatgagagttcaagcgatgataatgttgaaaattacttgcctaatggagagaagcaaaaggataaagctgatcagcagtccaagaaaagcaacatcattatgaatgaggaaagtaactggtgggaggaacttttagatgagaatacttatatgaaagcagattacagtggcaaaatgaccttgctccttgatatcctgtcaaaaagttctgaattaggcgacaaagtattagtgtttagccagagtttgaccactctggatttagtagagttttatctggcaaaattgcaaatcaatggaaaagaaggcaaacattggaagcgggggaaggattggtacaggcttgatgggagcactccatcttctgatcgtcagaatcttgtggagatgtttaatgaccttgaaaacacaagagtgaaatgcacattgatatcaactcgtgctggatccctgggtatcaaccttcatgctgcaaatcgcgtggttcttcttgatggatcatggaatccaacacatgatctgcaagccatttatcgagtttggaggtatggccagaccaaacctgtatatgcctaccgcctaatggcacatcaaacaatggaagagaaaatatataagcgccaggtgacaaaggaaggccttgcagcaagggtggtggatagacagcaagtttcaagaaccatctccaaagaagagatgctgcatctttttgaatttggtgaagaggaattaatggaacagaacgagaatggttctactatgattgagaagccatccacttctaacactattaaaacctctgtgcctgttcctgtcgacagtctcatgctgagcctgctcagtgagcaaactcggtggatttcaggttaccatgaacatgaagctctcctccaagaaaatgaagaagaaaagcttacaaaggaggagcaggacctggctttgtccgaatgggagtcattgaggaaagctgcatctgatcctgagagaaaatcaagcatgagcgcagttccaacatatcccaatcctgtgcggccacttaagcctgcttcaagaagccggcaactgcagcaacctaaggctaactcaaataaccaaaagaagtgcaccaacttaacccacttgctgactctgagaagccatggcacaaaagcagggtgcacgacaacctgtaacgagtgcggccaggaaattagttgggagactctaaacagagatggtagatcgagatgatgcctgtctctgtggcattgccagatttttttggggtctttatgtaatgttaacgtccaggtagcagtatatatattgcgtatacgagagtattagagtaggtagaatgtagaatggacaaaaaatggctcttgtggtacacatggtagaacgcatgggatgcaaaaaatgaacgatcacattgttatggaatgtagtcgtaacaagatgtttgttatgcacttattgtcattttcttttccttatcctcagcgctagctattttaagtcaagtgtttgtctgaaatttgccaatcggaaggcataactttataggtttaaaataatgaatactaataatgtcttggaaccgattctcttacctcgg

SEQ ID NO: 18876 - DNA, 127 bp, Zea Mays
gcaccgcacatcgtgcggtgtccggtgcgcccccggcggcccttgaaaatccggaggaccgaattccgtccacgcccggtcgtactcataaccgcatcaggtctccaaggtgaacagcctctggcca

SEQ ID NO: 18877 - DNA, 342 bp, Zea Mays
atcgaacccgggacatggaggtggcatttgaagtatggttagcttgaggcgacgccgactattgggtctttgttctgggaaagactcattgccagttgatcttcctaagccgattgaaaatgaaaaaactgtggaagttgcacactccaatgtgaagccattcagtgtgcatccactacccttggcaaagacttctgatgtgctcataaaatcctcaaatggttctgatgattcaaaggaagagaaaacccagtactatccaggtctatacttcatccttattctgtattattggcatttcttcactttatgtccaggttacttgtggttatggtacttaaa

SEQ ID NO: 18878 - DNA, 4415 bp, Zea Mays
gctcgtgcgtactcgtacgacgagctacagtgcagatagagttccccaagatcgaagtgaggtatgaggatgtgacagtggacgcttacgtgcatgttgggagcagggctctaccgaccatcccgaacttcatatgcaacatgacagaggcttttctgaggcatctgaggatctatcgaggaggaagagttaaactgccgattttggacaacatcagtggggtaattcgcccatcaagaatgacactgcttttgggccctccaagttccgggaagaccaccttgcttcttgctcttgctggacggctcggtcctggactaaagatgtctgggaacattacttacaatggccaccatttgaacgaattcgtgcctcagcgaacatctgcttatgtcagtcagcaagactggcatgcttcagaaatgacggtcagagaaacgctggagtttgccgggcgctgtcagggtgttggaataaagtatgacatgcttgttgaactgttgaggagagaaaagaatgcggggataaaacctgacgaggacctagatgtgttcatgaaggcgttggctcttgagggtaagcagacaagcctcgtagcagagtatataatgaaggactggacgtctgtgctgatactattgttggagatgaaatgatcaaagggatctccggagggcaaaagaagcgcctgacaacaggtgaattgctagttggttctgcccgcgtgctgttcatggatgagatatcgacaggccttgacagtgcaactacatatcagattatcaaatacctaaggaattcaacacatgctcttgacggaactacaatcatatccttgcttcagccagctccggaaacatatgagctatttgatgatgtcattcttatagccgaaggtcaaatcgtataccaaggtccacgtgaatatgcagttgacttttttggtgctatgggattcaggtgtccagaaagaaaaaacgtggctgattttttgcaagaagttttgtccaagaaagatcaacagcagtattggtgccactatgattatccataccaatttgtttctgtatcaaaatttgctgaagccttcaaaacatttattattggtaagagattgcatcaggaattaactgttccatacaaccgacatcacaatcatcctgcagctctttgtacatcaagttacggtgtcaagaggcttgagcttctcaagtccaactaccagtggcagcgtctgctcatgaaaaggaactcattcatatatgtcttcaaattcattcagcttctacttgttgcccttatcacaatgacagtgtttttcagatcaacaatgcaccatgactcagttgatgatggaatcatttatctcggtgccctttactttgcaatagttatgattctgttcaatggcttcactgaagtctcaatgctggttacaaagcttcctgttctttacaagcacagggacctgcacttctacccaccttgggcgtacacacttccttcttggctcttgagcatccccacctcactttacgaatccggaatgtgggtgcttgtaacatattatgtggttggttatgatccccaatttacaagatttttgggacaatttttgttgcttttctttctgcaccaaacatctttggctcttttccgagtcatggcctctttgggccgcaatatgatagtcgctaacacctttggatcattcgctttgttggttgttatgatccttggaggattcatcataaccaaaggtcgagcctctctattttcttattgataacagttcaagattatatgtacctaatgttccctcgataactaacagaaagcataccagtatggtggatatggggttattgggtatctcctatgatgtatgcacaaaatgctatttctgtcaacgaattccatggtcattcttggaacaagcaatttgcaaaccagaacatcacaatgggtgaagcgatactcactggatatgggttattcaaggaaaaatactggttttggatcggtgttggagcattgtttggttatgcaattattttgaacatcttgttcacaatgttcttgacacttctcaaccctattggtaatctgcaagctgttgtggccaaagatcaagtacggcacagggattctaggaggaagaatgacagggtagccctagagctaagatcatatctgcattcaaattcactaagtggtaatctcaaggaacagaaggggatggtgttaccttttcaacccctttctatgtgcttcaggaatatcaactactatgttgatgtaccagtggaattaaaaaagcaaggtgtagcagaagaccgcctgcagctgcttgttgatgtcactggagcttttaggccagggatactaacagctcttgttggagtcagtggagctggcaaaaccaccctcatggatgttttagctggcaggaagactggaggtctcatagaaggaagcatcactatatccgggtatcctaagaaccaagagactttcactaggatatccggatattgtgaacagaatgatgttcactcaccttgcttgactgtgatcgagtctttgttatactcagcatgccttcggttgccttctcatgttgatgcagacactcaaagggcttttgttgaagaggtgatggaacttgttgagttgaatcccttaagcggtgctcttgttggtctgcctggggtaaatggtttatcgactgaacaacgtaaaaggttgacaatcgctgtggaacttgttgcaaatccttctattgtgttcatggatgaacccacgtcaggattggatgctagatctgcagccattgtaatgaggacagtgcgtaatattgttaatacaggacggaccattgtctgcacaatccatcagccaagtattgacatatttgaatcttttgatgagcttttattcatgaagcgtggaggacagcttatatacgctggtcccttaggtgccaaatcgcgtaatctggttgacttttttgaggcaattccaggagtgcctaaaatcagggacggctataatcctgctgcatggatgttggaagttacaagcacccaaatggagcagattcttggagtggattttgctgaatactatcggcaatcaaaattatttcaacagaccagagaaatcgtcgaggccctaagcagaccgagcagtgaatcaaaagaacttactttcgccacgaagtatgctcaaccattttgtgctcagtatatggcttgcctatggaagcacaacctatcgtactggaggaaccctcagtacaccgcagttagattcttctacacagttattatttccttgatgtttgggacaatttgctggaaattcggttctagaagggggacccaacatgatatattcaatgcgatgggtgccatgtatgcagcggtgctgttcataggaattaccaacgccacttctgttcagcctgtgatctccatcgaaagatttgtatcttatagagagcgagctgctgggatgtattcagcgttgccttttgcattttctctggtcactgtggagttcccttacatccttgtgcagtcactcatatacggttcaatcttctacagtttgggatcatttgagtggacagcagccaagtttctgtggtacctgttcttcatgtacttcacgttgctgtacttcactttctatggcatgatgacgacggcgatcactccaaaccataccattgcgcctattattgcggctccattctacacgctgtggaatctcttctgtggattcatgatcccaagaaagcgcatcccagtttggtggaggtggtactactgggccaacccggtgtcgtggacgctctacgggctcctgacctctcagttcggcgacctggaccagcccctgcttatggccgacggcgtcacctccaccaccgtggtggctttcctggaggagcacttcgggtttcgccacgacttcctcggcgccgttgcggccatggtggccggcttctgcgtcctcttcgccgtcgtcttcgccctggccatcaagtacctcaacttccagcggcgatgagagagcaagtggttcagctagctagctagtatagtagccaccgccgacacagacccaccaaacggatcgcagcctactgtacatgcatacaccgatcagtgcaggagggcagcagcacaatgaattatgaatgcgatgtacctaccagcgcgtcgtattggcacagttaatttgcccattacccccagaacatttcgccggggtaaataatcttccggtcggtcacgggagcgagagtgagaaaaagtaaagggtactgtatagccagctattccatgtacttgctgccttggcctcccctccatcgttatacggtggcgtcgcttcatgcagggttt

SEQ ID NO: 18879 - DNA, 2120 bp, Zea Mays
atttttgtttgcatgctcaagaccaaccattagttttttgtcacaaaaggatatcacagaaggaattgtgaaagagcaggaacctatcagtgttgagagatctgcttcagtggaagtcatggatgattcaccaatcctaggtgtgattgagaagaaacaggatgcctcagttgaagattgtgaggacttggctgagttctcacctgcaagggagatgactgatgaggccattcctgttactgaagataaggaagtggccatcagtgaggagtctgttactgaagataatgaagtggcaatcagtgaggaggctgttactgaagataaggaagtggccatcagtgaggaggctgttactgaagataaggaagtggccatcagtgaggaggctgttactgaagataaggaagtggccatcaatgaggaggctgttactgaagataaggaagtggccatcagtgaggaggccatcgaggaagatggttttgctaacactgttgagactgatcctaccccaaaggagattcttctgactgaaggtgaaatcatactcattgaaggcaaagaaggtgctgctaatgagatgccacaggctggtgagaccagtgaagaagatgaggaagattaccttgctgaattgaaagaaggggctgctgatcaggtgctgcaggctgagctggcagacaatgaaacaagtaaagaagatgaagatgacctaagtgaaaagagagaagggactgctgctaagatgctgcagggtgaactgacggacgatgagaccagcgaagaagacgatctcgatgaagatgaggaatgggtttcagatgatgatgagaacaccgaggaagattaccttgctgaattgaaagaaggggttgctgatcaggtgctgcaggctgagctggcaaacaatgaaacaggtgaagaagatgaagatgccctaagtgaagagagagaagggactgctgctaagatgctgcagggtgaaccgacagacgatgagaccagtgaagaagacgatctcgatgaagatgagggatgggcttcagatgatgatgagaacactgaggaaattggctctactgacgagaccgatgaagatcctgatgagaccaatgaggagagttacacctctgatgcagtccaaatgatgcagggatctgggatagctgaagatgccaacgaagatgcctctactgaagatgatgatttcagtggcgacctaccaccagagtttgaaaatatcatgatattcagtggtgctgaaaccgagagtgacattgctcctccagtgctcgaggaaaacaaggatgctgttgtatctgcaacaaaaactgcaaagtccctggatgattctgccttaaaaacagggcaggaggaggagggtcctgaagaggttgacaacgttgtgaagtccctggatgaagaggtagaatcaaaggagatgcagaagcagcaaccacaggattataatagcatgagcctcaggaagcttaaagccacacacaagaaatatctcattgctgcaaaggaggaggtcaccgaagggaagaggcttcctctcgaggaggtggatgaaaacgcctgcatcgaccactgaacagaacaagcaggcgaaattttgtgtggatggcgtctgccacaaaaggattgaaacgcggagtgtgctctggttgtgaagtgataactaggctaccgcatgttcattttcaaaagttttcgtgtgtgatcgtgatcaggggtgaaaccatggtttcagccaacaaacttgcagttcctgttgcttctcccccttttttcctttatatatatattttgtatcggttacagaacatggtttatccagtgaagatgctaagtttcgcttaataatgtatatgaaggtcctggatacctcaaattttgttcatgttgaaccagtgcgaagttatagaaacgcttcaaagttcaaatagcatttagcatgttccatgtgctgctatttcagcactcattcccgtgctggcaatgcaaactgcaactggtcattagttagcattgactgaattttctagcctgttcgctttttatttcgaggaacctgctttgtatcgttgaagtatctctctaatatctgtgta

SEQ ID NO: 18880 - DNA, 2095 bp, Zea Mays
aaaaaccttgttttgcacacttaagatacagttgctgtgaaaagaactgtccaagcagatgggattagagctctcaaaaaagcagaaagagaagcatatgcccctccagcaggctcaggattcatctctagtttcatgtttggctcaggaaggtcattgatagacaagatctcatcgattgacgactctatgtttggctctacctcgtatctatcagaacaggcaagagtagttgatgattataccatttcccaggttattacgagagaacttagtgatggagatgtttcacggttgctaattgttgtgacgggtgcaagccatgttatgtacgggccacgaggaagtggtgttcctgggagaatatctaaaaaggtgccaaagaaagaccaagttgtggtactgcttgatcctgaaagacaggttataaggagggaaggtgaagtccccattgctgatttcttatggtattcagcggctaaaccttgcactagaaattgttttgaccgtgccgaaatcgctcgagtgatgaatgctgctggtaggaggcctgaagctttacctcaggatcttcagaaaggactagatcttggtgtagtttcacctgaaatattgcagaacttttttgacctcgagaaataccctgttatgacagaactgattcatcgatttcaaggtttcagagaaaggctgttggcagaccctaaattccttcaaagattagccattgaagaggtcatatcaataacaaccactctactagcgcagtatgaaaggcggaaagggaggttctttgaagaaattgactatgtcctcacagatactattagagggtctgttgttgatttctttacagtgtggcttcctgctcctactatttcagtccttcagtatgctgatgatggttctggttcgagtttggagtttgtcaaaggccttttaggatcattgccagataatgcattccaaaagaacatcttgggccaggattggagtatcaagcaaagaattgcagcagtgttggttggtggtctgaaacttgccagtgttggtttcatttctagtgttggggctggggtttcctcagatctcatctatgctgcccgaggaattgtgaaaccttcagaaaatgtggaaacgggaaggaagagatctcccatctggaagtcagcagctgtttatagttgctttcttggaacatcagcaaatttgcggtatcagttcaactatccatatatctaggaacaggtcaaaagggcacaccatgaaaatttgatctgtttccactctccagatcatgggaataaattttgcttgcaaattatatgttatagtagttttgttttcacagtttgtctgaatttactttgctaactgtgtgttgaagattattgctggtctagtggagtatcgactaggagagagcctggtgacatactacaaccaaccccttattgctggtttgttgtcattcgtggctaggacactgaactcatactggggaacacagcaatgggttgatcttgcgcggtacactgggttacagagaagcgaggaaaagcctcctgctgaggccactatgccacctgattcagcacatttggagggttgtacgacggaaggacatgattttgatgacagcagcaataacaccaacaaatcgactggtccgagctagtgatttgattacttcacagtggctgcagatcacatggcctattttcatagacaatgaaagtggctgccttcctgctcttgggatcacaaggaagcggaaatttgaggaaatattagtcacaaaaatttgttcagattctttttcagcgttaccacaagagtgcacatacagttctcgtttctattcgttagagtaagtattgttttgtacaatctacatctgtaagaactgcagcacctaaaggatgttcagcaatgagggctttaacttgtcgcattgcatgctcgtaagcatgtttgttgcggctttaatcaagctgtttgttgcggctttaatcaagccgcgactacggcttctacaatattttgtctctatagattgcagctgcagcagtccgaaagtgtagggcataaaaaa

SEQ ID NO: 18881 - DNA, 1015 bp, Zea Mays
gcgcgcgtctttactgttagagaacaagggaggagaacatgcagctgaagaggcggaaaaccgacgtgggagagaccttgcagtggacggactacatgtcactgtcgttcacacaacatgtgataacggagacactgcggatggggaatatcatcaacgggatcatgcgcaaagcggtgcgggacgtggaggtgaaggggcacctcatccccaagggctggtgcgtgttcgtgtacttccggtcggtccacctcgacgacaagcgctacgacgagccctacaggttcaacccgtggaggtggaaggagaaggacacgagcaccatgggcttcaccccttttggcggtgggcagaggctgtgcccaggcctggatctggccaggctggaagcttccatctttctccatcacctggtgaccagcttcaggtgggtggcggaggaggaccacatcgtcaacttcccaaccgtgcggctcaagcgaggcatgcccgtcaggctcaccagcaaagactagctagctagtcactacgacctgcttgtgcatgccatgcatgcagatttcagtcacgtcatatgcaatatatattggaccctggaggttgcacgtgtacagaagagaggatgcaggagctagcagatgatcggaggtatttaggcagactgaaattgaatcgaccgcgaagagtagcacactactataccacgagtatgatctgtagtagtagtaataagaggaatataatatcattagtgtggtagtatttacttattatactactctctcttttcgtttttatttatcgtgttttagtttaaaaatgaactagcgaggttagtcaataggcgtgcatgcatggcccatcatggtcatggatatataggccttgatggttatactagtataagcagtagtgttatgtcacaagggattactgggatctgggatgatgatccacaatcccatctaaaacgaaaagagttaataaagattgttaagtttactgctgggagcct

SEQ ID NO: 18882 - DNA, 3426 bp, Zea Mays
attaagttttctgtggatgctgtgtcatctattcagttatctctcagctattgcccaaagaaggccttcattttatggacgcatattgccagttttactttccttggatccagcaagttctattattaaattgagagtcccgggcgcattccatgccttgaagagtgccttctctgcatgcctgaaatgcacacattcaagtgctgagccgtggcgagcacgcctattggaagctcaaaatattatcaaccaagggggttcaatagaagatgcagcaaatgctgctaagaatttcggggacacttcaaacagggaagaatcgtggcctctgatggagagaagcactgacggtagtaacaagcgtagtctggctgaagacatgaatcatgtgacagaggatgatgtccactccactaaaagagccaggcaatcaattgatgctaatgaacatagtgaagaggcaaacaagacaaattttgagtcgatgtctgttgatatctcatctagccagcccagctctataagaactgggaattcagaagctgtgtatcaattaattggtatgtttgctgcactagctgcacaaggtgacagagcagctggatcactgcaaatcctttcatacagtatcgctagtgacttactagcggaggtggtaatggttaacatgcaacatctcccaatctctcgtcctgaagttgaccaacagcagcttccttctacgagctctggagatggacttccactttcaagtttctcctctctgctggggattctgctgaagggagcgaaccaaattgatcaagatgaagtgtctccagctaaagaacctgcgctggtgtcgtcagttgcagatgacagaatgatacttcctgctaattcacctgttcctagctcagtaaatctacctatcgaagagaacagtaacagtccaacagttccattatgtatagaaacaacagaggccaaagtaaccagtgcaggtggcaatagttcgattgatattccagaatcatcagaagcttcccatgcctcaacagagccccagggaacccaagagcatgctagcacttttgccggtccatttcctgctgataatttctcagttggatttagtttggcacaatcgtcagaaactcgcagcccaagctcttctacattggaagcaaaccactcacagctttcatcccttagttcacaatatgttcttccaaagttggttgtcaataatattgatctcagtgatgaggccaaagatctccttcaaaaagaggcgtttgtgcggattcttgagagtgataagaaagaagcatctggtggttcaattgctcgccttccgttgcttgctcacctgggtgttgagtttcctctggaatttgatccttgggtgattcttcaaaagcacattctctctgattatgcgaataatgaggggcacgagttgactatatgcatcctgaaccggctatatcatgaggcagagcaggatcacgatttcctttcatctagaactgctacatcagtttacgaatcctttcttctaaacatagctgaaaatcttcgagacatgtttccagcttcagataagtcacttggcaaattgctttgtgagataccatacttaccagaaggtgtgctgaaactgcttgaaagtttatgttctcctggaagtaatgagaggcaggacaaggatattcagagtggtgatagggtaactcaagagttcaactcatcatctagaggaggtccgcatgaaggcaatacgtttggtggcaaataagttatttcctatgacaagcatttccaaaaagattgaagattttgcaaatgaaaaacttaattcagtgctggaaatgactccatctggtgattgtgtaactactgaaatggctacacctgaagcacacaaagatattggtttagaaaacttaacagcttcagtaacaggcatgcagactctgatgtctctatactttgcattgtgcaccaagaaacattcccttctcagacatgtatttgcaatatatggtaatctaccgcaagctgccaagcaggcagttcatcaacaagtaccaattctgatacgcactataggctcctcctctgatcttcttggaatcatctcagatccaccagctgactgccgggacctcctcatgcaggttttacaaaccctcactgatgctgcggttccatctaaagatctgatttcttccataaagatcttatattctaaaacaaaggatgttgagttcctttttgcaatcttggttcatctaccaaaagatgaggtcctgcctgtgttccccagtattgttaatcttccaatagacaagtttcaaagtgccatttcccgaatcttgcagggatcacctcggaatggcccttcacttgatccatcagaaattttaattgcaattcatgtaatagctcctgataaggaaggaataccactcaaaaaggttatggatgcatgctcttcttgctttgagcaaagaacaatatttacccagcaagttctggcaaaagcactaaatcaactggttgaacagattcctcttcctttgctattcatgaggactgtcatgcaagcaataggtgtttttcctgcattggtggattttgtgatggagatcatgtcacgccttgtgagcaagcagatttggaaatatcccaagttatgggtaggatttctgaagtgtgctatcttgacaaaacctcagtcatatggtgtgttgctgcagttaccagctcctcaacttgagaatgccttgagtaagaacccgacactgaagacgcccttggctgagcatgccgagcagccaaatattcggtcgacacttccaaggtctactttggtggttctgggtcttgctgaagatcaaccacagcaaccagcagtaacacaggtgcagagcagccaaaaccaggctgcggaaaccagtagctctgctgctgatacggctacagaagtaactcaggaatcttctggtgctagctaacatcttttatgccgaaatgggctaatgcttgcaggttgtaagccatctatcattttcatctctggagtgatgttggtgattgatgaaatgggctaacgcttgcaggattggctggatggcagagtagatacttcagataatgaagccggtgaagttcttaaagaaaggtcaatgagtcgatgaaagtgggttcaatataggccaatttgatgaacacaggcattgaattatactagattaggctgctgaatagcgtaatacctacatccatttaggtgtgttttcttgttagcgtgctattgtaatgtctatattgtaatgggtctcgacccaccaaactttgttatattaatgcactcccaatcttgattaggattagggttttcaatatgttataaagctagattctctcttccccctttca

SEQ ID NO: 18883 - DNA, 1874 bp, Zea Mays
tttcagtttccaccaaatcttaggcccggcaaagtcgacacgagcgaactccaggataaggtctggccaggctgctcgtcccgtcctcctctcgtggtcttccagaagccatggccgccgccgccgtccactgttccagggcatacgttcctttgagctctggcgcttactcaaggaaaaaaccaacttgccacaagtattgtgcatcggtggagcttacttggaaaccatgccgactagttggatatcgggattttcgactgaaagagctagcttgccaacaattggcccatggagtggatgaacaatatcctgtgaaaagtagcactgtggagcaagctcaggaccgccagccctgtctgccacaaggtgatgcttacttcgctggcctgtcgaagaaagaaatcgagagaaggcggaagattggcgctgccaacaaggggaaggttccctggacaaaaggcaggaaatggagtgaagagcacaagaaggtcatcaggcaacggactgctgaagctctgagagatcccaaggtgatgtcatatcaggaagaaaatgttagggcaccgtcagctacatagacaaacaagcaaagacaagataagtgcggcgctgaggacggtctgggagaggcggatcgtttctgtccgatccagacagaaggttctgcagatctggtccaacagtatagctgaagcagcaaagaacggtggtcacggccaagatatgcttggctgggacagctacgagaggatcaagtcagagatggtatctacgttcctgtggatcaaggagaggggacgtatggtgaagaagcttgaaagggccgtggcaaaaatagctgccaagaggcttcaagtggtacggagaagggaagaacaggccacaaggatgaagaagctgaaacctgactgtcagacgttgctgcaaaacgcggaccgtcaaccagcaagagtggtagtatctgcaaggccaaagcttaaggagaggctagctaagtggcacggtcgaaagaaagagctcgagacagtgataagttcacgggcaaggaaaagaggattgcgaaatccaccacgaaggcaaatggcagcagaaagcctcgaggctctgtcaacttcggctgcaggagcaccataggaaggatgggcatgtaccctagctactgagcagctgggagctcgtagtcgccttatagagaagcagaagcccatgcctaatgaccaattcattaggcaggcacggggttttttgtttgcgttgctgaaactacgtgtagtaatttttgttttatagccttattaggctttctgtcaaaggaacatgtttatgctccctccaatgaaactacgtgtaacatgatttatgggtacaaaaaataaatgtactagaaaaatacagttaaaaaacatttgaataccactactcgtacacttacacttacgttaattgtcgaaatgaactgattactgccattttgggctgggcgtgccatacaacaatcatggggcaacatgtaacgtacgtctagtctaatcagcgcttcccaaacttaattaaagctggtaccaaaccaaggtggtagctgctacattcacaacgttgatgcgccaaacaagctggtccaatagctacctaactgcatcacacatatacacagctacaacaataggccagaatatccataacacaacaagaactatcctgtctgcgttagcatctgcctgcactgcacaagaggaaaaggaggaacagtgtaagcatcaaccaacatgtgctggactggaggatgctagagtagaaagtcacgtacgatcaatcaatacacagcagcagcagcagcagcagcagcctcagctagcattgtacgtctgatc

SEQ ID NO: 18884 - DNA, 2795 bp, Zea Mays
tagcataccaggtgaggttctgtgcggaagttggttcggtgtggcccgtggtgctcactcgatcgatcagaagggggtttcaaaagggtataagtgtcgcaagggtggatgacaatgctgctggtcaagtcagtttaggtgatgacaacgaggatttagaccatatcaccaacgaaacccttcgtaccacaataaggaaaagcaaggaagtgctggcaaggcacaagatcataatgaatcagatatcagaaaagaagcagctcatctcaactatactagacagttccattcataatgagcaagagccactcagtggtcagagtgatggttccttatcaaacctgaatgcaattgcaaagggcacagagattggttatgaccatcagacataccataataggtctttacagcaatatgaatttgacaccacttatggagaatccatctacgatcagaacacatactatgaaagttcagaagacgacggcactgatttcagtgagaattatcagtataaaagttttcctagagctactcgtagtgtgtatgaactagaagaagataatggtatgaaacaaggctatgtggtacaactaagtcaagcaagtggacatgagcagtcagttaacgagggaacaaatgacaatgcgtctgaagttgatgttatgaatgtcatattggtagccgcagagtgtgctccttggtccaaaacaggtgggcttggggatgttgctggagctttgcctaaggctttggccaagagaggtcatcgtgtcatggtagtagttccaaaatacggtgactatgaggaaccacaagagataggagagccaaggagctaccacgttgcagggcaggatatggaagtaaagtattatcatgcatacatagatggtgtggattttgttttcattgacaatcctgtcttccactatgttcaaagtgaaatttatggtggggaccaaactgacatctggaaacgaatggttttgttgtgcaaagcagctgtagaggttcaatggtatgttccatgtggtggcttctgctacggtgatggaaatcttgtgtttattgcaaatgattggcatactgcacttctacctgtttatttaaaggcatactatcgtgacaatggttttatgccatatgcccgttcagttcttgtgatacacaatatagcacatcagggccgtggcccgatagatgatttcaggtacctggatttgcctggtcattacatggatcagttcaaactttatgatccattcggaggtgatcatctaaacatttttgcagctggtattagagctgctgatcgtttgcttaccgttagtcatggttatgcatgggagctcaaaacacctgatggcggctggggccttcatagtatcattaatgaaaacgattggaaattccagggtattgtaaatggtattgatactgctgattggaatcctaggcatgatgtccatctacaatctgatgggtacaccaactattctctagaaaccgttcagactggtaaagcacagtgcaaggaagcactacagaaagagcttggactccctgttcgtggcgatgttccggtcattgcttttattggacggctggaccatcaaaaaggtgtagatctgatagcagaggcaatgccgtggattgctggtcaggatgtacaattaattatgttgggtactggaagacaagaccttgaagatacattgaggaggcttgagagccagcattatgacagggtccggggctgggttgggttctctgtccggttggctcatcggatgacagcaggggctgatatactattgatgccatcaaggtttgagccatgtgggctgaaccagctatatgccatgatgtacgggactgttcctgtagttcatgctgttggtggtctccgcgacacagtccaacattataatccctatgaggaggttggagttggatggacttttgagaaagcagaggcaaacagaatgatcgatgccctagggcactgcttgaacacatacagaaattactggagcagttgggaaggtatccaacgtagagggatgatgcaggacctaagctgggataacgctgctaaactctacgaggaagttcttcttgccgccaaatatcagtggtgactgttgttgaactgtccaaggaactgttgatatttgtcattcatagacctgaaggctttctgtcgcatagaagtcaccgactgtttcaattcttttggtgactgcttcacacagctgctgcatgctttgtcctgaattttgcaggacggtgtgcgtcgcaacagccaaattttttttgttgttgccagttcctaataatcgcatcagatgtgaatgtgaattctgagtctacctcctggacaaacacagtggatgaggcttttgctggaaacaggttaatgctggaggaaagattgaggggaagcgtcgtgcactttttgcaagtgtttacgaattcatttgttctacagggagagctcatttagacgctttggtacaggagggtggtagatagcagagaaactgatgctttgtatcttgagtagttttgttgtatctctaaattaggatacttgttacaatgttcagttcttcatatttttttccgtgcatatcctgtagatgatttagtgttccggtcttccgaatgatcgtaaaaaaggggtttgcaggttgttgagaataatatataattatgaaagggcatcggaatccctgaacaatactgaagttctctgaaagaaccgaggccatgaatgtatgtttcggaag

SEQ ID NO: 18885 - DNA, 157 bp, Zea Mays
tacctccttgatttggttgatggtatgacttggccttcatccctgccaccgggatagacggtcgagtgggttactgcttccgcaggagaggaccaagaggagtagagtggccaggcttcgccatgttactcggttcttctccgttagttatttccgc

SEQ ID NO: 18886 - DNA, 1941 bp, Zea Mays
ttgacttgctacaagttttgtagtatatattgataaccttgcagtcacatatatttctagtcactgattaaatcctaacatggcacataacaaactatttagtagtcctgtatatgcaagctgctgctttgttagttgactcactatgttgcggagtaaagtatgtttgattattcttctttcatgaatgtaacagttgcattacagagtatacagtggttcaaaaaacaatcgaacaaagattcaaacttcaatttaaaactgcacagcatgctaggtggataggtatcattcacctccagcctccaccaaactttctgagttcggttgtttttgaagtgatgtttcgacaatagtgtggaactcacacttcagtgcatcaatatgaatgtttagagaaaaggaaaaactggggggatgggttcagactcaagagttttggtgtgtgtaggaaccatgagctcaacattagagtatcattcacttgtttcattacaataagttatctgtttttaaacctttccatttcaagcacatcctaacttctcttttttgccctctatagtaatccctgcttgtctaatatttccaatgtaatttcagtaagagctgctatctttggtatcctatgggttctccttgggaaacgcgtgtggttcttccccaatataaatgcggaggagacaacttttagagaactcgttcgtttttggcctgaaaaggatgaaggagagcggccaaagtggacatcaagacttttctatgcccttgttgctctattggtgatattactgcttaggcatcatgctcctgacgaagcagctagagccaggtaccaaaagaaggtttctaacataatcgatgacgttcttgaatggtctccgaagttagctatttctggaatgattgaaaagcacactggggctaacattacagaagaaagcaattacaccaccagggcggcgagtagtcacatgcctccatccaccgaaggcaaagcttcagaagatatggacgttgatggggataccgaggctagcttagatgaaacccaagataatgaatatgctgatgatacaagatcaagcggagcttaaaatcagagttttttttgtttgagcaatctttgttgttgtgaatctgcagaattatatagatagcttactgctggcaacaaaagaaatcagggtgtcatgttttgatgttgcatccatatattccctgcaattggttgtgttctaaggtccccagagaataattctcatatacgacaaggccatctctgcattgccaaatggtcatccagccccctgacgccatgcttctagcacacgtagtttcccaagtactacatcatatatacacaactttttcgacgtaaaaaaaataattgttattcagctgaatgtgaattgaattggacactgctagctgtggtgcggtgaaccagtacaggaaggttttgactgttatcgcaataacaacacacacaaagtaatatacattgattaggatttgcaatccatctctacttgttgacatgcctcaaagcgtcagcagctaacaacaataacaagctgctaccatgcgtgagtgcttctatttttcacagggctctgatggtgcctacaccaaactgactgcacccaaaaggaagccagatccatttacatgatgttcgcatcaaactttcagtggatccagcctccagtgttagttgatgtccgtcggccgcacaaacgccacttctgtacacctgctctctttcctgtcaaccagtggttcctgttcacttctttccccgctcttgttcttcaagcttgttcctaagacctttcagtgcgcgcacaacctttgggttcagcttgtgctgcaggagttttccttgcaacgatgtcgacctgtcaattttaagttcacatagaacatatctaaatttag

SEQ ID NO: 18887 - DNA, 960 bp, Zea Mays
ctataccttctcatggtgaggatgcatcatcagtagcagtgcagaattatttcggtgttttgatggcatatggaggcctccaagattttctgactggaaagaaagatttgacaattacattgatcaggaaccggattctcccattatattctttggatccttgcagcatgcagcccatatttgatttcaacggctaattgggttattggtcagcttgcgatatgcctaccagaggacatgagttctagtatttatcagtccttaatgaaggcgttgaccatggagtatgtggaggacataacttgttatccggtttgtgcctctgcttctggtgctattgcagaactcatcgagaatagctatgttccacctgactggctcattctcctgcaagtggttctgaaaagaataagtactggagatgaaaatgagtctgctcttctgtccaagcttctgggcacaatagttgagggtggacaggaaaaagttctgtctcatattcctgaaattgtatccaacattgctagtactgtaatggagctcctgccccttgtcccagatccttggcctcaggtagtagtgcatctttcttctgtgtggtcaatattttggtactttgtcatgatgaccggcgggaggaacaccgggcgtgtaggagtgatcaagaacagggagaagcacaagggcagcttcgagaccatccacatgctgcttagagctttttgctatgtctagttttctcctatttgttgtataggaaaacatagaatggaattcaaatttggtggccgcaaaatgtggagacttgaattcatataaagttaggcttaacattagtgcaaacagctgtattttagtttagatttagagtacacttatgtatgtgttgtttgacaatgcttatttatgatatattgaatgatacttatttatattatattaattataatgttgttcaat

SEQ ID NO: 18888 - DNA, 3705 bp, Zea Mays
cgtggtcattggcctccaccagatccgatgccttctttttcgctcttgctctgctctcatgggcagggcagggcatgcccatctacttgaattgcgatgcgtacatacatcgctgtctccatctagctgcacacatatatacatacatgcatacagagtgagagagaaacagatcgatctcacttagctgctgctgctgctgctgcttgctggtggcctgggcctggctgctgtgtctgtatcgatgtgtccgtattttctccatctcgtctgcatacgctgcaattggtaaggagctagctggcctttcatgtcttccatgctgccatagccatacggccggccggcaggcaggaggataccccatcgctcgctgcacatgcatgtatgcatggggatacatgttcatcatcagcagcacagtggctctgtatcccccatcccaatctgatcctatataggaggagaaggaggagcagcagcagcagccaggcgcggccggcggccggagtagtatccgaatccgctcaacacccaccggctggtctctagctttcctatcgatcaatggctttcaaaggactcccgcgtgattcccgagggtccctcgaagtcttcaatccagacgcccctgtttcagatcgagcaaccacctccccgtttctcctccctcctgcggccgcgtcccatcccagcctcctcgccgccggagatggcggcgatgctgacgtgggtcgggcgacacagagggccgccgagtggggcctcgtcctccagaccgacgagcacaccggccgcccccagggtgtcgtcgcccgtccctccggttccaaccgcaccagcgagagtggcaactccatcgacgagagggccgccgccgccggtgctggtagagctctcccccgggtgtcggaggagcttcgcgccgcgctctcagcgttccagcagaccttcgtcgtgtccgatgccacccgccctgaccaccccatcctctacgccagcgctggattcttcaacatgacgggctactcctccaatgaggtcgtcggaaggaactgccgcttccttcaaggttctgggaccgaccccgtagagatttccaagatcagacaggctctcgcagctgggtcaaattactgtggccgtatcctcaactacaagaaggatggtacaccattctggaacctcctaaccgttgcccccataaaggatgaggatggcagggtcctcaagttcattgggatgcaagtggaagtaagtaagtacacggaaggtaacaaagatactgctcttcgtccaaatggattgccagagtcactcatcaaatatgatgcaaggcagaaggatcatgctcgtagctcagtctcggagctcctacttgccctgaaggatccacggtcattgtcagaatcaagaaacaataccttaaaaaggaaatcacaggaatcagcaggttcagctctagttcccggcaagagaagctccgaaactggatcccgtcgtaactcacatagtggaatgagaaactctctacaaaaaatcagtgaggtgcctgaaggagggaataagaccaggaaatctggtttgcgttcttttatgggccttattggtatgggacatgggaatgtagagaagaacattctaaaaccaagggaagatcccctacttgatagcgatgatgagagaccagatagcttcgatgacgatttcaggaagaaagaaatgagaaagggcatagatttggctaccacacttgaacgtattgaaaagaattttgtcatcaccgacccgaggttaccagataatccaattatatttgcatcggatagctttttgcgtttgacagagtattgccgcgaagaaatattgggaagaaactgcaggtttcttcaaggacctgaaactgaccgtgggacagtaaagaagataagagatgccatagataaccaaacagaagttactgttcagctgataaattatacaaagagcggtaagaaattctggaacctctttcacttgcagcctatgcgtgatcagaagggtgatgttcaatacttcattggggttcaattggatggaactgagcgtgttcgagaggctgctgcaaaagatggtgccatactggttaagaaaactgcagacaatattgatgaggctgcaaaggagcttccggatgctaatttgagacctgaggatctatgggctaatcactcaaaaccagtcttgccaaagccacatatgaaggatactgcatcgtggagagccatccaaaaggttcttgagaacggtgaaagcattgatttgaaacatttcagaccagtaaggcctttaggatctggtgatactggcagtgtccacttggtggagttgcttggcacaggtgaatactttgccatgaaagctatggataaaagtgtcatgcttaaccgaaacaaggtccatagagctaccgctgaacgacaaatccttgatatgttggaccacccattccttccgacattgtatgcatcatttcagacaaagacacatatatgtcttattgttgactattgtgctggtggggaactctttatgctccttgataggcaacctatgaaggttctgaaggaggatgcggtcaggttctatgctgcagaagtggtcacagcacttgaatacctacattgccaaggtataatctacagagacttaaagccagagaacattttacttcatagagatgggcacatttcattgacagactttgatttgtcttgcttgacatcctgccgaccacaagtgtttcttccacacgatattgataagaagaaaaagaggaggaagagcaggagtaatcccatattttttgctgaaccaatgcgagcatcaaattcttttgttggtacagaggagtacattgcaccgattattaccggagctggccatacgagtgctgtagattggtgggcgctaggaattcttctatatgagatgttatatggttatacaccgttcagagggaaaacaagacaaaggacatttgctaatattctgcacaaggatatcagatttcctgcgagcatacaggtgagcctggcggcaaggcagctgatataccggttgttacaccgagaccctgcaaataggctaggttcctatgagggcgctatggagatcaaacaacaccccttctttcgtggcataaactgggctctagttcgtgccgccacgcccccagagctggaggctcccctccaggatacattggaggccacactgcctcctcctgcagctgatggggctcacaccgatatgttctgatcatacattggtccatgatgctacatgttaatttgcttaaaggaagaaaaaatattagatgatgaagatgcatgactttggcatagatgagaacaataatgtatgttaaggactaattatcttgatccatctatgcatgctcacaattagaataagattggatgtgtatattgtttctgtggttgcaatatacgcacgagtctatgaaaggacctatggatagcttgaggggatgacagacactaggcatgttgattagtactccctccgtttcgttttacaagtcgtttccaacagcttcgtgctgattaaggaatctatgaatcaatgattctgccctcccacaagcctcggcttaggccttggcatttcgtccaaccttatccggtaaacacctgctgtaag

SEQ ID NO: 18889 - DNA, 1640 bp, Zea Mays
gacgaatgcaagggatttcagcctggatcttaccggttttcataaaggtagcatggcagtggttacctttcacgtcatccgcacgaactgataaccttcaactctatcactgggttagagttgttaatggtattcagccaactggggattatcagtttgcaaaatataacaagagggcggatgttcttaaatatacggatgaagagtatgagaagtatttagttgaccctgattggagcaaggaagaaacagatcaactatttgaattatgtgaacgatttgaccttcgcttcataataatagcagataagtttccaactgctcgcagtgtggaagatctgaaaagtccttactattctgcttctcgggctcttctaattcatagagctaggtcattcgaagatgtttctgggaatccccttgtgaaggatgcctatgatgctgctcatgagactgagaggaagcgtgcattatcagcacttctctcccaaacaaagcagcaagaacgaaaggacgccgagactttagcagaagcaaaacgtatcatggaatctcgtgctgctagcaaaaatgttgatgtagctgtaatgcctccgaactctgataatgctatggtacctgttgatggtgtatctccttcaagcagtactcatccatctttagcacatccaaatacatcagctaacatcttgatacctaattcactacgaacgcttcgagtgtatttgagaacccatgcgcttgaccaaatggtccaagcagtaggtgcttcagctggccttagagttatcaaaagggttgatcagacactacaagagctagcggtgaatttgaagcctaaggtcccaacgaaagcagtttgcatagagcatattgaactgcggaatgagctactcacattgcttaacctacaaaagcagctgcaaaataaagaggctgaagtttcagctaaccgggaaagttccttcacagaggcaccaagcacacctaagcgttctaatagggacattgatcggcccttcatccctgatacaagtgggtttacaggtgaaagagcaggcaaacgggatcacaagcggaagtccactggaagatttatagatgcgcctccatcaccaccccagtcgaagcggcctagaaaattgaagggatctgactgatagtgctgttcaaatgtcaggatgaaaactctagtcaaacaaccaagtcttacagtagagatgaactagtagaacctaataggtcagcaacggcatcaatggaaatccgttgggctggccagtcatgcaggaaccgactttcgctgcttgccctgacttcgggccatatgctgggtggaccggttttggatttataatgtatctatctattattgtcatgtaatgttacacagataactgagaggtcgaaatcgtcacttttcagcagatttctgaattctgagtatgggagaccggtaagcccgacaattccgtttttgctcctgtccaaccagcacggtcaatcggttcacccaatagacgttcaacaaacaggctttgagagcacgctagtgcctgtttgttcaccatgccttcccggaagctcatctgacagctcctttactttgtttgggtactctattatttatcttaatctat

SEQ ID NO: 18890 - DNA, 780 bp, Zea Mays
gccagggtgaccaagatactccaaggaggaagaaattcccatcgaagaatttgagaaaaggaatttcacctatctactgaatgagcaccgctccatcggtggctaccagtgcctgttcgctgtggatggattctccagagtaaaacttacgccccaaatccccccgctctctctggtgaaagaacccaaggtgtttgcacatgggaatacgagagaccctgacattctttcactgagttggcccggttgtccttgagggcatggggacaccggacacccagattcctgtggcaggaccactaactgccagcagtgaagatgtgtttgagtcagtccgcgtgacacatatatggtatacatctctgggtcttgccatgaagctaccttacctgcaaatctagaatggggcccctcctcccctagatcccacggcttcgaaaccacagctttaaggaacactgccattttcaggtgcaaatttgtgtaacattttagagccggaagaaagacagaaagcacacggggggtggggggaatcatagcaattagcaaccttgtatttacaagttggtcgatatatttttttcccttttgaggcaactttcatactccatcttatataacaagagcttctagactttatttatcggcagcaggcatacagtcgtgctggagacgcatacttgctccattcaaagataatatatttgttttctatctgctgtggccctgctttgcgagtcgtattcggttcggtggcaggctggccgcattctatct

SEQ ID NO: 18891 - DNA, 428 bp, Zea Mays
ttttagttcatcgaatcagccgtcgccactgcaaccagatgccatgcgagcgtcacaatggtgaactgcacaagtcagaatccaggggacagcatggatcaggactcgtcctaaaggatggctatttttcaattcgctgcatgacttagaaccactacataccgtgatcgccagcgaccggcaccatgtggcgcattgatctgcggcgtaggagcacctggtgtaatctgcaccgtcaaccaagccctccggaggttccaaatgttgcatgtcctcgtgttcactgcacgatcacttgagaaaatttagatggttgccaatttgactggaacccagttacaagcctacttgaaagctttttttattttagattttctttccgaactttatgaaacttttgcaggttaacggttttttttttgaaagaa

SEQ ID NO: 18892 - DNA, 1816 bp, Zea Mays
gcgacgtttgcaggatgcacccacatcacggctgtaaaatccgctgcaagtccgtcgattgttgttttatctttcctctttctctatcgaaaacggagcgcctgatacgatagtagcagcacagctagctctcctccccagaatctcgccggattccgccccccgccgcgccctcgcttccgccgcaggttcgcgtctgtgcccgcgcgtgttgtactaccggcggacggcggtgttggtggtggttggtggagttgccgacgacggtaggctatggactaccggccctccgacagcagcggaactgatgatgatcttccacaatttccacataagagtatcagaggcagcggacgtgtcagtggtaatgggcgagctgttgttcctgctggttcatatgctagggcaccaactgatatggtagcacaagttcaacaacttgagcaagaagcatatcgctcagtccttcgtgcattcaaagcccagtctgatgccattacatgggagaaggaaggtctcatgactgaacttaggaaggagctaagagtatctgacaaagcacacagggaactgttaaatagagtcaacaacgataatattatatgtagcataagggaatggagatcaacaggagggcttcaggcaagcttgtctaataacccacaactgattcatgactctgttcccagtcctaccacctctggccgtaagaggcaaaagacatctcaatctgttcctgctttacctgcaccgcctcctgcgatgcattcacaacagctggctacaccaacacagccatcatcttcaactgctaggaaagcagtacccccaggccataaaggcaaaaagatgaaaccaaaggtaccaggtggctctgcagccaagcctataccatcttcagcaggtcctagtggaagaggaccgcacatgaataggggtggttctgctcctgaagctcaagctcagaatgtcgatccattgattggtcgtaaagtgatgagtcggtggcctgaagacaatagtttctatgaagcagtcatatacgaatatgatgctgaaacgggccttcatgcactggtttatgacatcgatacggcagatgaaacctgggagtgggttgatcttaaagagatgggacctgaagacataagatggcaagaggatgactctgggatagaccctgttacatatctgcgcagccggggtggcccaactagtggcgttaggaagccagcaggtcgcggtgggcccatgccaggttctgtaagaggaagaggattacagaaaaacatgcctaagaaagattttccacctccacaaaatggtgttggcaagagaagttccgatgacattgatatccttcataccgagagcctaataaaagaggtggggaaagtttttagcgttagcaatcctgatccacaggaagtagaaaaggcaaagaaagcactgaaggagcaagaacagtcgttgattgacgccatagcaaggcttgctgaggcatcagatggtgaaagtgacgggcacaatcgtgggcgaaggaacttgtatgctgctaaccagcatcaagcaagctacgttggtgccatgcccgtcggtgacagagctggtgccatgtaaacactgcatgaacgcatgcacaacataaaataactgcctgttgtacaatccatcgcctaatatttatcctggatttaggtctctgtaggctcttttgctttgggatgcttttttttttacaattgtaattcagaacgctgaccatgtaaagcttgtagatgcgtgtttctgtctctagctttttgttaaaaaaata

SEQ ID NO: 18893 - DNA, 2060 bp, Zea Mays
cttcccgctaatccgtggcttaattgcgggtgctttactggttgctttgcgctgcggtggatctcctggcgtggcgacatgggcctgggtttgggagctcttctcaaatccggcgggctctcggtctcggatcacgacgccatcgtctcgattaacatcttcatcgcgctgctctgcagctgcattgtcatcggccacttgctggaagggaaccgatgggtgaacgagtccatcaccgcgcttgtcatgggcctcatcaccggaggcgtcatcctgctggttactaatgggacaaactcacgcattcttgtgttcagcgaggacctgtttttcatatatttacttccgccgataatcttcaatgccgggtttcaagtaaagaaaaagcaattcttccgcaactttataacaattattttgtttggtgctattgggactctgatttcctttgtaataatctctcttggtgctatggggttgttcaagaaacttgatgttggtccactcgagcttggggactatcttgcaattggtgctattttctcggcaacagattctgtttgcaccttacaggtgcttaaccaggatgaaacacccctactctatagtctagtttttggtgaaggtgttgttaatgatgccacatctgttgtgctcttcaatgcaattgaaaaccttgatattgataattttgatgctattgttctgttgaatttcgtcggaaaatttctctacttgttcttcaccagcaccatacttggagtagctaccgggttgcttagtgcatacattatcaagaagctctgctttgccagacattcaactgatagagaagtttctatcatgatactcatggcatacctttcatacatgatatcaatgctgttggacctgagtggaattcttactgtcttcttctgtggaatagtaatgtcacattacacttggcataatgtgacagaaagttctagggttaccaccaagcatacttttgcaactttatcattcattgcagaaattttccttttcctctatgttgggatggatgcattggacattgagaagtggaaattagctagtagcagtcctaagaaaccaattgctttaagtgcaattattttgggcttggttatggttggaagagcggcatttgtattccctttgtcgttcttatccaacctaagcaaaaaggaggcccgtccaaagatctccttcaagcaacaagtaatcatatggtgggctggtctcatgagaggagcagtgtcaattgcgcttgcctataacaagtttacagcatctggtcacactgaagtgcgagtcaatgctatcatgatcaccagcacagttattgttgttctattcagcacaatggttttcggcctgctgacgaagccgcttctcagtctcctcatcccaccaaggactggactgaacacgtcgtctctgctctcaagccagtctatgctggacccactccttactagcatgatggggtctgactttgatgtagggcagatcaactcccctcaatacaacctccagttcattctcaccgcgccagctcgctccgtccatcgcctttggcgcaagtttgacgatcggttcatgcgcccggtgttcggggggcgaggtttcgtcccctttgtgcctggttcgccggtggagaggagtgtccctgaatctcacctgggcactgtgacggaggctgagcgcagttgaaatgaggcaagagggatgccgacaattttctgtagatcttcagacagataccactcatactcctattttattttcagaatccactggtgcgaattgttctttgtagtaccttgtgcatatagttttatatagagctgctacacaagctgctgtaaatttctgggaggcactcccaactgtagattactgcaattcatctgtaaatttcaatcttgttcaagaagaatgatcatatattggcatgttttttcttagcagttgtataattgtgagcctgacacaacaaatcccttttaccccaagaatgttaaatgtagaaaagacaagattgtcaaaactcc

SEQ ID NO: 18894 - DNA, 398 bp, Zea Mays
ttcaattgtttcatgatacacatgtgttggttattggaggggaacggtggtgttctgtgttaggtttcacgacatatctctgtggagcagattggcatatgtgaaattgataagacggtggtagatggtgatggtttttgcattatcggttctttagcgtgtcgactgtatattttgttgaaccatgtaagctgtcgtcttctctcagtgcaagctttgtgggagagatggaacaattgtgatgattcatggtcagtggatgccacttactccctccgcttgtttttatttgttgccggttagtacaaaattgaattaagtagcgtcaaataaataaaaatggaggtagtactattgagcagagctagaaagaaacgaagacttgtttgatggtgttt

SEQ ID NO: 18895 - DNA, 1086 bp, Zea Mays
gtgagccttttcatggtttgataaattctcgggcactcgagttagacaagactttactccgtattatttagaattaggggcttctgattggtcgtactcatggcaatgttggtgcctgatcttagtttctcggcatcgatctctagtgtgaagctcccaaggtacggggcatcaaagagtgagacattctttgttaagaagcccccaacattccgtgcagaagctaggccagcggaatctggcaaatatggtactaataatggccgggcaacaaagatggtaccaacaactgagttcaggaggaccagtggtggtcttgtaagatcagggacagttaatggttctccaaatagcgctgtcaatggctcgaccaaggtgttgattaatggttctgcaaatgccattgacaatagctcaaccaaagcagtcattaacggtacgccgaaggtggctgtaaatggtactagtctggtgaaaagcagcaagacttctcttgttaagacgcagaagcaagtgagacccaaagatgacccctttcaagaggaattgaaggttttgccttctgatgagggattcagctgggcaaaagataattacaattctgtgcagaggagcatagatatatggtcttttgtgctttctcttcgagtccgcgtgctatttgacaatgcaaaatgggcatatcctggtggattctcggaagaaaagcagaaagttcgaaggcggaaaactgcttcatggctaagagagcaagtattacagcttggcccaacgtttattaagctcgggcagttatcctccactagatctgatttatttcccagagaatttgtggacgagcttgcgaaactgcaggacagagtacctgctttttctcctgagaaggcaaaagctttcatagagaaagaaatgggttgttccattgatgttgtgtacaaagaatttgaggaacgcccaatagctgctgccagtcttggtcagcgtttgaaggaattgtatgattctctctaattaaagtaaaataatatatccattgcacatcactcctgtatatgtctattgcttttcatatcatgtatcagtttt

SEQ ID NO: 18896 - DNA, 3584 bp, Zea Mays
ctagaggcctacgaagtagtaggaagctgctgctctcctccatagcccctaccccctcccctacgctgccactctatcgcccagccatacagcagctaccccgctgcctgtcactgagccagcgcggcgcaagtgcgcaaagccgagcgcgagaacccacgaaaccaacccagagcccccattaaggcaggctcgctgcagcacgtctcgcgctccatcgccgcctgtcctcttcctgtaatgtcactcccccgatgcctgtgcgcagctcagtggccatgacgacgacggccgcccgtgctctcgccgccctcgtgctcgtcaccgccgccgccgccgccgccgccgtcgccgacgatggggcggcgctggtggagatcaagaagtccttccgcaacgtcggcaacgtactgtacgattgggccggcgacgactactgctcctggcgcggcgtcctgtgcgacaacgtcacgttcgccgtcgccgcgctcaacctctctggcctcaaccttgagggtgagatctctccagccgtcggcagcctcaagagcctcgtctccatcgacctcaagtcaaatggcctatccgggcagatccctgatgagattggcgattgttcatcacttaggacgctggacttttcattcaacaacttggacggcgacataccattttcaatatcaaagctgaagcacctggagaacttgatattgaagaacaaccagctgattggtgcgatcccctcaacattgtcacagctcccaaatttgaagattctggacttggcacaaaacaaactgactggggagataccgaggcttatctattggaacgaggttcttcaatacttgggtttgcggggaaatcatttagaaggaagcctctctcctgatatgtgccagcttactggcctttggtactttgatgtgaagaacaatagtttgactggggcgataccagacaccattgggaactgtacaagttttcaggtcttggatttgtcttacaaccgctttactggaccaatcccattcaacattggtttcctacaagtggctacactatccttgcaagggaacaagttcactggcccaattccttcagtaattggccttatgcaggctctcgctgtcctagatctgagttacaaccaattatctggtcctataccatctatactaggcaacttgacatacactgagaagctgtacatgcaaggcaacaggttaactggatcgataccaccagagctaggaaatatgtcaacacttcattacctagaactgaatgataatcaacttactgggtcaattccaccagagcttggaaggctaacaggcttgtttgacctgaaccttgcgaataaccaccttgaaggaccaattcctgacaacctaagttcatgtgtgaatctcaatagcttcaatgcttatggcaacaagttaaatggaaccattcctcgttcgctgcggaaacttgaaagcatgacctatttaaatctttcatcaaatttcataagtggctctattcctattgagctatcaaggatcaacaatttggacacgttggacttatcctgtaacatgatgacgggtccaattccatcatccattggcaacctagagcatctattgaggcttaacttgagcaagaatgatctagttggattcatccctgcggagtttggtaatttgagaagtgtcatggagattgatttatcctataatcatcttggtggtctgattcctcaagaacttggaatgctgcaaaacctgatgttgctaaaactggaaaacaacaatataactggcgatgtctcttctctgatgaactgcttcagcctcaatatcttaaatgtgtcatacaataatttggctggtgctgtccctactgacaacaacttcacacggttttcacatgacaggtaatcctggactctgtggatattggcttggttcttcatgtcgttccactggccaccgagacaaaccgccaatctcaaaggctgccataattggtgttgctgtgggtggacttgttatcctcctgatgatcttagtagctgtatgcaggccacaccatccacctgcttttaaagatgccactgtaagcaagccagtgagcaatggtccacccaagctggtgatccttcatatgaacatggctcttcatgtctttgatgatataatgaggatgactgagaacttgagtgagaaatacatcattggatacggggcatcaagtacagtttataaatgtgttctaaagaattgcaaaccagtggcaataaaaaagctgtatgcccactaccctcagagccttaaggaatttgaaactgagctcgagactgttggtagcatcaaacaccggaatctagtcagccttcaagggtactcgttgtcacctgttgggaacctcctcttttatgattatatggagagtggcagcttatgggatgttttacatgaaggctcatccaagaagaacaaacttgactgggtgactcgcctacggatcgctcttggtgcagctcaaggcctcgcttaccttcaccatgactgcagcccacgaataattcaccgggacgtaaaatcaaagaatatactcctcgacaaagattatgaggcccatcttacagacttcggcatcgctaagagcttatgtgtctcgaagactcacacgtcaacctacgtcatgggcactattggttacattgatcccgagtacgcccgcacctcccgcctcaacgagaagtctgatgtctacagctacggcatcgttctgctggagctgctgaccggcaagaagccagtggacaacgagtgcaatctccatcacttgatcctatcgaagacggcgagcaacgaggtcatggagacggtggaccccgacgtgggagacacctgcaaggacctgggcgaggtgaagaagctgttccagctggcgctcctctgcaccaagcggcagccctcggaccggccgacgatgcacgaggtggtgcgcgtccttgactgcctggtgaacccggagccgccgccgcagccgcagcagcagcagcagaaggcgcacgcgcaccaccagctgccgccgcagccgtcgccgccggcctacgtcgacgagtacgtcagcctgcggggcaccggcgccctctcctgcgccaactcgtccagcacctcggacgccgagctgttcctcaagttcggcgaggccatctcgcagaacatggtgtaggggaagacgtagacgttcggtgaggcgccttgagtgaggccgattgcagggggagtagtttgactgacattttgtgggacgcagcgcaggagattaacatgggactcagtagctagggtgttgttagctgtaaaaaaagtcatgtgacgcaagagcagcggagcttcttcctcttctttatcccccctccccatttttctttggtggtctaacttactaggaggctgtattgatccatcatcatctctcccgttcctctgcttgatgatcttttgtgactttcgcggtcctctgtattgatccatgatcttttgtgacctctgctttattttctgggatctttacctcagaac

SEQ ID NO: 18897 - DNA, 679 bp, Zea Mays
tgaagacttaacacgatgtcctggcatggcaactatacccaatcagataggcatcacaaggatacagaagtgctggaagctatgataaacagaatcccatcgagtgccttgagcgtcatcttaaaatggtagcattagatggatatgacggcatgggaccacatgtcaagtttgcccaattctttgttcgaaatgcccagttgctagagttaatgaagttcagaatctttagaaactaccactgtgaacctgggaaaaccaaggcatggattgaggatcagcaaaggcaactgcaagtcaggagcatgacttcccgacctgtgaagtttaagtttgtacatgattctagatataatcaggatgtttactgtggtgaggatatcagtgacctgtcagagcacatccacgatgacccatttgatcaatggtttgaatcagagaaggaagccccccggcatgctgaaggaaaagaagatgctatagtttggaactccagccaaaggcttgattcatttgatcaaagctgaataagaacctcgtcctgaacttttatttaattcgttatgtttgtgtgctttcagttgataacatcacattttctgttttgatgcttcagtaccacatcatattgttcacttaatatctctcattaaacagctgtctttccacaaacttcata

SEQ ID NO: 18898 - DNA, 1117 bp, Zea Mays
ccttttttttcttgctttactgaaagcggtccactccatatgctcagaattcaatgccttacatgtagctagttgtctgattactttcgtccatgaatggtttccagttaattggttgagaacagtgtggaagtgggcagctatgtaaacgccaatgatgcattcaaggagcccaatgatgtcttcaaggagcctggcagcagtaaacgggaaagaatgaggaggaacaagctgaatgacaggtttcttgaactggggtctgcattagaacctgggaagccagtgaaagctgacaaagctgccatcctaagcgatgctactcgcatggttattcagctccgttcagaatcacagcaactgaaggagactaatggcagcctcgaagaaaagattaaagaactaaaggccgagaaggacgagcttcgcgacgagaagcagaaactgaaactggagaaggagagtctagagcaccagatgaagctgatggcatcggctccagcctacatgccccatccgaccctgatgccggcgcctttcgcccaggcgcccctagctccattccatgcccagggccaagctgcagggcagaagctgatgatgcccttcgtcggctacccagggtacccaatgtggcagttcatgccgccttcagaggtcgacacctcgaaggacagcgaggcgtgccctcctgtcgcatgatcaccttgatggggctggtcctgctcacaccatgtggattagccgcaactagttgtcgttgtcgatccattgatggggtataactgatgttcttaggctatctccagcagcctctctatcctattctctatcttactccctattttaaattttactctgtaaacagtacagtctatagtgtaagacaatgttttgcatgtttatatccacgcttggctggagatgggcatggtagtctgttggtgaccaaggaagctgtgatatctgtggcgaggtgccctgctagaggctcctttaatgggtgtacaattttcgtggtggaaagaagaatgttcgttcttgttctccatagcaacagtgtcatattatctatctatgccatatatattttatatttgacatgtttgtgatacaagca

SEQ ID NO: 18899 - DNA, 184 bp, Zea Mays
caagaacaggtaccacaggatgaggtgcatggaggaagctgtgatatgttcatgagaggtctaggtcgtcgtctcccagtcaactttgggttgctagatcgttgtctccttacgatgtaattatttatttattttgtacaaaactcctattatataataaagttgtgacatttgtttctgtacc

SEQ ID NO: 18900 - DNA, 1052 bp, Zea Mays
cgcagtcatcctcgctcgtgggccgtggcgtctgcctgactgcctgtcttgcagttgcagaccgtccaaaacctggtggcctagtggcgatcggcggccggcatcagcgatggagtaaagggtgcagcacgacagcacgccagcggccagcagggggcaccgggcaggtgggcagcagcaggggacaggctgcaagcagaaatggacattaaaggtcttgaggcagataaactggagtgcaggctctatgtagggaacctagacttcaggatgtcagagtccgatgtaatcaagatgttttccccttttggaaagattacagccgaggattttctgtggcacacacgcggtccaaagagaggcgaaccccggggctatgcctttgttcagtacaccactaaagaggaagctcagttagcaaaggagaagatgaatggaaagttaatctgcggacgcccaatggtagttcaccttgctagtgagagaagttctctaggctcttcaagttcacatagagcagtcaaagacaagaaattggcaggtggttcaggtgccaaatcacaatatactgatacagctgcaaagatagctgctataaaaaataagttgaaatctctggaggatgggggatgtagcacaaaaaaaccaagacttaatccagacaacttgacagaaatcagggaacagtctcataagaagttttgaagcgaggattttttttcgttctctggaacattgagtgcttttgccctctcatactggtgacacttctaaagctgctgctattctataattctagcttcagttagtcaagtgagtcacaagtgtagtgtttccacagtgtatcaaatatgtacaatagtttgtaccgatcatctttttcctgaatgaattgcccttttgatgggggaatcattgtgactacatactgttttgttattgacaacatattctcagtgtgcccctgttgaacatatgtttccttaacttaattgtgtcgcattagtttatccacctatacttaaatcgctgaccacacttttctagaaata

SEQ ID NO: 18901 - DNA, 1051 bp, Zea Mays
ctttgcttcctatggagaatggccatacaagagtggatcaaatcgagaatgtttttgaccaactgatcagcaaaattgaacaagcggatccagattttgacccgcggccctttttgaaacaattgaatgtgttaggccgctatgaaccaatcaagcggaatgtatatttcactaagagatacattgaagattatggcatttcttgtcactgtaagccttctcctggttcatcagttgtgtgtggcagagactgctattgtagcatgcttttctcttgctgttcatcacaatgtgaatgtgatattgcgtgcaccaataaatcattccagcacagacctcttacgaaaaccaaattgattaagacagagaaatgtggtcatggattggttgctgaggatgaaataaagaaaggagaatttgttattgagtatgttggagaagttattgatgacagaacatgtgagaataggctatggacaatgaaaaggctggatgacactgacttctacctttgtgaggtcagcagtaatatggtcattgatgcaacaaacaagggaaacctgtcccgatttataaaccatagttgtgaaccaaacacagcgatgcagaaatggactgttgatggagagaccagggttggaatttttgcacttcgtgacataaagataggggaggagctgacatatgactataaatttgtccagtttggagcagctcaggtttgtcattgtggatcttcaaagtgcagaaaaatgctaggcacaacaaagtattcaggaagctcacagaatcatcgtaccaagaagaaaaagaggaaaacaagttgtgagaattgcatacagcagtttcttcgtctgtggcatccacgacaaaaaatgtatgttggatgttggatagttgacttcgatcaaggaactaaaatgcatactctccagttcattgatcaccatactgaaaagtttgatttgaaagaagaagaatggcacttcttggaggttctaaggtgtcaaaggaaaatgaataaatggatgatgctcaatgaacaaggttt

SEQ ID NO: 18902 - DNA, 2340 bp, Zea Mays
ccgaaaataggacgcggtcggcggtcgtgaaccgaacaaacctttccccaaaatttcccctcccccgcaccgaacgaactctcgatccgatcccgatccctgcagggagccgcctcggctcaccgatccggccccggatccgctcgttgctcgacgggatctctcgatcgtctggacaagcatgctgcatcaggagaacagtgaggctttcgggaggcaccactctgagcagcttgcatgtgtcaacatgaggggagcagataatggtcatccgaatttccttcctgagaaatgccagattgcagttcaccaaaggggtgaaaaagttggactatttgatgaagagctggtacatggtattcatctaaccagtccttgtgttcagtcaccatttttgccaagtggtgtcaaagaaacacctatagtggatcataacaagagacctgcatccagtgacatactggacatagttgaatgcaaacggctgaagcaggaagatcaaatcgttactaaggaagacaaccatacatctgctgaggaggaatttcatgactaccccacatacacgacttgcgaaagaagctttgactcaccactatatgagagtgaggaaagtgaagatgagggcgtagattcacctctccattgttcacatgctcgcacctatgttgaagatggtctatggcctgccagctttcatcaatctgttggccctttttccttgaggaaacctgttcctatcgggtcaaatcatcaggctgaattacctgagtgcaggccatttggtggaagaactgaagaagacgaaagtgtcaagtggatcagaaacagtgttgtgccaatgcctggtactgatgcatcgtctttggtgttggagcctgttcactgcaaagcaggttgtgattgtcttgacgaaggttcaatcaattgtgtgaaaaagcatgtgatggaagcaagagaaaatttgaaggattctgttggtgcagacgccttcagggagttgggtttctatgacatgggggaagaggttgcctcaaggtggtcagaagaggaggaacgtttgttccagcaagtggtctcgtcaaaccgtgcttctctgcgcaggaacttttgggatgaacttcctcttgccttcccttccaagtccagcaaagagctagtgagctactacttcaatgtcttcatgttgaggaagagggctgagcagaacaggttcgacccagcgaacattgacagtgacgacgatgagtggcaggcaggtggtgattttgagtttccaataacaggaagaactgatgaatacatgccaatcgagtcccttactgatcaagatgatgttgcttgcaatccatttcccttggagggggatttatatggagattctgatgatgaggacgagcttgacaattccagtggagacaggcataatggtgtgcagagggctggtatgttgtcagagggtcatcccgaaatgtcatttatagatcatgatcaacagacgttgaagctagatgcagatgcacaagatgactcttgcacatcatttgaggctcatcaggttggttgcgatggtggggcacatactgatattggcaatcactacaggagtgacgacggcctttgtggtggtgcagaacatgggttctttggtgaccattgtgacacaaaagagtggggcttcggtttcagtactggttgggagaggcatgattttttgtcaacgaacaatgtcatagaagaggtgttcgggaagggctccagtgaagatggaagtgacactgctactggccaggaccttatctgagccagaggcggaggcttcttttcagctgcgaaacctttagcagcccccccttgttctctgaatctgtacagcagtagtagttggctattttgatttgatgcctcacttgttcgtataggaatctctcatccctgtccttgaacatcatctgcttgcgatattggtcgcatggctaatgtaaatccgacgatgatatcatctgtcgatgatctgttgttaggctgtagcatgtacgtatcatctttgtagtgacggtgtgttttgacctgagcatttttcccatgtgccaacgagggtcatgtaataaaaggctgctgttgttccttgcccaatatatctcaccagctcgtcatgtactcccaaacgtcatttttatatgaaatttgttgtcgttctcgcggctcgttttaaacccgccttgaatcgtaatgattgcaacggaaattccagcctagcagtgatgttgggttcgcgttctatttttcttgcatcgtagtcacgttacacacgccgaggccgaggcttgtttttttttt

SEQ ID NO: 18903 - DNA, 2911 bp, Zea Mays
cttggtgcagtggtgagaaagtctcattgagccaccaggtcccaaatactgttgaatttgctgactggattggtcggacaaagcagaagaaaattcgtgtcacatcgaccaacaaaaggcctgttccacttgagcattgcctgttctactctggagaagtgtacaaaatatgtgagagggatatgtttcttgctcaaggatttaaagaagcaaaagatgctttcaaaaagaaaaatttgaataagtttggagtgaaacctggttcaaagtcaggaacccctgcagtacgtgctggaactcaaggcaaaaatccagatacatccaacaaggggagagatcaaaagtacccaaagcaccgcaattccaattcaggagtagccacagttcaacagagctcctcagggccaaagagatttgaatctttattttggatgccacttgtgaataaccttctgaagaaatcccttgtgcctgtggtgattttttgtttctcaaagaatcgctgtgataaatcggcagatagtatgtttggcactgatctcaccagtagttcagagaaaagtgaaatacgtgtcttctgtgacaaggcattttcacgtcttaaaggatctgataggaaccttccacaggttgtaggaatacaaagccttctgcgaagaggaattggagtacaccacgctgggcttctccctattgtgaaggaagttgttgagatgctgttttgccgtggtgtaatcaaggtactgttttccactgagacatttgcaatgggtgtcaatgcaccggcaagaacggttgtgtttgattctttaagaaagtttgatggaaaagaacaccggaaattgcttccaggggaatatatacaaatggctgggcgagctggtcggagaggacttgataacattggtactgtgatcattatgtgtcgtgatgaaattcctgaagaaagcgatttgaaaaatttgatcgttggaaaaccaactcgtttggaatctcaatttcgattaacatacaccatgatactacatcttctgcgtgtggaggaactgaaggtcgaggacatgctcaagagaagttttgctgaattccacgcacaaaagaatttgcctgagaaggaaaagcttcttctgcaaatgcttcgtcaacctacaaggacaatagagtgcataaaaggagagccttctattgaggaatactacgagatgactttagatgctgaggcacacagggaatacataacagaagcaattatgcagctgcctaattctcaacagtttcttacgcctgggagattggtggttgttaaatctgattctgatgatgatcacttgcttggtgttatactgaaaaatccatctgcattgctaaagaaatatgttgttctggtattgactggtgattgcagttcatctgcactagcccctgagttcaataaaaatgaaaagggtcctgtggattttcaaggaggacaatttattgtcctgaaaggaaaacgtggcatggacgatgaatatttctcttctgttagttcacgaaaagcttcaggtgtaatcaatatcaatctaccatacaagggggatgcatctggaatgggctttgaagtaagagcaattgagaataaagaaatcattagtatatgcagcagcaaaataaagattgatcaagtcagacttcttgaggagcctaacaaaactgcatactctagaactgtccaacagcttataaaggagcaaccagatggaaccaagtatcctcctgctttagatgcaataaaagatctaaaaatgaaagacatgtatcttgttgaaagttaccgtgcatatcacatactactgcaaaaaatgtctgaaaacaagtgccatggttgtataaaactgaaggagcatatatcattgatgagggagcaaaagatgtacaaggatcagttgaatgaattgaaattccaaatgtccgacgaggcacttcaacaaatgccagagtttcaaggcagaattgatgtactaaaggtaatccactacattgattctgatctagttgtgcaacttaagggtcgggtagcatgtgaaatgaactccggtgaggagttaatatcaacagaatgtctgtttgaaaatcaattggatgacctagaacccgaagaagctgtggctattatgtctgcattcgtcttccaacaacgcaatgcttcagaaccatctcttactccaaaactggctgaagcgaagaagaggctctatgatacagccataaaattagggaagctccaatccgagttcaaggtgcctgtggaccctgaagagtatgcacgtgataatctcaagtttggccttgttgaggtcgtctacgagtgggcaaaggggacgcctttcgcagacatatgcgagctgactgatgtatccgaagggatcattgtaagaacaatcgtccgtctggacgaaacatgtagggaattcaggaatgcagcttccatcatggggaactctgcgctgttcaagaagatggaggtcgcgtctaacgctattaagcgtgacattgtgtttgcagcaagtttgtatgtcacaggaatctgatgcatgtaacctcgtagtctcccttgcttcttttgttagagaaatcgttgtgctggtggaatgctactaacctaaccttagctagaacaattgttgtggtatttttttttccagttctggattattgcttttgctagttttgcgaagttttctgaagcggcgaccagcagagtaaaggaaaatcgaaagcgggtgggattctcgtttttttttcactgagaatatgattattgtattattagcggaaacaaaacgttctcgtactcaagacacctggaatccgtctagtaggagctcgatgtctaaagcaaaagtgcttaactggattgggaaacactgag

SEQ ID NO: 18904 - DNA, 1262 bp, Zea Mays
tctatttctgcttttcagagtgcaaccttgaagatcacgtttgatttcaaaatgaagcttggaaacccacgagagactacaattcatgccacttttaccaatttgacatctagtacttttacagattttatttttcaggctgctgttccaaagttcatccaattgagactggatccggctagtggcaacactgttccagctaatggaagtggttcagtcacacaagggctcaacatcaccaataaccaacagggacagaaaccgcttgcaatgcggatccggatgtcttataaagtgaatggcgaggacagattggaacaaggccaagtcagcaattttccttctggactataggccgtttctgtatactatgacgtgtcggggacaggcatatagaacgaagccttgttttaccctctacctcattttttaattattctggggatttgtcggggtgcttagagaaaatgttttttccggcggttagttttcctgtactaagtatattgtatattattccagcagcgatgtgatcttcaaattcatcgtgatgtattcgacaccacgctaaaggatggtctgagcaaactttcttcagctcctcaatcattgtaaaactagcttctgtttttcttgtacactagagagtagagactggtagcatattctgtagcatattctgccagtaccgttgcacttctgatttgcggccgtgcaaattatgggatgccgaacgcgcggatttctatcgtaatgcgcaaactttcaactgccttttaatttttaaaccgctggtctgtacatcgagcaggtcggtcaggtgcaggcgctggtgctcgtcaagcttggacagcgctgctgagtgctgagtaacctcttacaacaattgcaccatatgaacttataacaagtacagtacattgaaccacgacaattactctagttgaccataattgagatcgaataagcagggtcaggcattatggtttctgtctacaagtttatctttgtaccttgcatcacaaccttccagtggaaaactgcaatgcaaaggacttctgcagcgcataatttgctttgcttatcttatcctgctctcatctgcaataaagaaaatgacggtttctcaaatgatgaattgaagcttacaagatataaacatggaaaatagtaatatgcccccaaacttttcaacatctggtgtttctaatgatgtcctacaactgaaagaataatccaaacttggggttatcaaaaaatgc

SEQ ID NO: 18905 - DNA, 1169 bp, Zea Mays
ataaatataaatggagttctttgtgtcaaatgaacgctagctgaaccctagccggcggatctccgcgggcggcagtcaggagtggaggcgtggtcgcacgggcgaggtcgcaataggagaggctcagagagatggggcggccttacgcggtgaaggggcggaagaagaagcgcaagagctgccaccgccagaggtgagaagcggcgaggaaaagagcagcgaggaggatgaggcagcagcgggggaggaggagcacgcggcggcggacgggctcccaatcctacccaggacggttgatgggaagcggcgacccggcgccatcttcgtactcgagagggcctgcctcgaggtcggcaaagtcggcaagactatgcaaattttgaactctgatgatcatgcgaattatttgaggaagcagaatcgcaatcctgcagattataggcctgatatcattcatcaggctctactagcaatatttgatagccctctaactaaggctggaaggttacaggctgtttatgtgagaactgaaaagggcgtattgtttgaaatcaaacctcatgtccgcatgccaagaacctttaaacgtttctgtggtttaatgtcacaattgttgcaaaaactgagcattacggcagttggaaagcgtgagaagcttctcaacgttgttaaaaatcctgtcactcgttatctacctgttggtgcacgtaagattggcctttcatttagtgctgagaagtcagtcaacttgtttgactatgttgccaaatccaatgacgacgaacctcttgtgtttgtggttggtgccatggcccatggaaagatcgacaaggaatatacagatgattacatacaaatttgcaactaccctctcagtgctgcctgctgtttaaatcggatatgcagtgccctggagcagaagtggaacatccaatgaggaacttttgacaagcatgggaatcttgttttattatatacatcttacatgtacttccctctgcttatgtacaatgtttgaaagttaaaaccaaatgtttcagtgtggcattatgacgtgttttagacatcaattcatggctttaaactggtttgttcagagtcattttagcaaaaactgagtgttctgcatgccaaacttcggttaactcaaacattggtgtcagatctta

SEQ ID NO: 18906 - DNA, 1185 bp, Zea Mays
gcggtatcggtggtggcaagataagttttacactagagttaccatgcaagcgctccgaactgctccgccagacatgcaactaaaggacaagtttttggtacagaccacaattgttccttatggtacatctgacgaggaactcgttcctgcctttttctccaaagaaactggcagatacattgaggaaagcaaattgagagttgttcttgttagtgcataccaatcccttgaagagcaaccgactaataaaattcatgacactgagccagttgttgaagttcctgtactgaaagaggtgccaaatatagagaacgaagtgccagatgctgcaaaagaagttcctgcccctctggtacaagctccagcgattgtgactggaataccttcacctgtcgaagagactcctggcctgagagaattccgtgtgccgctgaatgaagcaccagctgtattggcagaatctccttccgctcaaaaagacccttctgttattacagttgaacatgcctctactgttataattgaacattcccctgctatttccattgaatcccctcctttgaaacaaagtgtcacagtttttaaggaatctcctccttcgaaacaaagcattgcagctttcaaggaatatcctcctccttcgaaacaaagcattgcagtttttaaggaatctcctccactggaggaaactagtcctaaagaagctgttgtgctaagtgaccgaggactcttcagtgtgcagaaccatcaattatctcatgtaacagaagatgttcagaatctgaaatcaaagctcaacaatctcgaatcaaaattggaagaggctggaaagatgataataaggctaaaagaagagagcagaagtaccacccaggagcgggataagctacagcaagaaatggtattcctaagaaagaagggaaccccaaggagccaagtgggtttccccttgctgtttgttgtctacgtcgcgcttcttggtaccttactcggttacctgctccgtctatgaattcagaactctaagaaaacaaaaaagttcagcagctgggatgcctcatatgcggcaagagaactgaattgaacggcagttgcactctaaaatgttggagagtttgctggattcgcttgtcctgaatcggtattgaactgtcgtgtgactatttacacctagtttccttccag

SEQ ID NO: 18907 - DNA, 1956 bp, Zea Mays
gcaagattggcgtctgctacggccgcaacgccgacgaccttccggcgccagacaagggcaatgccacggcggcaagattggcgtctgctacggccgcaacgccgacgaccttccggcgccagacaaggtggcgcagctaatccagcagcagtccatcaagtacgtgcgcatctacgacaccaacatcgacgtcatcaaggcattcgccaacaccggcgtcgagctcatggtcggcgtccccaactccgacctcctcgccttcgcgcagtaccagtccaacgtcgacacatggctcaagaacagcatcctcccatactacccggacaccatgatcacctacatcaccgtcggcgccgaggtcaccgagagccccaccaacgtctcagccctcgtcgtgccagccatgcgcaatgtgcacaccgcgctcaagaaggccggcctgcacaagaagatcaccatctccagcacccactcgctcgggatactgtcccggtcgttcccgccgtctgctggggcgttcaacagcagctacgcctacttcttgaagcctatgctccagttccttgtggagaatcaggcgccgttcatggtggatttgtacccctactatgcgtaccagaactcgcggagcaatgtgtccctcaactacgcgctgttctcgccagagtctcaggatgtgattgacccaaacactggactggtttacactaacatgttcgacgcccaggtcgattccatcttctttgcgctcatggctctgaacttcaagactttgaagatcatgatcactgagtcagggtggccaaacaaaggggcggtcaaggagactggagccacaccagacaatgctcagacctacaataccaatttgatacgccatgttgttaatgacagcggcacaccggcgaaaccaggggaagagattgatgtctacatattttcattgttcaatgagaacaggaaacctggcatcgagtcggagaggaactggggactgttttttcctgataagagctctatctacagccttgattggacgggccgaggcaatgtggatgttatgactggagcaaacattacaagtgctaatggtacctggtgtattgcttcaactaatgcttcagaaactgatctgcagaatgccctcaactgggcatgtggtccaggcaacgtagattgttctgccattcagccaagccaaccctgctaccagccggacactttagcttcccatgcttcgtatgcattcaatagctactaccagcaaaatggagccaacgttgtggcctgtgactttggaggtgccggaatacgaacgacgaaagatccaagttatggattatgtctttagttgatgttggagttatatacataggttgctcatatggttatgacacttgcgtctatttggctgccggcaataagatgagcacgacgaactcaacatctcttccagctcgcagcgactccggtccagtcccatgcgccaaatgcttcgccactttgctccccatgctggccatcgtgatggctgcagttatggtgtgatctatggaaaaaaaaaatgctccagctagcctccttaagacctgagatgaaaggtgaattgcgtaatgctgctggtaaccattgaagttctgtttttgccatgagcagtagactagtagtagtctagtagagaggcaccttatgctgtaggaattctctggtcagttaagatgtacatcggcgcgcggacaatatatatcagctggtattaagaacttgatatcgtattatgctgtgtttcggctctcatcctcgctgcattttgcattaattctcgtgtttcatggttcttttctgaactactatggtaggtagcactagatagtcttttccggacatggaccgattattggatgcgtgcatgaaaatgttgaagtgggaagtgatgcgtgtatgaaaatgtttaag

SEQ ID NO: 18908 - DNA, 3888 bp, Zea Mays
ccgccgccgtttcttgattctcccatctacatcttcctcgcagcgccggcgcggcggcgctccatcttccgctccctcccttacttgcgcttggcacgcaggcgacggcggcggcgcccagtctcgtactctcagcggcggcgtcagtggcttcccctcccgcctctcgccagtcgcctcgcgccctcgcctccggtcctgcgcacgccggcctgttaccctgcgacattgttgaattctctgaagtgtgtgctcttgtaaaggcttgctaaaatggcaaatttaaacataaccaacatcttggagaagatgacagggaaagataaagactacagatatatggcaacatcagatctgcttagtgaattgaataaagaaagcttcaaagctgatcaagaccttgagccaaagttaacgattactgttcttcaacaacttgaggatgcttcgggagatgtttctggtttagctgttaaatgcttggccccactcgtcaagaaggttggtgaggacagggttgtggagatgaccaataaactttgtgataagttgataaatggaaaggaccagcatcgggataccgctagtatagccctcaagacaatcattgctgaagttactacaccgtcacttgctgaaaagatcttgctttctcttgccccgcaactcatcaagggtgtcaatactgcaaaaagtgctgaaattaaatgcgaatgtcttgatatattggcggatgtgcttcatagatttggcaacttgatcacaaaagatcatgagtacatgctcaatgcacttttatcccaattgggttctaacccagcaagcgtcagaaagaaatctatttcttgcattgcatcacttgctccaagtttatcagatgatttgttagcaaaggcaactttgcaagttgtccagttgctgaaaaatagaggtgcaaaatctgaaattacccgaacaaatatccagatgattggttctctaagtcgttctgttgggtaccgttttgggccacaccttgctgaaactgttcctttgcttataagctattgtacaagtgcatctgaaaatgatgaagagctccgtgaatacagcttgcaggctcttgagagctttatgctcaggtgcccaagggatatatccccatattgtgagggcatcttgaatcttgctttggaatatgtgagctatgatcctaatttcactgatagcatggatgaggatactgatgaggaagcgaaggaagaggatgatgacgatgagagtgcaaatgagtacacagatgatgaggatgcaagctggaaagtccgtagggcatcagcaaagtgcctatctgcaattatagtgtctcgtcctgaaatgttgtcgaagatgtttctagaggcttgtccaaagttaattgaacgatttcgggaaagagaggagaatgtaaagatggatatatttaacaccttcattgagctgttacgccaaactggtaatgttacgaaaggacaaggcgacatcgatgagtccagccctcgctggttgctgaagcaagaggtcccaaaagttgtcaagtctatcaacaggcagttacgtgaaaaatcaatcaagacaaaggttggggcattttcagtactgaaggagcttgtggttgtattaccagactgtcttgctgatcatttcgggtcacttgttcctgggattgagaaggctttgaatgacaagtcttctacctccaacctgaagattgaagcccttgtattaacaaggcttgttatggcttcacattcaccatctgtgtttcatccatacatcaaggctctttctgcacctatactgtctgctatcagagatagatattataaagtcactgctgaggctttgcgggtgtgtggagagctagtccgtgtccttcgtccaaatctcgagacaacctcagttgattttaagccatacattggtccaatctataatgcaatactgggacgtttggccaatcaagatcaggatcaggaggtaaaagaatgcgccatatcttgcatgagtttggtggtctctacttttggtgatggtcttgaaagagaattaccagcatgccttcccatactcgttgacaggatgggtaatgaaattacaagacttacagctgtcaaggcattttcagttattgcgaattcacctctacgtattgatctctcgtgtgtcctggatcatgttgtttctgagctcacagctttccttcgcaaggccaacagagctcttaggcaggcgacgttgggaactctaaattctttggttgtcacatatggtggtcagattggctcttcttcgtatgagacaataatcgcggaactttcaaccctcataagctggtgaccagaagtgtgcatctacaattgaaatgcttaaaggcattttgaaagacgacagcactactaactctgctaaacaacacatggccttattatgtctgggagaaattgggaggaggaaggacctcagcaatcatgttcaaattgagaacatcgtcattgaatcgtttcaatcaccttttgaggagattaagtccgcagcatcctatgcacttggaaacattgctgttggcaacctctccaagtatttaccatttattttggatcagattgacaatcaacagaagaagcaatatctgttgctccattcacttaaagaggtaatcgtgcgacaatctgttgatcatactggccagagtgagctacaggattcaaacattgagaagatattggcattgctcttcaatcactgtgaaagtgaggaggagggagttcggaatgttgttgcagagtgtttaggaaaaatttctctaattgaaccaaaaaaactagtccctgctttggaggtacgcacgtctagcccagcagcaaatacaagagctacggttgctattgctataaaatattcaattgttgaacgacctgagaaaatagatgaaatcatgtactccaagatatctactttcttgatgttgattaaagacagcgataggcatgtgagaagagcagcagttctggctttgagcacagcagcgcacaacaagccaaatttgattaaaggtcttcttccagagatattacctcttctatacgaccaaactgttattaagcaagagttaatcaggacagttgatcttgggcctttcaaacatgttgtagatgatggtcttgaactcaggaaagctgcctttgaatgtgtggatactttattggacagttgtcttgatcaagtgaatccatcgtccttcattgtacctttcctcttgtctggtttaggtgaccattacgacgtgaaaatgccttgccatttgattctatcaaagctagcagacaagtgcccttccgccgtccttgctgtcctggactccatagttgaaccaatcgagaaaactataagccacaaacccaagggggatgcagtgaagcaggaggttgatcggaacgaggacatgatccgcagcgctctcagggcaatatcttctctaagccgcataagcggcagcgactacagcatacggttcaagaatctgatgaacaagataacggccacccccgcgctcgccgagaagtacaactcggtgcgcggcgaatgagacctgggttcttgtacatggtagaggaataggttaaacacccagagttgtcgcgcgctcgtcaatcctgttgccgcttccccgcatggttgctgaggcaaaagtctgtactctgatgatgacggtggttgatttttgactgctggacatagttgtcttgtacaaaatctggtggtaaattcagtagaattgccgccgatacatttacctggtggttctcttgtcgcagttcagtttcagttgacctatgaagcgctgatgcagatcagactattctggca

SEQ ID NO: 18909 - DNA, 536 bp, Zea Mays
accctggtccagttctcccccgacacggagggatacccgtggaagcgctcccggccacccgaggtcgggcaagcttccctagtttggaagggacacgagcggatccgagcgaagcgaccgcgcgtccgcgccctccgtcgccaccaccatccgctccgccgccgctccatcgtcgtccacattgctgccatccgctctgccgctactccatcgtcgtccttccccgaagcagtcgtgagcgagacgtgaggcgacggtgccctccaccaccgccaccgtctcggatttgtcgtcattcaccgccatctctgcctcagtttgctgtcctccaccaccgtcttccgcggcactatgtacaatacaatgttgtctccaagacccagtacatggtcttctccaagatccagtacaagatcgtctcctccaagatttgaaccccaacgctagtgagaggaagttgctggtttcagtttggggcacagtttttggatcagttaagtgatgcctattttttgtttagaacaatacatcgattg

SEQ ID NO: 18910 - DNA, 1474 bp, Zea Mays
aacagttgaaggtgggcagggcaccaatcgcctgattacatatcaaatacagacaacaggttctggtttgcatacatttgtgctgtatctgggtcctcatattgctctgttcactattaaggctgttcaatgtggtcgaattgatctaaaaattgctccatatgataccatacagctaaaggttgggccatcatggcttgacaagaaatgttcagaatttggaccacctgtgtatccagcatcagctcattcagttaggatcccagtcttcgacctactacctcagatacagctggaggcagttctttggggaattgggactgcgcttggtgagctccctccttattttatatcacgagcagctcgcttatcaggaagcgagtcaaaagctgttcaggagcttgatgcagctacttccaaagaagatgggccagtagcatcatcccttaatcgaaccaagcgttggcttctctctcactcccaacatctcaacttcttctctatcttgattcttgcttcggttccaaatccactctttgaccttgctggtattatgtgtgggcaatttggtgtgcctttctgggagttcttgtttgctactttgattgggaaagccatcatcaagactcatattcagacactatttatcgtgtccctgtgcaacaatcagctcttgtatcttattgaaaaggagttaatctggatatttggtcacgttcctgggttttctgccacccttccgtctgtgattgccagactccatgctgccaaggacaagtatctatcaccaccagccccagtctcaccgtcatcacaaatgggggagaaacagtggaatttctcttttacatctgtctggaactctatagtgtggcttgtgcttttgaacttcttcattaagatagtcacgtcaacagcacaggattatctcaaaaagcagcaggatacggagatggaacttatttcggattccccgatccaggaccattctaaaactaactagtggcgcagctagtggtgtttatacacagctgctagcagcaaagattctcctctgtagcttaagcccctgcagatgatttcaagttccaacaattagtattagtagttattcatctgcgcagtggacaaaaacatggacacatggtcttggttaacttgtcagttgacgaccttttgtcattgagcctgtacctgtactggcagctcctgttggagtcattctgtttattttcggacatctacacggataaacagtaggaattgtttatggagcacggttggctttttttgaagtgaagagcacggttggctttgtgagatgtatcattcatacctgttcctatgtattctgggaacttgaaatgcaatagaaacctgggaggatttaacaaggatacatcattgtgtcattactatgtgcatgtggtttgcaatttgcacctcttccggaacaggtggtgaatagtctctg

SEQ ID NO: 18911 - DNA, 2406 bp, Zea Mays
gtttttagtgctggtttgacaattgtcattgatcctcgaactttgaacaccaaagaagaattgctgccttgctggtctgggaagcactttctttcactccttccctccccatttcctactgacggccgagggggggcacattctttggcttttgtcccggttttgccctccggctcctgccgagctcagcagggggaggcgctgcgcttcgcttcacgccagatccaacctcaccggccaccagcttgcctccatggccggtcgcttcctcctcgtcgttgccgtcgccctcctcctccgccctggggatgcgtccgtgcacgagtaccgcgggctcagcttcgccaacaagggcaacgccttcatcctccacgccggcagcgagggcctctacgcggcctcccacgccaacaccaccgccgaggacgccgccgcagtggccgaagccttaatccggtttgacaagattacttttaggcgatcagaggatactaataattctgtaaaggagactagttcagctaaggttcaggtactcatttttgagatagaagatcgtgaaatgattggtggatcagcatatggaggtcagaaagctatttgttgtacttcagatcttgcgaagttaggagcttgcacagaaggttctgtcatctaccgcccatcccaggtaaatcctggttggccaaagttgtttgtagcatcttttgatggaagtgacctgatcgcgacactaccgtcaaggaccattccaattaccaaaactgggatatacaatatgtactttatacactgtgatccatcacttgctagtttggaaatcgaggggaaaaccatatggaaaaatcctactggataccttccgggtcggatggcacctcttaagaacttttttggactgatgtcttttgcatttgtcgtacttgggatctattggttttatcagtatatgaagtcctggagagaggttcttccacttcagaactgtattactcttgtgattacactgggcatgtttgagatggcattgtggtattttgagtatgctgaatttaatgagactggagtacggccaaaaggcatcacattttgggctgtcacgtttgggactgtcaagaggacggctgctgaagttattgttctcattgtctcaatgggatatggtgttgtcacgcctactttgggtggcttgacatcaaaagtggtcatgcttggaggaacattctttctagcaacagaaattcttgaattggtagaaaatcttggtgctgttaatgatctatctggaaaagctcgtctgttcttggtctatccagtggccattttagatgctgcatttgttatttggatatttatttctctagctaagaccattggtaaacttcaggcaagaaggttgatggccaaacttgacatttataggaaatttgcaactgcattgatcatatctgttctggtgtctgttgggtggattggctatgagtgtttgaagctggagaccaggagtgttactttaaactgcacctttctactttcaagaacctgtccattttgtattgtttggattcatttgtttgcaccttacttgtttatgcatatgtttcattatttcagaagtcattgatatccctgcaatttctttcttgcagatttactccaaatcaacagatgtatttaatgaacgatggcagcatgcctggattattcctgccttctggcatgtcttgtctttcttacttctttgtgtcatttgctacctgtgggcaccttcacaaaactcaatgagattttcttatgatgcaagtgaattctttgatcgaaaggataatatctcattaattaggccagcacccagtgcatccaagaatggatggaatttatcttctacaccagagcccaaagctacaaaggatgtgaataccgtagcagattttgaaggtgatgatgaggaaaacaaaagggagtagaatgtactgtcgatttgattacggagggtatatttgagatcctttgaagtgtgtgctagagcaattttggtatttaggagaggattggccatgctagttattattaatggagcactccgctcgatgttatttcttcgattcgttaccactacagtagttcttcacatggcgagttatgctgttatcttcatagtcttaatgatggtatatgatagaaacaattagtctggtgtataatatttataataatggcaccatattgcttctggttcctgtgaactcgacatatgttatgaatgtcagagaataaattacgatagaaacaattagtctgatgtataatatttgtattactggcaccatattgcttctggttcctgtgaactctacatatgctatgaatgtcagagaataaattgttttgctggatctttgttag

SEQ ID NO: 18912 - DNA, 147 bp, Zea Mays
tctccctcccccttcccttttttcttctgtatactgccaggtccggaccggcataattcaagacccggtacggatttttttttctttgataaggatcaatgatatactattaatagtgactgagttaataagctctaaatttttttc

SEQ ID NO: 18913 - DNA, 129 bp, Zea Mays
ttatactggcactcataaatgtgcatcgtgcatcccatgaggtacgttaattgatcacgtgaggcggaatacgagccaagtcgaccccaagatgatgtaaagggtggactactccgcatggtgatgctg

SEQ ID NO: 18914 - DNA, 840 bp, Zea Mays
agatacccttgcctagaccccacacaatgcgggaagcctacagcacgctggtgaggagcatcagcttttgcaagatgtccaagaaaaactctcagtacacccattaactgcaccggtcctgggaaatgatcatgcagagttccgtcagcgtggtaccccttcggtagtgcctcccattcttgacggtgatatgcttgtgcaattcttggagctcaccggtgaacaacagcaagccatccttactcatgctttgccagggaaggggcaacataggcccctctcggttttccaggttttgcaaacattagagcgcgtccattacgctcttaactgaggctttcttcaatcacagttactacaaggtttggatattagagctggttgaccttcattgtttgagatgccgtcagagctgaggttttagtgaccttcgcaatctagacggccgattccaagtctgccatgatatttatcagaacgtttgattgatgatgcaactggagcttgatactgggaagtctcatggtggcgagtatcccgtggaggcaccagattcgtcgaacctcctgtgtatatacagtcggccgcttttggtagactgttgtatggcgcattctgcatagaaacgaatattctttccgtttgtttcaatagataatgtaatgtttcttacgtcagctggtcggatgctcaacgagaaataagggaaacaatgaattgcattggccgtcctgctctatcacatgccattactgattagtgatgaatgcatgcaccagctgccgcagtgatgatcttgccgcggcagctcctggtcagggacggcgcccacggggacgc

SEQ ID NO: 18915 - DNA, 844 bp, Zea Mays
cgcacgacatccccagtgccggccgtctccgtccgcggcacgggcacggcaccaccccctgcttctctcccagcaggcccaggccgccagccgcctctcctgttctctttctctaaatagcagcgcccgcccgcgcgggacaccgcccgccctcccgcgcctttttccgctagccaacgcacggctgacggcaccacaagagagacaacaccgtgcagcctgattaggaacccagagatgataagcaccccaggatccacaactaaaagcaaaaccagcagcaactcgacgacttcccgccgcagaacggaggaaaccccgagctgccggttcataccgagctcgctcgagatggaggagttcttctcggcggccgagcaacaggagcagcatagcttcagggagaagtacaacttctgtcccgtgaacgactgtcctctccctggccggtacgaatgggcgaggctagactgctagattccccacccagcacaagagcaccattgatctgattgatatgtgtctaccacaccacaatgtgactagctccgccgccgccgccgtggaccgtggaggaggcgcaaccaactgtggatctcgatcgcattagctttgttgtctgttgtaaaaattagagtagttagctttgtagccggatgaatgatcttgtgtaaccaacaggcgtggttcacccctggtcacacaacctcactgtaacctgttaactgctcaagctgctgtaaccgaaccaatctcatgtagcgtaggcctagcgcagtcttctcatctgttcgtagctctcgaaattgattgaatggaattagagttaaaatttgcatggcaa

SEQ ID NO: 18916 - DNA, 2469 bp, Zea Mays
ccgccaccaaactagcgtccaccgacggaaggaacacggcaggcaatcctgcactgcaacaacgacaccacctcgaggcctccaccgaaaagaccatctcggcccccgccgagaataactacaaaacaaagcatcttgcaaagattttgatccatttggtttgttgcttgcaagagtgcacctcaacaacttctgtatcttctgtcgtatatcagagggcaatcaacgcggcatacatatcatccatatttctcaagttcatcattgaaaatgcaaaaactgacagttggcaagagctatgccttgacattgacaggagtgagaaggggttggaaaaaattccagcagaaaacacggtggagtattttctgatgagaggtgtgctggactatattggtagtgtggatgtaagtccggagttatgctacctacatcatgaactcctgaacttgatgctagttcttatgtcaactcagttgtgttctggaccatctccagagccaaaggatgtgcatcctttcattgatgcagctatgcttcaggacagctccatcgtggcttcagtggtgcaaaaattgttgctcaattttgttacacgtccaaaaattcctctaaatgcttcgcaccctgttttctctgatgatggtaggcctggtgttctccaacgagttggctcagcagctgcaaactttgtcttgttgccatattactacctcgtaagctcaactcctgagggtgcgacaagtcaattggcagataacagtttacttgttcttcttatcatgatccactaccgaaagtgcatttcaactaatgagtccattccaaccaacaatgtatacacgatggactcaaataccaatgacaaggatgctccagtttttcatgataacccttactgcaaggcattaaacagtgctaaggacatacaatatgatcgtgctgatgttgaaggaaatgctcaagatcgacctgttgtcaggttgtcttttgcatcgttgtttgatgcttttggaaggtgcttaaatgatgagagctcggttctgttgctctattctttggtctatgggaactgcgactttcaggaatatgtcctggttagaacagacttggacactttgctgatgcctatcttggaaatgctctacaatgcatcaaggaagacttcaaatcagatttacatgctgttgattattctccttatcctcagtcaagattcaaccttcaatgctagtgtgcaccaattggtgcttcctgcagttccttggtaccatgagcgcctgatgcatcaaacgtcactgggatctttgatggttgtaatactaattcggaccattaagtacaacctctccaagctaaaggatgtctaccttcacacaaactgtcttgctattttagcaaacatggctcctcatgtgcataggctgagtgcttatgcatcacaaaggctagttagtctcttcgacatgctttctcgcaagtatgccaaactagctgagctaaaaaacgacaagtctctgaaagttatatatgatcagatggaagcagacatagcagatgatatgtctatagagcttcacatatatacagatttcttaagaattgttctggagataattattgccatccttacatatgcattgcccagaaatcctgaggttgtgtatgctgtattgcatcgacaagaggtgtttgagccatttaaaaaccatccacgtttcagtgaactgcttgagaacatatacacagtattggatttcttcaatagccgaatggacatgcaacaattagatggggaatggtctgtggataaggtgcttgaagtcatcaacaaaacttgccgttcatggcgtggagaagggatgaagatgtttacccagttacggtttacatatgagcaagaaagccaccctgaggagttcttcatcccatatgcatggcgccttgtcctatcacggggattctccttcaatcccgatgccataaatctcttccctgtggagattcaccttgaagaggcaccggccggtggacaaaaggtttaatatgaatggtccgaaccagagttctgacaagaacataaaggcatatttttgtttcattgtggcaaagagcacgatgtaaataggccgcatataccatataccaggtagtcaaatgtacacattcttttgtattaaatcattatatgtgtaagacgaaagggggtggacggattgcgcaagggtgcagagattgtgctagttataggggggagattactatgtagggtatatgcaattctttcgtaagttatcgttgtattgtacccttagttcaaaaggcttgtaaccacttatttattgaaaagttgtagagtctgcgatctaagggcatgtacagtggagagacaccaaaacggttctccaagcacaggagacaactaagagactctattgtacaatggagtgtctataaacgtagtctatt

SEQ ID NO: 18917 - DNA, 262 bp, Zea Mays
gccggcgatgcgctcctggccttaactggccgggtcgtgcctccggcgccgttactttgaagaaattagagtgctcaaagcaagccatcgctctggatacattagcatgggataacatcataggattccggtcctattgtgttggccttcgggatcggagtaatgattaatagggacagtcgggggcattcgtatttcatagtcagaggtgaaattcttggatttatgaaagacgaacaactgcgaaagcctttgccctgga

SEQ ID NO: 18918 - DNA, 1656 bp, Zea Mays
aacggaacaatacttatctttttccctgcccccgcggccgccgccccgaacgcgcacgcctcctccgccgaagccaagcaaaccaccgacctcgacggagtcttctagccgtcaccctcgttgtcgccctgctcctcctctcagccggtccggccggcggcgtggcgtgaagatcaatccggacccggaacgagttccctcttttgctggttacataaactttggaataggaggatatcccatattgatctttgtgattgagattgattttttttctggaaaatggagatacaaacttcagggaagcccattgatgtgctgatggagaaggttcttagcatgaacattctgtcttctgattactttaaggagctctataggttgaaaacctatcatgaggtcatcgatgagatctacaacactgtcaaacatgtggagccttggatgactggcaattgcagaggcccctccactgcattctgtcttctatacaagttctttaccatgaagcttactgtcaaacagatgcacggtttgttgaagcatcctgactccccacacattagagctgacacggggatgacaaagtttgcaagaagttcatagtgtaccagtctgtgctttggagttattggtttcttgtatcttcggtatgttgcagacccaaaggttctttggatgtggtatgagccctatttgagggatgatgaggagttctcccccggatctaatggccgcaagacaaccatgggtgtttatgtgcgtgatcttatacttggacagtactactttgatagtcttctaccaagaattcctctcccagtaactcgtcagattacagccaatcttgaaaagatgaaattgcccactaagctttctggggcaactggagactccagtcgtcagggatcagaagatactgcacgccgtcctccttcagtgaaagcttctctgtcagtttcctttggacagcgtgctccacatcgggcttccaccagggattcatctccagttcgtcgaacagtcacccgtgatggtcatcgaagttcatactcaccatctcgtcgtagtggtagccgtgagggtcctgatcatgaccgttctgaccgggaactggatcattctagtcgtgaccgtgaaagagcccgggatcgttcaaaccgggatcggtatcattcaagccgagaccttgaccgtgacaaggatgccagagattatcatcggcatgagcgtgatagcagggatcgtgagtactacaggtccaggcattcagaagaaagacgggacgacagaagagatcatgaaagtagcaggcacaggcgctctagctctcgccacaggagcaggagtaggagccgaagcaggagcaggagtaggagcaggagaagccgcagccgaagcacgagcaggaggagcctgaatgagcagcgatccagcccattcagggatgcaaataaagagaaggcagccaccgtgtcgagcaacctagcaaagctgaaggacttgtacggtgacataactgcaaagaaggaagacagtgatgctgaaaagcttcaccgtgattcatgcgctgaggaggtcatcaggctgggaggccctcgatggaggaagtcgcccgcatgattcaaggcacttttggacatccttgtctttgca

SEQ ID NO: 18919 - DNA, 1047 bp, Zea Mays
cagttatctctatcttttcaggtgcatgtgccgcccgtttgcatgcttgatggagttcactctcaacatttttttggaacaggggttataatatatcattctgaacacctgggtctggttgcagttgataggaatacagtggctgtatctatctctgatataatgctttcttttgctgcatatcccattgaaatacctggggaggagctggagcatctgttgtccgggctgctaagcttctatcagaacctgctttgcgacgaggagattctgtctatctagttgggcttagtcgaagcttacaagcaacatcaaggaaatcaatcataactaatccttgcacagctgtcaatattgggtcagctgattgtccacgataccgtgccataaatatggaggtcattgagctcgatactgattttggtagcacattttcgggcatattaactgatgagcaaggaagagttcaagcattatgggctagcttttctacccagctgaaatatggttgcagcagctcagaggaccatcagtttgttagagggcaatgccatttgtcagacttttggaggtggaactttatccaactttgctatccaaggcaagaagttacggattgagtgataactgggtgcaggcccttgcgaagaaggatcctgtgcgtagacaagtcctacgggtgaaaggttgtttggctggatcgaaagcagaaaatcttctggagcagggagatatgattcttgctatcaacaaggagccaattacatgcttccttgacattgagaagacttgccaagagttggaccaatccattgggtcagatggagtgcttaacatgacaatattccgtcagggaaaagaaattgaccttgttgtcggaactgatgtaagagatggcaatggtacaacccgtatggttaattggtgtggttgcattatccaggatcctcactcagcagtgcgtgcacttggctttttgccagaagaaggtcatggtgtttatgttgctagatggtgtcatggccaatccggcacatagaaatgacc

SEQ ID NO: 18920 - DNA, 1655 bp, Zea Mays
atgacggaggcggagaggagaacccatcgatttggtggtgtaagtgggagctcattgaggccggctcatattaaagagctcgaagaagtgaagctgctcaagaaactgtctcaccccaacattgttagatatcttgtgactgttcgtgaggaagacacactaaacattttgctagaatttgttcctggagggcctattaattcagtcacttttggggaagctcggttcattcccagagcatggcatgctcaaagtggcccaatatctcgcctacctcttgttacaatttcatattctagcaaccttttgcgagatgttcctgttcgtcagcctctttggcacaacccgccgccgccgcaggcgcaggcgcaggtggacatggatctaccaagcctcgccgtcgtgctgcgcgccgcgctcagccacgttcctgaggagcgcaaggcggcagaagagagcctcaaccagttccagtacacaccacagcatttggtgagattgttacagatcattgttgatggaagttgtgatatggctgtaagacaggttgcaagcattcatttcaagaattttattgcgaagaactggtcgcctaatgatccagatgagtccccgaaagttttagaaagcgacaaggccatggttcgtgaaaacatacttggttttattgttcaagtgccccctttgttaagagcccagcttggagaaagtatcaaaacaatagttcattctgattatcctgagcagtggccaagtctccttcattgggtttcacacaatttagacttgcagaaccaaatttttggtgctttatatgtcctgagggttcttgccagaaaatatgagttcaagtctgaggatgagaggataccattatttcacatcgtagaggagacatttcctcgtctactaagcatttttagcaaattggttcagattgtcaatccaccaattgaagttgctgatttaatcaagttgatatgtaaaatattttggtcttctatttatttggagattccgaagcagctatttgatccaaatgtcttcaatgcatggatggttctgtttataaacttgttggagagaccagttcccgtggaaggccaaccaatagatcctgagattaggaaatcttgggcctggtggaaagttaagaaatggactatccatatcctgaaccgtctctataccagatttggtgatctgaagcttcagaaaccagagagtaaagcttttgctcaaatgtttcagaagacttattcagggaaaatattggcatgtcacatgcagctgctgaatgcaattcgtggtggagactacttgccagatagggttatcaatcttgttctacagtatctgactaacagtgttacaaagaacagtatgtatcagatgatgcagcctcagatttgatatacttctttttgagataatttttcctcttatgtgcttcaatgacaatgaccaaaagttatgggatgaagatcctcacgaattatgttcgcaagggctatgatattatcgaagatttgtacagtccccgaacagctgctatggacttcgtgagtgaattggttagaaagcgagggaaaaacaatctccaaaagttcatccatttcattgttgatatatttaggagcatcattgatttatag

SEQ ID NO: 18921 - DNA, 2255 bp, Zea Mays
tagactcctaggttcatgaggggttcaagaatgaatccaggtgaccgtagaacgcggagcacgatgacgatagtaattgtgatgggtttatcatgcttcttttacatactaggtgcttggcagaaaagtgggacaggaaggggtgatagcatagctctgagagttaaccaagaaactgactgtacaatcttgccaaatttgcactttgagacccatcataccataagtggcgctaatccattgatcatgtccaataaaatgattgagccatgccacatccgatacagtgactatactccttgtcaagaccagaaccgagcaatggcctttcctagacaaaacatgacatacagagaaaggcattgtcctgtagagaatgagaaactgcattgtctcatcccagcaccaaaaggatatgtcacccctttctcttggcccaagagccgtgactatgttccatatgcaaatgctccgtataagagtctgacagttgagaaagctgttcagaactggatccaatatcagggagatgtgttcaaatttccaggaggaggaacaatgtttcccaatggagcgaatgcttaccttgatgaacttgcatccatcatcccactcgctgatggcactatcagaactgcacttgatactggatgtggggttgcaagcttcggagcttatctaatggacagaaatgtattaaccatgtcatttgcacccagagattcacatgaagctcaggttcaatttgcgttggagcgaggtgtccctgcagtaattggagtacttggaactataaaggtcccatacccctctagatcttttgatatggctcattgctcacgctgtttaatcccatgggagtcaaatggcggtatgtacatgatggaagtagaccgggttttgaggcctgggggttattggatactttctggacctcccatcaattggaagaaatactaccagtcatggaaaaggtctaaacaagatgcagaggaagatcaacatagaattgaaaatattgcagaaatgctttgctgggataaaatctttgagaaggatgatattgctatttggcagaaacaagggaattcatattcatgtcatcaaaaggatggtcatgctagcaagatgtgcaaagttcaagattcagatgatgtctggatagggtataagaaattggaatcttgtataacacctcctatagaggcagcacagctaaagaagtttccagagagactatctgccattcctcccagaattctggagggtcaggtcccagacataacagaagaagtctatgaggaggataataagttgtggaagaagcatgttaatacttataagagggtgaacaagctgataggttcttcaaggtacaggaatattatggacatgaatgcaggccttggaagttttgctgcaactcttcattcttccagttcctgggtaatgaacgttgtgccctctatatcagaaaggaacactcttggtatcatatatgagcgaggtctgattggtatataccatgattggtgcgaagccttctcaacataccctaggacatacgacctgatacatggcaatgacatcttcagtttatatcagaacaagtgtgatgcagaagacattcttctggagatggataggattttacggccagagggtgcagtcatactgcgggacaatgccgatgtactgaacaaggttagaagtatggtggcaggaatgcggtggaagtccaagttactagatcatgaggatggcccgcacgttcccgagaagattctgatttcagtgaaagaatattgggttggcagcgaggaacagaacagctgataggtacagaaccatgttgatgctggatgccagcctctttccctgatgcgatcccctgatgctgttttgtcggttaatagattttgttcatactgcatacgtacagtactaaagacccttagatgatcgggacatacctggatttttgctgtgcatatatagtaatcagagcgttaagtgaactgttggcgatttgccaaggcatattgtagtgtaggcaaaagttcgtttgaaaaacatgtaggtacgagacaacttagtcgctactttgcccagagattaattatacagatgcacgcaagaagttttttgtgatttcgtatatgaacattatctgttgataatgcatgagattatttctttgagtgtttgtctgattgacctgacaagaggtcacaaggattgaattctgcttcagc

SEQ ID NO: 18922 - DNA, 3459 bp, Zea Mays
cccagctcctgtcgtgtggcgacatgtgatcgaatcgagtgcgcgagagcctgggactgagagggccgggcagggttcttctgcgcgcgcggcgttaggccacttctcgtcgcagaaactatgtattgtagttgtaggtatagtttatataaattaatataatagaaatagaaaccatgtgtgtgtgtggttttcagcaccgtggctcttagcttctcgtgtcctggccgtaagcattccgtgcgatgcctccgctgtccggccgtcgtggtctcgtcacgcacgcacacgtacacacacctcgcttgatatgatgcccgtgtgctctcaggtctcaaacaacgctgtccgtctctccggcgcggaggggataaaagtctcggcgtgaactcctggccagtcttttgctgctgccatatccgcgcgcactgccggccggccagccagccagccagcgcgcgcgtgtcgcggcggagctagagggctaggtagcagagtggtggccagtgccgcgggttgcgttgggatggcggcgcttgtggcgctgacgctggcgctggcgctgacggcggcagtgacagcgacggcgaaggagtgcaccaacatcccgacggagctgtcgtcgcacacggtgcgggcgcggctgcaggcggcgccgggcggagcggcggagtggcggtggcgcgagctgttccacgagcacctcaaccccaccgacgaggccgcgtggatggacctcatgccgccgcctggcgccgcggctgcggcgcaacaccagcagcaccaccgccaggaggagctcgactgggtgatgctctaccggtcgctcaagggccagcagcagcagcagccggtggggggcggcaccgccgcagccgggagtacgccgttcctggaggaggtgtccctgcacgacgtgcgcctggaccccgacggcgacgtggcgtacgggcgcgcgcagcagacgaacctcgagtacctgctgctgctggacgtggaccgcctcgtctggagcttccgctcccaggcggggctgccggcgcccggaaccccctacggcggctgggagaagcctgacagcgagctcaggggccacttcgtcggtcactacctgagcgcgacggccaagatgtgggcgagcacgcacaacggcacgctcgccggcaggatgtcggcggtggtggacgcgctcgacgagtgccagcgcgccggcggcacgggctacctctccgccttccccgccgagttcttcgaccgcttcgaggccatcaagcccgtctgggcgccctactacaccatccacaagatcatgcagggcctcctcgaccagcacgtggtggccggcaacggcaaggcgctgcggatgttggtcgccatggccgactacttcgccggccgggtcaggaacgtcatccagaggtacagcatcgagcgccactggacgtcgctcaacgaggagaccggagggatgaacgacgtgctctaccagctctacaccatcacgcacgaccagaggcatctggtgctggcccatctattcgacaagccatgcttcctgggtttgcttgcggtgcaggctgacagcctttcgaatttccatgccaacacccatattccggttgtaattggcgggcagatgagatatgaagttacaggtgatcctctttataaggaaattgcgacgttcttcatggacacagtgaactcctctcacgcatacgcgactggtggtacatctgtcagtgaattctggtccaatccaaagcgattagctgaagctctgaccactgagactgaggagtcctgcacaacttacaatatgctcaaggtttcgcgccatctgttcagatggacgaaggagatcgcgtacgcggactactacgagcgagcgctgatcaacggcgtgctgagcatccagaggggcagggaccccggagtgatgatctacatgctgccccagggccccgggagatccaaggcgaagagctaccatggctggggaactcagtacgaatcgttctggtgctgctatggcactgggatagaatcgttctccaagctgggagattccatttacttcgaggagagaggtgagaggccggcactgtatgttgttcagttcataccgagcacgttcagctggagaactgcaggccttactgtcgcacagcagctgatgcccctcagctcgtcggatcagtaccttcaggtctcgttctccgtatctgccaagacgacaaacggtcagtttgcgacgttgaacgtgagaataccatcgtggacatctttgaatggcgcaaaggcaacactgaatggcaagcatctggaattagcatctccagggacatttctcactatcagcaagcagtggggcagcggtgatcagttgtcactccagttacctatccacctaaggactgaagcaataaaagatgaccggccggagtacgcgtctatacaagcagtcctgttcgggccgttcctcctcgccggcctcaccaccggagactgggacgccaagaccggcgccgccgacgccgcagcctccgactggatcacccccgtccctgtggagtccaactcccagctggtgacgctggcgcaggagtccggcggcgaggccttcgtcctctccgccctgaacgggtccttgacgatgctgcagcggcccaaagacggcggcggcaccgaggccgccgtgcacgcgacgttcaggctcgtcccgcagggaggcgccggcgcgggcgccgccgcgatgctcgagccgctggacatgccggggatggtggtcacggacaggctcacggtggccgcggagaagagctcgggcgccgcgttcaacgtcgtgccggggctcgccggtgcgcccggctcggtgtcgctcgagctcgcgtccaggccggggtgcttcttggtcggcggcggcgagaaggtgcaggtgggctgtgccggtggtgcccagcagaagcgcggcgacggcgcctggttccggcggtcggccagcttcgcgcggggcgagccgctgcggcggtaccaccccatgagcttcgctgccaggggcgtgaggaggagcttcctcctggagccattgttcaccttgagggacgagttctacaccgtctacttcaaccttgtagcgtgacagacgggagatgacgacgagacctgcaggtcgaggactcgaggttgatgttgcttcggcctctggtaaccaaggggggaaaatgttgagttggaggtggagtgtcggacagttatgtttagagaaaagagaatgattttcccatattcaccgaatgatccgcggccgcctatttctgcttcaaccattcatcatcgtcgccataattctaaccacttcttgggtccctcctccagcttgctgcgtccaagcacagtttatttgccagtttctaaatctatactatatttaaagcaccagtttcaacggtcgtcatg

SEQ ID NO: 18923 - DNA, 2674 bp, Zea Mays
gtgcaccagccctataaaattccacatagattcccgtgcagtgctccagacggaactgtggccgcatctccctctacccattctgggttttcctctacaccacaacgctacgaaactcttcatccatttgatccacatcaaacggctgatagggcccctcctatctctcctacatcttctccactcccctggattgagttggacaacttggcgcttcacctcgctcgctgctctcctctcagtcctctggttctccgtcctctcgcctcgcgcggccgcgcctgcgcctcgtcagcaagataaggctgcagcctgcaggccacagtgcaggcccatgcttccagaatcttccggaaccttgcgccgagcctgaactccccggcggcgcctggccctgtgaaggctgcatgagtagtcgcgccgccgccgccgccgcagcggagccatggggatgctcgccgccgccgttgcccccgctctcctcgcctcgccacaggcatccctcgtccgccgccgcctctccggtgcgtggacgctgcgcctgaagcccgctgctgcctcccacggcgtcgcggcgctcagggtacataattttctcccaaagtgttacattaccaacgttgaggttgatgttagtactgtaaataaagaagaaactttcgatgatcatccatcattggcaccaggacgcaacattccgcttgttaatcttcgaggagatattctagattctagtccttttccgctgcacgatagggcttcctgtccttcaggttttgaagagttgccggtcttgtctgaaggagagcaacatactttggcatccactcctgctcatcctgctggactatatgctctatatgctagttacttatttggtaacttggtggaacaactgtggaattttgcttggcctgccacactggcaattcttcatccaaatctattgcctgtggccattgttggtttcttcacgaagctttcagtgtttgttggggctcccatagttggcaaacttatggatcatttcccccgaatacccatgtacacagcattgaatgctgtgcaggtaggcactcagttgatatcagctgcaactgtcatctatgctctaagaaacctgagccatgcttctacaacagctgtggttctgagaccttggttcattgcactagtggcagctggagctatcgaaaggcttgcaggattggcgctaggagtttccatggagcgcgactgggttgtgttgttagcaggaacaaacaggcctgttgcattagctcaagctaatgctgtgctcaatcgacttgatctagtttgtgagacagttggtgcttctgtttttggccttcttttgtccaaataccatcctgtgacctgtttaaagattgctagtggtctaatgatatgcagtttccctgttctggtcatgttgggtcaactaatcaatagagtttcttgccatgcacttgattcctctagaactgccactgatgaatctatttgtgctgatcttttagatgtacgcaggatagttccaaatagcttgagggctatcaaacatggatggaatgagtataagcagcaaacagttctacctgcaagtgcagctaccgtgttcctaaatttcaatgttgcacttgctccaggtgccataatgactgcattattgatgcatcgtggtaccagtccatccattgttggtgctttcagtggattgtgctctatcatgggccttgttgcaacattcatctcctcaagcctggtgaaaagagttggaattctaaaggcgggagctgctggattgatatttcaagcttcactcttgtcaatcgcgctcacagtgtattgggctggttcaatttcgcaaacgacacctctacttatattcctagcatccattgcattgtcgcggttggggcacatgtcttatgatgttgtggggactcaaattgtccagacaggtgttcctgcttcaaaagcaaatctaattggaggaatggaggtttcaattgcaagccttgcggagctagtcatgcttgctatggctataattgcgaatgatgtctcccatttcggcttcctggcgatcctgtctgtgtcatcagttgctggggcagcatggatgttctgtcggtggttaacaaatccaacagatgagcagagggaactattcatggttgatcccctttatcaagttcaggcaatatagtggatgaggcaggaaacaaccaggaaaactgcaggcgcctacttgctggtggtgcttgttggatctgcaataccgttacgatgatactaagatacagtgtgacatttaggttcaatacgggatacacttagggtagaagcatttgctcctcgtggcctcagccatgcgcagaattcaatttgtatactcgttcatctcctcacctgtacaacacatatttgatctgtataagtgttacttgttatagctgatgtagaacaacattaacagccatcggtagcacacagtcaatgaaatctaaccccctcacctttcctctgatgctgcaaatgtgtaactgtatcttttattggatccactgtcttctttctcctgtcatcttggttccttgttaggcatgtacatccctgaacctcttacacatagacagtacatcaagcataagacataattaaaaaaaac

SEQ ID NO: 18924 - DNA, 1303 bp, Zea Mays
agtgttgcaggaagaagcagatggaaatagcagcgatgatgaacatgggataaagtacaagaggggatccactaatgcaaataacagaaagagaagagcggtatttgattattcggatgatgaggaagatgacaatattgtaagcattgcatctcctgagctaccaaaacagcataccccagaccctgttgttggaattgctgaagacgctgaagtaaatcaaaagaacttggaaactgaacaccatgtaccaaacaatgggaaaggttcctcaacgggggtggattctgacttcacatctgaatgtaaaatcaaaacgatcgatcctatgaacgattctgggattactttaaaagaaaagagcagtgatcctccaatcaatgacaagaagcaggattctgctgctgagcctgcctccacctcaccaaagaggagaaaggttttgaagacacgcatagatgagaggggaagggaagttaccgaggttgtctgggagaatgaagcttctgcagatgacaaggcagagcagaatgtcaacactattgatgcgactgcaagcggggcgactgtcccaagcaaaccgaagcccgcaacaaacgctgacaaaagcaaagctccaagcaaaacagcagcaggcaacaagaaagctgcgaaggctggagccaagcaagggagcattatgtcgttcttcaagaaagcatgagccagcggggggtgcgcatgcaccaaaatgagacaggacttggttaagcaaactggcagtggcagttatacctgaacattgtcagtcaggccggcgagcaagaagggctgctccaagcaggcgaccgttagctgtatcgtttgttttagctagcgtagcgatggttgagtcaagcagcagagagcacgcattctagctgaggtagtactatcttgctgaagatgtacacgtacacatatacaataactgttgtctactgtgctgtctagaagagtaaaggtccaaggtggaagggcggaacagtttgagtacctgtgtctggttggtatggaccccactggaagagagtgcacacaccatcatggtcttggagggtgcgagctgggcaccggtggcgtagcaagccagcaaacggccgacagcaacgtagggagggagttggagagccagagccaccccatcgtatcggtatcgcgactcgtcaacacatgtttgctgttggtcctacaagatgacgattcatataccagcttggagttggagagccagagccacccctgcggccgaccgaagccagcggctaagcagctaaatgcctga

SEQ ID NO: 18925 - DNA, 3338 bp, Zea Mays
ctttcctccccacggtaacctcaccgccggcttcaagccgagcaaaagacacgcacccgcgaccgcgaccgcgacgagcgaagtgagagaggggaaggcgaggagaccactgcaccagcaccaccaccaccgtgccgcgagcgaagtgacgtcgcgttcacttccctcataaaatctcgccccccactctctctctacccgagcccagcagtaatttttttttggggaaggtgaagcgagaggagcaggaggagagaaaggggaacgaggccggccgcgaatcggaggggaattcggggggcggggctcggtccggccggaaattcgcgcgattcgggcgcgggcgccgcggatgtgaagatctggtgctcggcgggatgacttcttcggcggcggccgcggctgctgccgcccaggtggcgggaggaggtggaggcggcgagggagatgccgccgctgcggcgcgaggcggaggcggaacggaggacggcatgtacacggagctgtggaacctctgcgccggcccgctggtcacggtgcccagggtcggggacaaggtgtactacttcccgcagggccatatcgagcaggtggaggcgtcgaccaaccaggtggctgagcagcacatgcaattttacgatctcccgtggaagatcctgtgtgaggtcatgaacgttgaattgaaggctgagccagacaatgatgaggtttatgcccagctcactctgctacctgaatcaaagccagaggagaatggctctagtgaggagatgcctgcttcacctcctgctgcacttgcaaggccacgcgtgcactccttctgcaagacattgacagcctctgataccagcactcatggtggattctcggtgctgcggcgccatgcagatgagtgtcttccgccactggatatgacccgtcaacctccaacacaagagcttgtagccaaggacctgcatggtgtggaatggcgctttcgccacatattcagaggtcaaccacgaaggcatcttttgcagagtggctggagtgtttttgttagtgccaaacgtcttgttgctggcgatgccttcatctttctaagaggtgatagtggggagcttcgtgtaggagtcaggcgtgccatgaggcagcaagcaaatgttccgtcttcagtaatatcaagccacagcatgcatcttggtgttcttgctacagcatggcatgctgttaacactgggaccatgtttactgtctactacaagcctaggacaagtccagctgagtttgttgttccctgtgatcgctatatggaatcactgaaacgaaattaccctatagggatgagatttaaaatgaggtttgaaggtgaagaggctccagaacaaaggttcactgggaccattgttggaaatgtggatcctgatcaagctggatgggctgaatctaaatggcgttacctcaaggtgaggtgggatgaagcttcctccattccacgtcctgaaagggtttctccctggcaaatagaacctgcagtcagccctccccctatcaacccacttccagtgcacagacccaagagacctcgctctaatgctgtagcttctctgcccgagtcttcagctccaacaaaagaagctgctccaaaggtcacattagagactcaacaacatgccctgcaaaggcccttgcagacccaggataatgtggccccgaaaagtgtttttggtgataacagtgaattggactctgctcataagtcctccctgcgaccgtcaggttttgatctggacaagagcaccattggcatgcagaggaagctgggttcagatatttggatgcgaatgaacagacctgatggttacagtgaaatgttatcgggatatcaaccacctaatgaaggtgcacggaattcgcagggtttctgttctttacctgatcagattgccgctggacgtcctaatttctggcacactgtaaacgctcattaccaagaccagcaaggcaatcacaatctgttccctggttcatggtccatgatgccttcaagtactggctttgggatgaacagacagagctatccaatgatccaggaagtcggtgggatgtctcagagttgtacaaacaccaagtttgggaatggagtttatgctgcactacctggccgaggcattgatcgatacccatctggatggtttgggcacacgacacccggtggtcgcgtggacgatgcccagccacgcgtgattaagcctcaacctttggtccttgctcacggcgaagctctgaaaatgaagggcaactcgtgcaagctttttggaatccatctcgacagcccagccaaatctgaacctttgaagtctccgccaagcgttgccacaccggcagctgagaagtggatggcagacggaatcgacgcagacaaaagccctgagccgcacaagacgccaaagcaactcggtgctacacaggtggatcctgtcccagagagatgcccacaagcttcaaggggcacacagtgcaaatcacaaggcgggtcgactaggagctgcaagaaggtccacaagcaaggaatggcgctgggcaggtccgtggaccttaccaagttcaacggctacacggagctggtggcggagctggacgagatgttcgacttcaacggcgagctgaaaggctgtagcaaggagtggatggtcgtgtacaccgactacgaaggcgacatgatgctggtcggggacgacccctggaatgagttctgcagcatggtgcacaagatcttcgtgtacacgagggaggaggtccagcgcatgaacccgggcgccctgaactcgaggccggaggacagcggcctcgccaattcgacggagaggggctccgcatctactgctgctgctagagaggcacccggctaccagtccgcctcgtcgcttaactccgacaactgctgatgccttggcagctagctggtcgtcccaagtagtagagaacaaggcaaatgtatccatagatctccttgtagcggagcttaatgcctttttttcccctttctaatatgcattggatgagcccgtagcgcaccgtagtagtatctaaagctggtgttctgagttggttggaccttcctgcagttttggtttctccttctgatgtggcaagttttagctggtcgcacctacctaatgtatgcttagcaaacgaagtcccactaagcgctgtacataactgcccctccctgcatcaactctaatatatcatctgcttaatcgtcacccctgggcccccgtgctggttgctcaagatcccagctgcttgttgtggcgcttggtttggttcgttgtcggccgtggctcatgtttgtt

SEQ ID NO: 18926 - DNA, 2558 bp, Zea Mays
gcgaaattcgctgcggaaaggatccattgccatctaacccatccccgttcctaggtggcgtagggcgtagcatccatctatgttcgtcttcctcgatcctgaacgaaaaccagtagccaaccttccccgcgtgctccgtgctcattcattccccatcccgtctcctcccaaaccagaagacaaaaccctagcctcctcctccgtgtgatgggatgccgtccaaaccctacccccactccctgacctcctcttcctcctccgccgtcgcccccgcgacctggatgtccgcatccgcatggacggtgcccgagtcctgatcgccgccggtgccaccgccgtctgctgcttcgtctgcgccttctgggtcttccgttcctcttcgtcctcctcccccgcatccccaaagaagcaccaatccccttccaccaactgctgtggctgcgcctcctgcggctgccgcgacgccaagcccgccaacggcgagatggccgtgggtggggagaacaagaagaaggcgccggagccggatccgccggaggcgccctccatgatggagcagctcgtgcccgagatcaccacccacgcgctcagctacctcgactacaccagcctctgccgtctctccatgaccaactccgccatgcgccgcgcagccaacgacgacggcgcctggaaggcactctaccacaaggattttacggtggaacagggtactataaatcctcctaatggatggaaggcatactatgcagctacaaaagccatcattaatcttaacgcggagttctacaatatcatcagggaagggtccttgccagcaatgagtcgtttttggcttaatgcagactatgtcaagtgtattcatgcgactggggagttctgccctggatacaactcagtgatggagagctggggcctgctattcaactggggccaagatggagggcagggcattgggttccagataagggatgtccgtgtccgtgtgctcggtgagatggcatgggtgaacatgaaggcgaatgttgatgttgaccctttggtgttccatgtgacgaacgtgtacgagctctgtaatgggaggtggtatatggtccatcaccacagctcgctcatggctcaccctgctccgcacaatatgtttggttgaagctggagaaggaaagcaaagaaaacctttgggaagaaaatttgatgtgcatgctttgtcgtgtcgtgcagttcagctaccagcgagttgattgagttttattctagaaccagaatcggtcgaagctcaagtcatggtgtggaagtggcaggtagctgatgctgtcgaatctggagcattcagacgcagtattataaccgaggtattgtcgcgagggacgaattccaatccaacacaacatctgtagtgcagcacaagaactgatggtttgtttttatataatattgatacatgtatcttacggaacgaggtctagtcttataataaaaacaaaaataatgggacgcgtgcctcatacatagccctttatcatatcaaacaaaggtggatagtttggtctgtccctccagccattttattgtctgtgcattaatggattggcactggcggcgagggggcggcaaggaaggctcaggcgtcatccttgtcagcgaagatgtcgaggagggcgagggtctcggcgacggagagctcgagccgaaacttgggcccgtcgtagtggtgaaggatggggcggaaggcgtcctcctccagtggatcgtagatcttccgcgttgccactcgcacctgcacatcacaaacatcatgcatgcgtcaccacttgggtaacaactacgagtactagatactccctagaggcctagatgcgatgaaacaacatgctacagctacaggttgcatcctcacgcctcttgcagttgcaccatctcgtctaaagatggcaacgggacccgttgccactcgaggaattactccattagagaactaagtttggtcgtaattttacacccacgagagacctgacgtgtcccgtaaaggttaggcggtcagccggtcactagcaacctacccaggcagaggcaggcagattggttgtttcgcacggacacggtgtttgtagacaattctttaaaaaaatgtttcttgagttgtgatccggggcctctaatcttttccagctccacacgtcgtcgcaacatgtgatgtgggaatgtgtgtgtgttttattttattttattttccgtcataattctttcttgagttgtgatcccggggcctctaatctttaccggctccacacgtcgtcgcaggcgcagcatgtgatgtgggaatgggtcgccacgctagccttttgtgattttgtctgtctgtcggtgacacacgtactgtttggtgttgttgaacttgaaccgttcaaacaagtgtaataaaagtcacgctagtggtgtggttgagctgatcgatcgtccgccatgacgggagaggagaggagaggagaggctggagctgcattaattggaagaaggggactggattgaagcgtactacctgtgcagggaagcgcgac

SEQ ID NO: 18927 - DNA, 1574 bp, Zea Mays
gccgccgtcaacccgaccccgttccccagctcaccgcgcgcgctctctcagtctctccttctcttgtggccacgacgagcgacattcgctactcgctaccgtcctacgccaggtgccccaggtcttcttcggttccttcgccggcgacgaacgctaccaggcaacaattatttggctcttgtagcctcacgaccagggatggagctggctaattttcaacaacaaccaaaccaggctcctggtcctggaggaaaacagcgcacatccagcctggaggcaccaataatgctacttactggtcaccagagtgctatatactgcatgaagttcaatcctgcaggaactgtgatagcatcaggttcccatgacaaggatatcttcttatggcttgcccatggtgaatgtaagaacttcatggtactgagagggcacaagaatgctattcttgatcttcagtggactactgatgggacccagatcatctctgcaagccctgacaagactctgagggtctgggacgttgagactggcaaacaagttaagaagatggctgagcactcatcattcgtcaactcatgctgcccagcgcggaagtggccacctcttgtggttagcggttcagacgatggtacagcaaagctgtgggacttgcgtcagagaggtgcaatacaaactctccccgacaaatatcagatcacagctgttagcttctcagaggcagcagataaggtattcactggtggcctggacaacgatgtcaagtggtgggatcttcgcaagaacgaagtgacagaacatctcaaagggcatcaggacatgatcactgggatgcagcttagccctgatggatcttacctcctgaccaatgcgatggataacgagctcaagatctgggatctgcgcccttacgcgccagagaaccggaacatcaaaactcttacaggtcaccagcataactttgagaagaacctgttgaagtgtagctggtcacccgataaccgcaaggtcactgccgggagcgcggaccgcatggtctacatctgggacacaacgtcaaggcgcatcctgtacaagcttcctgggcacaacggttctgtcaatgagactgcgttccatcccactgagccgatcattggatcctgcggcagcgacaaacagatcttccttggggaactttaagtgactatggcagtggctggcagacccaatgccagaggctcccacatcactgggatgttcttgtgacactttgatgaggagaaaaagaggcactgacatccccattccttcgcctgaaaatcggaatactcagtttggctgatcaggatttgtcatttgtagattgtcttagcctgtttagcccagttgttgacaaaccgctccatggctttgtactctctgactttccgaccttaaacttgatgcggtgcttgaagatcaccgattgaatgtactgtgtctagaacctcactctctggagcttgcctgctgtagttatgtacggctctgccatattgttaatctttcctagtcacctgaaactagctggagaagtgatcttttctagttgcctg

SEQ ID NO: 18928 - DNA, 1977 bp, Zea Mays
ccaccgcccaccgcggggccaccgtctccatggcaccacttctccatctccaatccaactgcccttgcgatgctctgcctgctgcacattttcctcccactactacactttattaatcacacagaccgaatcccacgccttctctttccttccccttcgttctctccctgctgctctgctcctgccgcctggctgccgtgccgccgctgatccctctccctctcttccccctcaaagccccaattgccgggtgctcctcttccacccccattgccgactgcttcccgccagagagtggggaagggaggggggtgagaagggagatggcttcttggatagggagtgggtaagaatcacacgatgcagttacctccacctttctctcttctccttttgcgggcatattcttcacctccgcctgcctagatccttctttctttggcccggcttagcttccagtctcaccaacagttctgacctcggagcatctatcaatcggcccactccactctctggtgcaggaaaaaattctaaacctgcgaaggttttctccacgctttcttggagctggtcttttaaatctcagcaggctagcagagaagcctcagttctgaattctagtgcttctggatatggttaccatggcaagacactggagaagctttatgacgaggaacaaaaactctacaagttaatcaagaatttgcaaggctccagtataagaaacatgtctcagtgctacaaaagctggaatcaggagggcatgatagactgcatgccgaaagacttcgggattctattgaagaactgcaaactcggataatctcattggaagaagctgtgagtttggcatgtttttccatatcaaatctcagagacgaggaattatatcctcagatcattgaattatctgcagggcttgtgcatatgtggaaaaacatgcacgagtgccatcaggtccagaaccatattgcccagcaagttagtctccttggcaacagacctgggagtgaaccaacaagtgacactcatcgccaggcaacatctcagctggaaattgaggtgtctggatggcacactgccttctgcaatcttatcacatcgcagcgtgaatacgttagcatccttagccaatggattggtctcacagactgccttccggatgatggtggcttaatgagaagttcatctggaatccttagcctctctgaggaactccagcgtgctcttgacaggctaccagagaaggtagcagctgaagcgataaagacctttatgtcagtcatacactctatagttgtacagcaaagtgaagagcgccaactaaagaagaagtcagataacatggatagcaagttccagacccagttagagaaacacagtgaaaatacaatgcaaaactcggcccagcctccaaataagaataactattcagcatcaaagaatggaacgaaactggatgcatttataaagcaggtcgaggaggagaaagccagatacctaacctctgtgagggtaagccgagccatgacactgaacagtctgcagacaagccttcgaaatgtgttccatgctctggagggattctcaggagtgtgcgtacaggcatttgaaggtatcagcagatgcagtgaagttgctgttattcactcgggagcagcttcacctgctatttcctcgtgaccttgcttcaatgactgtgattattcattgtaagtaggcaaaggataaactggttccacgtgaatacccttcgcttctaattttcagaactttgaatagctttcgggggattatgtgaagtcaatataggcataatagtcttgaatacatcacaatgtctcaacttacattttggttcttattgcatgggatgtactgctctgtacataatcatttacattttgaccgaaccagtatttttctcccttcacattatatctatacataattgttttgattctgcctctgatttat

SEQ ID NO: 18929 - DNA, 132 bp, Zea Mays
gcgaagttgaggaacagcgtcggcggtctcaccctgaccccattggcgctgctagtttggtaccgataggaggtggttcggcgacttcattaatcagaggagtaggccggcaccaggttatatgtactgctt

SEQ ID NO: 18930 - DNA, 2970 bp, Zea Mays
acatgtatttcgatgctattttttggaaggattaaatcttcaacacgtgcccaagcccaaccgcccaaaggagcgtcggcgcgtgcagtgtggaatcgacgccgagcgcctccagtcggtgcaggaatgcgcaaatgcacgtctgaatgaagcctggttggtggtagagccgatggtggtgggaacggcgccgtgcggggtctccgtctcctccgtgtggatcctcctgctcctttcctccctgctcctctcgccgtcggcggcgtccgtcgatttcggccactgcggctgcgacgacgccgacgacggcgccctctcgagcacctacaacatcctgcaatgccagaagttcggcgccttcatcgtgctctgcggcctcacgcacctcatcaccgtgttcacctacgacccgcactccttccacctcgtgctcgccctcaccgtcgccaagttcatgacggcactagtctccttcgccacagccatcacgctgctgacactgataccgcagctcctgagggtgaaggtcagggaaaacttcctggtgaacaaggcacgtgagctggaccgggaggtggggatgatgaaaatgaaagaagaggcgagctggcatgtgcgtatgctcacacaggagatccgcaagtcgctcgacaggcacaccatcttgtacaccaccatggttgagctctcgaaagcgctggaactgcagaattgtgctgtctggatgcccgatgaaaccaggagcgagatgatcttaactcatcagccaagggaaagggatataatggaccagcagaactgctcgattcctattgatgatccagatgttcaagaaataaaggctaccaaggacgcaaaagttcttgggccagattcggcactaggggttgctacccgcaagcttgacgtggggcctgtggctgcaataaggatgccgatgttaagggtgtcaaatttcaaaggagggactccagaagtgatgcagacgagctatgctatcttggttctggttttgcctaatgatggttcattggggtggggtagaagagagttggagattgttgaagtagttgctgaccaagttgcggtcgctttgtcacatgctgcactcctagaggagtctcagctgatgcgagagaaacttgctgagcagtatagggacttgctgcaggcaaagcatgaagccatgagggcaggggaagctcggaattccttccagactgcaatgtacgacggaatgcgaaggccaatgcactcaatccttggtcttgtctcaatgatgcaacaggagagcatgaatccagagcaaagggttgtgatggatgccattgccaagacaagcagtgttgcgtccacactgatgaatgatgtgatgcaaacatcgacaatgaactgtgagcacttgtctttggtgaggaggccgttcaatcttcattcttttattaaagaagctgttggagtggtcagatgtctaactggttgcaagggtgtagagtttgagtttcaagtggataattctttgccagaaaggatcattggtgatgagaagagagtcttccacattgtcctgcacatggtaggcaccctaataaaccgatgtaatgtcggctgtatctcgttatatgtcaatggtcataatgaggttgaagagaggcataatcatgactggatgctgcggagaacaaacttctctgggggctatgtttgtgtgaaatttgagattaggattagaaaatccaaggactatcttttgagttcaaacggtcagataagtcatgggtccaaaccaaacaattctgagatggggcttagcttcaatatgtgcaagaagattgtgcagatgatgaacggcaacatttggtcagtatcagattctaaaagcgttggagaaaccatcatgctggtcctccagttccagctgcagcctctgactgcggtctcctccgcggcgtcttcagacttgagccgatcgtccgcaatccccaacttcaacgggctcagagtcctcctggcggacagcgacgacaccaacagagcagtaacacacaggctcctggagaagctcggctgccgggtcctttcggtcgcctccggtgtccaatgcacgagctccttcgccgccgagccgtccttccagctggtggtcctggacctcgccttgcagaggacggacgggctcgaagtggcccgcgcgatcaggaagttcagtagcaatagctggctgccgctgatcgtcgccctagctgcgaggatcgatgacaaggtccgagacggatgccagaggtcggggataagcggcctgatccagaaaccggccacgttagctgcgctgggagatgagctgtatagggtccttcagaacagttgaaagtgccgcctgatggttctcattgctttcagaattctcaatagaccgctgtagcttggttagatccatacattcacaaaacatttgggggcaggcgaagggaaatgtataggaaaagctggaagaccgctgcttctcgcttggttcctcagtagtgaaggacgacggtgacaggaaggtacagaattttggagagatcatactggtagagcttagactcattcatttgtaaaaccctcggataatccaaggtttagattcttgcactagcactaaccacggtataaatagtttggacgaaatccatggatgggttcagtgaatgctggcatagtagatgcctaaagggggcaaggaacttttgttatcggttagacatgctgaaaagcaggccggatgagattgcggacaggaaggcagctgatacggccgatgctgaccttgtatcttgttgaagattaaatactatggtagtagtacttgcagtcttgatctggtgggtagtgctggtgctcctgctgcatttcttacttgcttggcctgcttctggccagcaaactcctgcttgccatcttcttagcactgattcctatggttttttt

SEQ ID NO: 18931 - DNA, 2044 bp, Zea Mays
tattaccaagcccagtcattcttttctgctacagtaccgtgcctggcgattccgcgtccacgcacctctcagttagggtttcggactcgaggccaagttcatctccggacgagcataccgtgagccccaacgctccaggtggtcagcttcacttccgagcgcccctctcccgacagccgtctcctcctcaccgctgcttcatcacctagccgtcgccacccatcgcctacagcgacagccgtcttccgtcacagcggagcgcccctcagatccaagggacgctgcacgagcgcaagagcaggttgttgagaaggggaatataatcatggatatcatgcagactagtgactcttcacatcatggaattgtagaaaatagcccgtacagaattccatatgacagacatgcagaaggtggtcaacttggtgcttcatggtattttagtagaaaagaaatagaggagaattccctttcgaggagagacggcattgatctgaagaaagagtcttatcttcgcaagtcatattgcacatttctgcaggatttggggatgagacttaaagtacctcaagtgacaattgctactgctatagtgttctgtcatcggttctttcttcgtcaatcgcatgccaaaaatgacagacggacaattgcaacagtatgcatgttcttggcgggaaaagttgaagaaacacccagacctctgaaggatgtcatacttctttcatatgagatcatccacaaaaaggatcctgctgcagttcaacgaataaaacagaaggaagtatatgaacaacaaaaggaacttattttactcggggaacgtgttgtgcttgtgacacttggttttgatttgaatgtgaaccatccttacaagcccttggttgaagcaataaaaatattcaaggttgctcaaaatgcacttgctcaagttgcctggaattttgtcaatgatggaggttagcaaccagatgttggaactgtatgagcaaaaccgtgttcaaccaccaccatcacaaggcaatgatactgaaggcagttctgcaagtgttgcgaatcaacgtgttcctggtaaagttccaggagtagctgatgaacctcctgcccatgaccataaccaagcacccagaccatcgagccagcagaacatgttagaccaccgtggttatgaccaccctcacccagataagcaaaactataggatacctccaaatgatgcaagggatggcactgctaatagcaacgaaggtcccaatgtgtcgtcttcaatgatggatgcgatgaagaaggtaaacaaggataaggtgaaagcggcactggagaagcgtaggaaatcgaaaggtgatttttcaagaaaggtcgatgtgatggatgacgatgacctcattgagagggagctggaacatggcgtggagttggctgccgaggatgagaaggtcaagcaggagagaaagcagagctggcctcatcttgcacaccaccagagcaccaaccgtgagaataccgaagagggtgagctgtccatggacagtcaagaataccgttctccggagcatgacaatcggaagagaaaggatgtgcgtgagtaccggaactacgatcgtgacgaaagggaccttaaaaggctaagatcatgagagttgcacttttgtcggagtctcatgttgttcgtgccataacatgatgtggaacctctatctttctgtcacaggtgtacttgatgcttatttggtatgctgggggatttgaactgttacatatataagtttataagatggtttccccacggtcatgtatgtgtttagccatgttggcaattgagatggcgctgtgccttgagtattccacaggtttatgctggaaacaacatttaaggaagctgcgtcctacgggtatctgaaatgtatgtattttgattccaaggtttcctcaactctaatggtagcctgcgtttttttatccgtctatctgggaacacgggtactggggatgaggtcgtgcacataatgttgttgattttgataccatgtaatgtgcatgttct

SEQ ID NO: 18932 - DNA, 1521 bp, Zea Mays
atgacggaggcggagaggagaacccatcgatttggtggtgtaagtgggagctcattgaggccggctcatattaaagagctcgaagaagtgaagctgctcaagaaactgtctcaccccaacattgttagatatcttgtgactgttcgtgaggaagacacactaaacattttgctagaatttgttcctggagggcctattaattcagtcacttttggggaagctcggttcattcccagagcatggcatgctcaaagtggcccaatatctcgcctacctcttgttacaatttcatattctagcaaccttttgcgagatgttcctgttcgtcagcctctttggcacaacccgccgccgccgcaggcgcaggcgcaggtggacatggatctaccaagcctcgccgtcgtgctgcgcgccgcgctcagccacgttcctgaggagcgcaaggcggcagaagagagcctcaaccagttccagtacacaccacagcatttggtgagattgttacagatcattgttgatggaagttgtgatatggctgtaagacaggttgcaagcattcatttcaagaattttattgcgaagaactggtcgcctaatgatccagatgagtccccgaaagttttagaaagcgacaaggccatggttcgtgaaaacatacttggttttattgttcaagtgccccctttgttaagagcccagcttggagaaagtatcaaaacaatagttcattctgattatcctgagcagtggccaagtctccttcattgggtttcacacaatttagacttgcagaaccaaatttttggtgctttatatgtcctgagggttcttgccagaaaatatgagttcaagtctgaggatgagaggataccattatttcacatcgtagaggagacatttcctcgtctactaagcatttttagcaaattggttcagattgtcaatccaccaattgaagttgctgatttaatcaagttgatatgtaaaatattttggtcttctatttatttggagattccgaagcagctatttgatccaaatgtcttcaatgcatggatggttctgtttataaacttgttggagagaccagttcccgtggaaggccaaccaatagatcctgagattaggaaatcttgggcctggtggaaagttaagaaatggactatccatatcctgaaccgtctctataccagatttggtgatctgaagcttcagaaaccagagagtaaagcttttgctcaaatgtttcagaagacttattcagggaaaatattggcatgtcacatgcagctgctgaatgcaattcgtggtggagactacttgccagatagggttatcaatcttgttctacagtatctgactaacagtgttacaaagaacaatattatcgaagatttgtacagtccccgaacagctgctatggacttcgtgagtgaattggttagaaagcgagggaaaaacaatctccaaaagttcatccatttcattgttgatatatttaggagcatcattgatttatag

SEQ ID NO: 18933 - DNA, 6754 bp, Zea Mays
ccctcacactccgggtccgggggggcctcgtcttcctcgctccgccaccgccacgctgaaaacccacgcgctaagcgcaccccgccaagtctaccagacgctctccggagcggcacgcgcgcgccaatggcggggccttgaggtgctcgtggggtgagggagggaggacggcgctggttagtgagggcgttaagcggcggctcggcgcggcgggcggggaggatgatacggcaccagatacggaacgagtatgggctggcggatccggaggtgtacgcggccccgggggaggaggatgacccggaggcgctcctcgagggcgtcgccatggccggcctcgtcggcgtgctccgccagctcggggatctcgccgagtttgcagctgaaatttttcatgaccttcacgaagaggctatggctactgcttctagaggacatggtttaatgctccggttgcagcagttggaggcagaatttccagcagttgaaaaggctattatatctcagacggagcactcaaattatccacatgatgatggagctgagtggcattctaatgttcaacttaaacagaatgtgatcacacaaggagatatgcctcgtttcattatggattcatatgaagaatgtcgtggtccgccacaattgttcacattggataagtttgatgttgctggtgctggagcctccttaaaacgatattcagacccttctttcttcaagacagaacatgcctccaacatgatagaagcggatgttttaattgaaaataaacctcgtagaattaagaagaaggccatgcgttggaggaaaggggcaactcttgaatcattactcactgcaaactcagagtctcaaattacccccaaggatcgaacttctagaaaagttccacctaggacaacaaagttgaaatccaggcaaccacggagtcctgatcataaaaccactagcagaatcttgagggagcatctgcaagaagtgattttatcgcagaaaaaaatcatctccagatattcggtgaggcattactatgtgaaatttggatcgcctgactcaagtgaaactgcacctccttttggagaaatggacagttttggcgcccttgttcaatcttctggtaaattggatctgacaaaagttgttccagtaaacgaatctgatgctgtggatactaaatctgaacccattgatggatcggcttatttggagctaggtgataaacggaatctggggaaacaacatgaaccttttcaacaaaatggcatggtccatagctcagaaaagctgccggattgtccatacttggatattggagaaagtaataacagatcacatttgacatgtgaagagaaaccccgattggctgaggttcctgctgatcagaaagatgttgatggccgcaggcctgatgacatcgtgagtgatcaagacaacttcattggtgcttctaatgacacggacatggaaaacaaagaaggtcttcaaatgaaaactgaatgtgatcccagtgccagtgttgaactggttgaattgaaccgtcacaacaaggaaggtgacaaagtattgtatgccgaacctccagaagtaggtcctgcaatagactcgtcattgggattggataatgcaagcagtggtgaagaaccaacctgtgtggacttgccactgtcaagtgattctgctcccacagtgtcagccaccaatggtccaaactctggttcacaatctggcagacaaatgaatggtgttgactggtccacagacgaagagtcttctaacgatgtggatctaattgacgtgagctcatcttctagtgtagtttctgaaaatggtgacgtacaaaacaatgattgtctcgttagttgtctacaacacgaggaagcgattcactctctgagtgatgatcatgctggtgctatccataattctgatgaacagtcaccgaatacgtctagcaactgggatgatatggctattggctgcaacaattacaccgagaaagtacatcatccagtggagcatgtccaggatgttgtactagatgatatttctatgatactgagcaaacctaatgatgtttcagaagacgaagataaaatcagttcagggaatgctgatgatttgtctctccaccctaccaaattgaaccaagaggaaatacaggagttgaagacagaatcggaagaaggcagatctctagaatcaggaagttcacctagcaaagcatcattgccaaataaggatcatgtgtcgatgaatgatgtagaagccgacactgttacaattcctaaagaaactgttgcagatactgcaccaacaggtttggatcctgatggcatcgacgagcgtcaagatggagttgcaccgaaatattcaagcatccacaatagtgtactgtatgaatcatatgatgacaagattgctgaagacacacactctttactagatgatggcctatcaactactttcgatgacgataagcatgttgcagaggatcatcaatttgttgttcttgaacaaaggacttgtccaactagcctcaacacatgcaaggatgattctatgcaaggatgtgccgtggccagggatttcactgatgctgaaaagcttccgggagtcgtttcaggtgtattagcttctcaactggagacagaatctcatgtaggagagacacttgcatccacgtcctatgcattcagtgatgatactgaagcactagagattggtgtccctctagcccctggtacttcctttctacctaacaccagtagttccttggtagaaaaacatgaattgactgaaacagaagaaattgcagaggttggtgaatttgtggttgcaaaagaatcaactactagcgtatttgcagttgatgtggtacctcccaaagagttcattgatgctaacatacatcctgaaaaggtagaggttctggctacaagtttgactgaagaagccactaggctggatttacaactacagtctccttccagggaagttttggaaacaacggaagctattcacagaaattttggggcagtagatgaatcaagagaagatatctctaagaagagtatgttgcagacagacaatagtcctcttattgtagagactacaagtgaaaaatgtagtgacagggatggtgatacacaatttctagtaaaatctgattatcaagaggaattactaaaagagggcagtcataatgctgaagatcgatctctctgcgatttgaacaaggatggtgcagtaaccttgaaaagtaatgcagttgagaaacaaccagtgaatgctggtcaagatttggcgtgggggatgcacgctcaagattctagtagtacaaacccgttcctggatcctgcctacttgatgagccacactcaaatttattcatcttccagtatgagtagccaaccatgtttccctgaagaagaggatttcctttcagagcttgtaatacaacatgacaatatgggagtaactgctgatgccctttgggaacctgcaactccacctgatgatgcgccattaccatcagaaattatgactgaagatgatttcagatccttctgccaagaatatcatgagatagatttttcatctgtcactaactgttctcacagtgaaccagcctcagattctaacaaaattccaaatgcttttctgatcagagagtcagattttccatgttataactctgccttgccagtgaagttagatcaggaagcctgtattcattctaagttctgttctgagtgtgtcgaatattcatgtgctgtggaaagacaaggcactacatcaatggttgtttctggtaaagaagatcgcgtgggcaaggacgagacaccaggagtagatttccatttaaattttctcgagttttccaatgataacagaagtcctgaattaaatatgctctccgttccagtggatttacggcaggaactgcatggcttgcctgaagttgattctcgtgatagttcccctttgctgcataaggagaagactagtgaagaatgctgcttttctttaagcaacaacgttgttgaagtgaaacaagagctggaaatccgtgctgaccttgttccacattcttctattaatgaaaaagtagatggattagatgaggctgtaccggtggaaccagaggcccatgcctgtgccttggatgaatatgacaaccaagatgtcccacacatttcaactagtgagaagaatgaaacccttactttgggcaaacctgttttagtccaggggccagaagtttgtgcctttggtggatttgaatgtgatcctccaatcattccatcaccttcagttgatgagactaaggacaatctagaagtcagaatgaatatgatcctccaatcattccatcattctttgaggacttcttttcaagcagaacagaagtcagaatgctacacctcaggtgaacatgattctcaaaccgttccatttcctttgcatgatgagaatatcaatgaactggatgatcctcctttgagcaatgctgacgaactggaccgggaatcaaaagcttgtgttccacatgaatgtgatgctcaaatcgctccatgttcaactgatgaggatatacatgaattggatcaccctcctttgagcagtcccgctttagtggatcttgaatcagaagaccatgtctcggatgaccgtgattccgaagtcaccccatgtttggttaaagataagattgatgaatctgtagatgctcaaccaaacctgcttcctggggagctagagcaggaaactcatgcaccccctgaattagactttcgagttgctccacaatcagcgaaagaatctgattgctcaactgaatttgattcccaggccgcaccatgttcttcaaatataccagtactagctaacacaacagtgtcgacttgtatttctgccatgcctagcagtgaggaaacgtatcagttgtctcctgttccaccacctactgtacaatttcaaaatgattcctacaaagatcctcaagctctactcgctgattcctacaaagatcctcaagcgccaccccctctccctcctctccagtggaggcttggaaagcctcggctaggacttctgagtagaaaaggctgtatgactgaacctgcaagggtaatagatcctgttttgcagatatcaagccaagagatggatattaggccaggtttgcttgatccaacggatagatctatagaaccagtatcctgtcaagaaatcaaagaagatagatgtgagagttctttgatagatcataatgatcaaaatgtggattttgatagattatcgaccagggttgcagtaactgatgttgcaaggactgaacacaggctatccttagagacttcagaggacattaagcaacaggggcatatttcttcatcggcaacaggagttggggaacacctggatgctgggttcacatcaacaatggcagatgaggaacatctggatgattctgggatgacacatggaacagctctatacttatcagaccctctgtttccattacctacatatgaactgcaggaccctcaaccagatactcgagaaaatagcgagcatcccagtcaaacacatggagctgcatctggggatgataagtcaatggatgctgttggcagcatggaaagcaccctaacaaaaggacatgtttctggaaataggtgctaccagcaacctcagcatggtgaatcgtcctcagagacttcagaccataaagagcatattacaaatgcatcagaggatggtgttaagcatcagtcaggtacaagtgaggcaccttcagacacagcaaagcattctgcaccaggcacgctgttgaaagggaatgtccaagagagtcaaattttacaggaacataatgtggggagttccgaggacgatcaaccaggaggcctgttgtacagcttagaaccagtggcacctcaaggggaaaacaaaaaccaggttaacaacccaggcctgttactggaatggcctggagatacaagtgagttggtcactggccttgaaaaaagttgctatgcgcatgctgagcagccacctgtgatgggatggactgttggacctcagatgcttcatcctaaatatggtattttagaagaagagagccaatttgagcctaatatcgccgacaatcatttaatcaggaagcctatttcgataaaaaacatcccaaggaatccactggttgatgctgttgctgctcatgatagaagctcgatgagaaaggtttcagagcttgcaccaccgactgacaagccgaagcctaacgagagaaacatgttgctagaacagataagaaacaagaccttcagcttgaaacctgttgctccagctcagcaaacagcaatgagatcccctgctagaaccagtactagaaacttgaaggttgccgctatcatagaaaaggcaaatgccatacgacaggcagtgggaagtgacgacgaagacgcagatagttggagtgatacataaatcccccaccgtttgccctaccctcttggtgcttctttccatggcagaaaggtcaaactaacaaactaactattggaggcaataactaaacttaacaccaagatttagtttcaacagtagccgccgcggcggaggcggccgacgagggtcgagcagatgaagccggttgcgcccgtctcccccgccatctcctcgcgtccttcccgtgagctgactagctgagctgggtctcgcgtcactccgagtgtgctgcggc

SEQ ID NO: 18934 - DNA, 1017 bp, Zea Mays
tggatactcgtaatctaccaacgacagctgatcataactcaaccgatgacggagtgggatggtggaaggaggagcattttagtgctgcagatatggatggtgatggctttctaaatcttactgagtttaatgactttttacatccagctgatactaccaacccaaagctaatacattggttgtgcaaagaagaagtcagggaaagagataaagacaatgatgggaagctcaatttccaagagttcttcaacggattattttactcaattcgacactatgatgatgaaggcttaacagatgacaccggtggctctgatgcaccagctaaaaagtcattttcacaccttgatctggataatgatgggctcttatcagcagatgagctaaagcctgtaattggtaatctccatccatcagaatacttctatgccaagcaacaagccgactatgtaatatctcaggctgacacgaacaaagatggacaattgagcatgaatgagatgatcgagaacccctatgtcttttacaatgctttattcacagaagatgattatggctttcatgacgagctccgttagttcccaattcaacacaaagctttatggaatcaccactgtaggaagtcggaagactttgttatgcactgctaagaccatttccgttttctgtctgaaatcatccatcatttgacggtgattccatgtaaaacaagcatgtttttagatgcacctattctagaagctgtgttcttttgtactacccttgagccttttttatagtttgttgtttttttaatcatatatgtacggtgaggatgtgagtgagttttgttctttcaacttcttgaatcttgatacgatacaaaactagcgtcttccagaatcacaatttgtaaaccatacaaacccaggaaagcattactgtaagccatgaattgacgttatctgtaatgattgtgcaaatcatgaaatctgccaaattcatgctttagtccctatacaaattcttctaatgaag

SEQ ID NO: 18935 - DNA, 6030 bp, Zea Mays
cgcgcatcgcacacgcgtctcctccctctgctcccagtctccaatctcctcccttccccactgcggcggaagtccaccaaagcgaaaccaagagcggcccgaccagatccaccttcttcctccccccttcatgcaaccaaaccctagggactagggctaattcccctcctcctcctactccatggcctcggatttcgacgagaccgacgaagccttcttcgacaagctagtcaactccgacgacgacgacgatcccccggccgccgccgccgtgggggggctcgctgcgctatcgctgaccgatcaacccgacgcgccgccgcctcgcgagtccgagcctcgtgaccagcctgctgctgctgctgcggcggcagcggcaccgacggaggatgcggagcgtgagccctcgccggaggtgtatcctgcggccgtgctgctgcatccgccccccgacctcgctgccaccgtcggggcagatccggccggggacctcctgccggaagacggagaacccttctccggggccgcggctgtgccagaggatcatcagggcctggagccgtcgctgtcgtcgtctctctcagcaggcaccggcgatggcagcgcgccggatcgcaccgtctctggccacacggagagcaatgccagttcccagttggattccagcacagctgcggaggggtctgggcatcagagcgccaaatcgcagctggagtacacggatcccaggtatctagagagcctctaccctggctggaagtacgatgacgctacgcagcagtggtatcaggtagatactctcagcgcgcagagctatgctgctcagaatactggtgctgctgtggcagaccataggagtgatggtgaccttcagcagaagtttggtggttcttacctgcaaaacacttcacacgcagggactgggcttgaacacaggcagacggcttctcagcctgagactgaggctggcaatcagcctgcagtggcaccacagaaagagggggaggcacagtgtgaacccaagccgatgcatacagaggtgggatatggggagagcaatgccacttcccagttcgattccagagctactgctgagggatacggggatcggagcgctgatgcgcaggtggagtacactgatcccagatatctagagagcctctaccctggctggaagtacgacgaggccacacatcagtggtatcaggtagataccctcaacacacagacttatgctgctcgtgatactggtggtgctgtggcagaccttgcgagtggcggtagtgttcagcagcaccaacagtttagtggttcgtacatacaaaacacttcacatccagagcctgctcttgagcttacagagccgacttctgagtcaaagcctcagcttgagcctgcggcggcccctcctcagaccgatgcttatcctgcggtggcatcacataaagaggagcagaaagagcatggatctgtaccggtgcatactaagcctgaagctcaggagattcctgccaatgctggtgatactgccacagtgacagagggtgggtccccagggtcagagaaaggcatccataccgccgtcaagcaagtgcagtggaacgactttggtgccagcactggtggggcggatctatttggtgacctcctgcccgatggagctgaagatgacttctttgagggcaccgtccctgtcagccaagacgtctcatccttggtaggtgctacaaatgttagcgcaccagatcacagcttctctgcaggagtgtataacactgccatgattagtgctggacacagcttctctgacggagttgataaaaatgctaactctcatttcggtcccagtggaagtagtgcagggtacggggatcaaagcactaatgcacagttgggctccactgatcccaaatacctggagagcctctacccggggtggaagtatgatgaggcgacacagcagtggtatcaggtagatacccacagtgcacagagttacgttgctgataatactggtgctgttgtagccgttgggagtgacaatacacagcaacatcagcagcagtttagtgcatcgtacttgcaaaacaatttacatgcagcacttgaaaccattgcggaagagagcagcaccaatgccatgagctgggtccagggtgggaccaacacaggacccccagaatacccaccgaacatgctgttctacgcagaatacccaggatggtactttgacaccaacactcaacaatggcaaacacttgagtcataccagcaaagtgttgcacatgttgcaactactgcagcagcctcagatgggttcgcagggacatgccataatgtagctcattacactgaggattcttatgcaagtagctataaccagcagagccagtggcaaccggattcgttcggtaataccatgcaggctgatgttttggggggcaagagcttgctaggtagttcctatggttctaatcagcaggctgggaatcagattgggcaacaggccaatgtggactctttaaatcacgagcctcatgtaaatacatttatgccttctacaggtcaatccactggtagtgagggaaatcaggctagctataagagtttcggatcttttacagggaatcagagttggtacagtggtttggagcattctacaagtaaggaattaaggtacaaaggatttgaaccttcaacaggtttccagactagtcgcaaggaattccagcctcctaaagatcaccaggctggtcacatggcagatgaacctttgacaagatatgggtatggtagttcaaatggggtcgtcaatacacaaaatttcgtaccaaaagagggtatgcacaagacacaaatgcatgatgactccactgcgcatacttatgctgcaagcaactattggggtactcagacctccatgggcagtgctcagcagcaactgactggtacaaatggtccatcccaacagtttggtttctcaccacatgagcagagatcatcagctggacgcccaccacacactgtggtatcctttggatttggggggaagcttgtagttcttaaagaaaccagctctatggctgcaaactttgacagcggaaatcagggcaattctggtcgaacggtatcagttcttaatattccagagattgttgctgataaaattgatcattcaagcatcgctaacggtggtgcatttagctacttccatgctttgtgtcgccatcctattcctggccctcttgttggtggaagtgctgcatcaaaggatctgaataaatggcttgatgatatgagtggcgtatatgaatcttctcagacagaattccagggaggggatgttcagaaggtgcttatttcgttgttgaaaatattgtgccaacactatggaaagcttcgttcatcctttgggtctgacccgtcacaagagatggcccagagatggcagtgacgaaacttttctcatcttgtaagagcagtgctaatatgaaagggtatggagctgttgtccattgcatgagaaatcttccctcagaaagccagattcagactactgcccaggaggttcaaagtctcttggtttctggtagaaggaaagaggcccttcaccaggcacaagaaggtcacctttggggccctgcactgatccttgctttacaacttggtgataagttttatgcggatactgtgaagaaaatggcccactgccattttgtttctggatcacccttgaggacactgtgccttcttattgctggacaacctgcagatgttttcagttttgagaatcctgttaacagtggtttgtcttctccccaacagcctgtagaggctgctcctaaaggtatgctggatgactggcaagagaatttggctattataacagcaaacaggacaaaaggtgatgaccttgtaattacccgccttggggattgcctttgggaagagaaaaatgaggttgcatctgcccactcgtgctatttagttgctgaactaaatattgattcgtactctggaagtgcaaggatgtgccttattggtgcggaccacttgagatgtccgcgcacatttaccagccctgaagcaatccagagaacagaggtttatgagtatgcaaaggttcttggtaattctcagtatatcctcttgccatttcaaccatacaagctgatatatgcatatatgcttgcggaggttgggaagatttctgattcactaaagtactgtcaagcatctctgaaggtgctcaagtcctctggtcgtgcacctgaactagaagcatggaagcaactgtttattaccctggaggaccggatacgtacccatcaacagggcggttatgcaacaaatcttgcccctggaaagattgttggaaagcttttcacatcacttgataaatctttgtcccgaatgatgggtacacaatctgcaccgttgcctcaactgccgcagggtgctgcaaatgagagaggtgtttattcttctcctgatacaaaagtagtaaatagtcagtcagtgatgtccatggcaccattagtgtcatctgcttcagagcagtctatgagtgaaattggaggaaatagtgtctatggcagggaagttgcacataacagaagtatttctgaaccagacttcggcaaaaccccccaacagcagggtgctgctgtatcaagtaaggcacagagcacatcaggttcaggcagttcacgctttggatggttggtgcagaagacaatagggcttgtttcaaaatctcaccgccaggcaaagctaggggaacagaacaagttctactatgacgagaagctgaagcggtgggttgaagaaggtgctgagatccctgccgaggagcccccacttcccccacctccaacaaaagtgccattccagaacagcgttccagatcccaactccaatgctcctcccactggtggaggttattcctcaaatcctcccgagcctagttccgggatgccaccgatgccacccacccagaaccagttctcagcacgtggaaggatgggtgttagatcaagatatgtggatacttttaacaagggtggcggtggtggtggcgcaaatgccttcggagtagcaacatcttatagcaaaccagcagctccttcaatgtccggtgcgaagttccttgtgccaactccagtcaatgttgcttcagaacagatggctgagctaggtgcccacagtgaaaccgcccgacaggatgaatcgtcgtcctcaccagcgatggaaacatcatttagttcgccgccatcactgatacagatgcagtcaagcattccgcggtacccaagcggtgacaacattccacggtacccgagcggtgacaacattccgcggtacccgagcggtgacaacattccgcggtacccaagtatggataacgtcagctcccccacaggcagcattaacagctcgatgtcaaggtcaagagcgtcatcatggagcggaacgtacccagagcagttgagcagcactgccgcttccaggtcacctgatggacagatgacgcagtcaccatcgatgcctggaagaagacctccgcacagccgttccaacagcgcgtcttcttccgcccagctcaatggtttgggtgaggatcttcacgaggtggagctctgacacctggccgcagattttgaccataatgtgatttatattaatagctgcatgtgtctagagagcaaagcaaaggaaattaaagtgcggtgtccctttttcaatttttttacatgtgaaagactgtggatgccgctgcattgtacagatagttgactcgttcgccagatgaaaaatgtataacaagagtcgtaggttcaagatagggagaagatgaaaccgtgatgattcatcattgttaaaaagatggactgtctgttggaaaaataaagctgattaataaccgcaataatgtcggtccgcatcttggtgttcatattcttatttgtgtgtatgcatttctttgttcctgtgtattatattactttgttattttgcgagtcactggag

SEQ ID NO: 18936 - DNA, 159 bp, Zea Mays
caatatcataaaagtaattattacataacggaagtcttacaaaaataaatgatatgtaaagcgaattaaatgtccatccatggcaccataaagctgacggggagacgtcacctagatcaactcgtactcctcattgtacggctcctcctgaaccatctg

SEQ ID NO: 18937 - DNA, 655 bp, Zea Mays
ccctgagccactcgccgcgcgccttgcggattcgggggtggggtccacagaacaaattcatcccctccctgcgttccgttgcgcacggctaacgccgcggaatccgcggaggatctcccgcacttgtcgcgcggcttgaccgaactcatcctcgcccctgggtataaatccgtggccgcggcatcccctgggccattggcgagctgcatcaccgaacagagggttagagaaaggaagcgagatccaccgcgaacgaatcacgggtacgccatcgatagagactcgacagcgagtctgggagcttcgtcggttaccctgggacgcgttcgatgcggcaccggggtcgatggccaacctggtggcggggaatttctcgccgtcgcgcagcgacgccatgaatccgtcgtgcgccgtggccaagcttcatccgtacctcaatgccggtaagaatacatccattgtgatcgcgatgccgcgcacaccgtgtagctccgttcaatttgactgtggtgctcgggggaggccaattggtgccacagtcgcgttctccaccgtgtggccatggcgccgcctctgcgcagttccttgggggttgaagaagagtgcgggccgttagatccaaatgggcggtgcagattaaaacctatgtactgct

SEQ ID NO: 18938 - DNA, 1633 bp, Zea Mays
aaaaacttacatgattggaaacggtgactgcaaccccagatttaatgctagggtatttagatttcttccttgggggagatgaaaagaggcctgatcttccacctcgtcttcgtcaaaggtttccaatgtctcttatctttggaggcgatggaagttacatgactccgtttttacttaatagtgatagtgtgcttactagtcttatgagccaggctgttccctcatggatatggcaccgtcttgtagctggattgaatgcacagctgcgtttggttcgctgtggaaatctgaaagtaacgtgtcttccagtcatcaactggcttgaaactcacgcgaatccttctttagctgagaatggtatccgcgttgatcttgcctggtttcaagctacagcactagggtactgccaatttggtcttcttgtttatgctgttgaaggagatgctgcacttactgaacctgatgggagccctagaataaaaacagagcaacagacaccaacacaaaacatgcttgttgagactcaactcagtcagtccaggattaaggatgctctaatgcgcagaaggatcactggtggagttctcgatagtaatagcttaaggacgctaaacgacaggagagatttattttacccattttctcttatcttgcacaattcgaaaccagttgggcaccaggatcttgttggtctggtaatctcaatactgcttcttgcagatttcagcttagttttgcttacttttctccagctgtattcgtattctatggtcgatgttctcttggttttgttcattctacctcttgggattttgtcgccttttcctgctggtataaatgctctatttagtcatggaccgaggcgatcagcaggccttgctcgtgtatatgcattgtggaacataacttcactggtcaatgtcgttgtggctttcatatgtggttttgtacattataagtcatcaaccaaaacacacccaagcgtgcagccctggaacctgggaacggatgaaagcagttggtggctcttcccaactggactcatggtgttgaaatgcattcaagcaaggcttgttgattggcacgttgctaatttagagattcaagaccgtgcggtatatagcaacgacccaaacatcttttggcagtcatgacacctggtgtaactgaggtccttctggaaagctttttacaactcgattttttgtgagttgataaaaggaaagagtgcgggcagcaaggcctttctttattgaccagaccaaagaagcagctacagaggttatatagacgcatacttccgcatcccccgctgataatgtgcagttgcaaccggtgttctgttgtatatataaaaggtgttcttgatccattctttgtaggatttagacaccatagagtttataaacaatgtcaaaagctaacctaagagagacatcggagggatgtggatttgttgttctattgctaccgtgccctggcccttgatgtttgttgagatgggcagaggggggcaactaaaagtcagggagacgcaaaagcctcttgtatgtgatcagatgggtaaaacaagttattatattattaacatgctccagggttttcactaacagcaaggctgatagactgagaa

SEQ ID NO: 18939 - DNA, 4089 bp, Zea Mays
gcaacaaggagaagcaacaaactgaaatgcgaaagcggaaaaatttctggctcctgtcctccgccctctccccctcgaagcgatagatagaataggggcgggcgccgggcggcttcctccgtccacagccacagccatcgccacctccaccaccacctccttctcctcctcctcccgcatctcctcattgcaaaacctcggttcattttcctgtcgcgatctagggtttccggtcgctgcggcgccaatggcggactcgcgccgcacctggtcctgggacgtgtcggggttcgagccgccgcagccggcgacgacgcaggcagcgtcggcaccgaccgctatgccgcgggctccgccgacggccatgatgccccgcccctccgctggggctccccgcgcctcggccggcgcagtgcccgttgccgaccagctggaccagctcgtggacagcgtccagcttgctagagaggactgcttggagcttagacaggaagctagcgacctccttgagtattctaatgcaaaattgggccgtgtcacccgttatcttggatttcttgccgacagaactcgaaaattagatcaagctgcccttgagactgaagctagaatcacccctttgattcatgagaagaaaaggcttttcaatgacctattgaccttgaaaggcaatgtcaaagtgttttgtcgttgtagaccactatttgaagatgagggtccatcagtactagagtttccggatgattttagtatccgtgtaaacacaggagatgaatctttaaccaatcctaagaaggattatgagtttgatagggtatatggaccccacatcgggcaaggtgaacttttccttgatgttcaaccatttgtgcaatctgccctggatgggtacaatatttctatatttgcgtatggtcaaagccgttctggcaaaacacatacactggaaggatctagtcacgatcgtggtttatatctgcggagctttgaagaactgtttgatctttcaaactcggatactacttctacagcacattttaacttttattttactgcctgtgagctctacaatgatcaggttagggatttgctatcagaatctagtagcactgtcccaaaagttcgaatgggggtccaagaatcctttgtggagcttgttcaagagaaggttgaaaatccactagagttttctgcggcactaaagatagcacttcaaaaccgatcagtaaattcgccaaaggccatggtttctcacctgatcattaccattcatatacactacagaaactatgtaacaggggagcatctatacagtaagctttctctagtggatttgccagcaagtgaatgcttgcttgaagaagatgccaacagggacaatgtaacagatttcttgcatgtctcaaagtcactttctgtgttgggtgatgcatttgcctctttaagcgcaaagaaggagcctgttctatatgggaattcaagaatcacacaaatcttagctgactctctaggaagtagctcaaagatcttgctgatcgtgcatgtaagtccaagtgcttcaaatttgtcaagaactttatccacactcagtttttctgcaagagcaagaaatgctgagctgagccttgggaatcgtgacacaataaagaaatggaaagacgtggcaaatgattcacgcaaacaattgcatgacaaagaaaaggaggttctagacctgcggcaagaagttattgggttaaaacattctctaaaagaggctaacgaccagtgcatacttctgttcaatgaagttcaaaaagcctggagagtttcatcttcactccaagctgatctcaagtctgaaaatttaatgcttgccgagaagcacaagactgagaaagagcagaataaccagctaagggatcagatttctcatcttttgaaagttgaacaagagcaaaacctaaagatgcaggaacgggatttaacaattcagtcactacagactaaactcaagtccattgagtctcagcttaatgaagccctcaatgctagcgatgctagatcaactattgggtctgaatctgcttcagtaatttcttccccaaagataacagaatcaactgctgactcatcttcagtgacgaaaaggcttgaggaggaattggcaaaaagggatgcccttattgagaaattacatgaagagaatgagaagctttttgacagacttacagagaagtcaggattaggaagtgctccacaggtcttggctgcagttatcaaagctggtgcagctagggagcatgagatacttgccgagatccgtgatgctgtgttttcattcattcgaaagatggaaccgaaaaaagttatggatactatgttagtttcaagagtcaagatattatacatcagatctttgcttgctaaatcacctgaactacagtccatcaaggtctctccagttgagcgtttcttggagaaatcaaatactggtcgaagtagaagttctagtaggggaagtagtcctggcagatctcctgttcaccaccatggtcatggttcccgaactgcgcttgttgatgaacatgtgcatggtttcaaggtgaacattaaacaggaaaagaaatcaaaattctcctcaattgttctgaagcttcgtggtatcgaggaggagacatggagacagcatgttactggagggaagctccgggaaattactgaggaagctaaggccttttcaattggaaacaaggctttagctgctctctttgttcacacgccagctggtgaattacagcgccaaattcgtgcatggcttgctgaaaactttgagtttctatctgtaactggtgcggatgctgctggaggagccgcaggacagcttgaactgctgtcaaccgctattatggatggctggatggctggtcttggtacagcgcagccccctaccactgatgctttaggccagcttttatcagaatacacaaagcgtgtttacacatctcaactacaacacttgaaggacatagctggcacattggcaacggaggaggctgatgatcctgcacatgtcagtaaactccgctctgctctggagtctgtggatcacaaaaggagaaagaagaaggtggctcaccaattcgcaatcctcttactgctgcggaggatgcacgattagcatctctcatatctctagataacatcttgaagcaagtcaaggaagtaattagacaaagctctacaggacctatgagaaaatcaaagaggaaagctttgctagagttattggatgacctcttgacacagatgccctctcttcttgatatagatcatccatgtgctcagaagcagatcatggaggcacggaaagttgtcgagtcactgcaagaagaccctgatgatcctgccccacagtctaatgcattgggagagggcgaggtttcacagtggaatgtactgcagttcaacacgggaacgactgcgcctttcatcataaagtgcggagcaaattccagtggtgaactggtgattaaggctgatctgcgagtccaggagcctaaaggtggcgaggtgatccgtgttgttccaagaccaacagttcttgcggacttgagttttgaggaaataaaaggtgtgtttgagcaattgccagaggcagttagcttgcttgccttggcacgaacagcagatggtacaagggccaggtattcaagattgtacagaaccttagccagcaaagtgacggccttgaaagagactgttgcagagatggagagaggtggtgttttcaaagatgtacgataaatgctgtgttattgtagagttatttatgatattgatgttgtatatggatgccatttgtcggcatcccttgtaactgtatttgtttttactatgtggaaacctatgttgtaacactattctttggcaagagatgagccttgcctgccccaacccgtaatactatggttgtgcaaggcattaatgtaaattgtagctgcagctgataaatgtctgcagtgctgcaagtctgaactttccaggttatggaactattcaatgtttatttgtattaagcttttaagatgttaaaattgtgctagtttt

SEQ ID NO: 18940 - DNA, 2723 bp, Zea Mays
cgcgtttccaaatccaaaaggaaaacaatcgcgagcacgagacggggacgagcagctccacaacaattcgtgcctgcctgccctgcctctcggacacctccctcgtcctccccctcctacgccgcccccgtcctcggcccccacgcgctcgcgcggcgcacgaggcgacgaacccgacctcctcctccgcgcccgtccctgccaccggtcgccgatgagctcggagggctggggcgctgacctgagttttatggagagaggatgccagagctgcgaagcagtactcgccaagcatgcctaaggtcgaagaagcttgaagatctgcagctaggagagccgcctgcgaaaccggtctcacctgctccgccgagggcaggaaagcgtgctcctacacgtgctgctaggggcagaaagggtgccactgggaaaggagtgccccctgcacctacgactagaagaaagcggggtaatattgtcgacttggaagctgatccagcttgtgaagacccccctaaagctgtcaagggactggaagttgctgctgctgctgcacccaagaaccttcctttgaaggaggtagccgaggttggtgttctgaaaatgaatggtgtgagtgcagagaagattattggggctgaagatgaatcaacagcgacacctgtgccagagagggttcaagtaggtaattctccagagtacataactgacaggaagttaggtaaaggtggttttggtcaggtctatgttggtcgaagggtttctggtggagctgcccgcactggtcctgatgcatatgaggtcgcattgaaattagagcatcgaaacagtaaaggatgcaattatggccctccatatgagtggcaggtttataacactctcaatggttgctatggcataccatcggtccactacaagggtcgtcagggcgactactatatacttgtaatggatatgcttggtcccagcctttgggacgtgtggaattcaatggggcaggcgatgactccaaatatggctgcttgcattgctgtagagagcatatcgattcttgagaagctccattctaaagggtttgtgcatggtgatgtgaaaccagagaattttctgcttggtcagcctggatcgcctgacgataagaaactttaccttatagatctcggtttagcatccaagtggaaagagaataatggtcatcatgttgattatgatcaacggcctgatatctttaggggaacaattagatatgcgagtgtccatgctcatttggggcgcactggtagtaggagggatgatttagagtcactggcatacacccttattttcctgattagaggaagattgccttggcaaggctaccagggagataccaagagtttccttgtttgcaagaagaaaatggctacttctccagagatgctttgttgtttctgtccagctccattcaaacagtttcttgagattgtcacaaatatgaaatttgatgaagagccaaattatgccaagcttatctctatttttgatggtttgattgaagcacctgcgtcgagaccagtcagaattgatggggccctcaaggttggacagaaacgtggaagattgcatgcaaatctagaagatgaacaacctaaaaagaaggtaccattacaatgtggctgactcaaggctaagtcaacatatagaaaagggtaatgatgacgggctttacgttagttgtgtggcttcctcggcaaacctttgggcactcatcatggacgctggaactggtttctgttctcaagtttacgagctctcaccagtttttctccacaaggactggataatggagcagtgggagaaaagttactacataacagcaattgctggatcaaccaatgggagttcattggttgtcatgtccaaaggaactccttacacacagcaatcatacaaggttagcgaatcgttcccttacaagtggatcaataaaaagtggaaagaagggttccatgtaacatctatggccactgctggaaatcgctggggcgtagttatgtcaaggaactcagggttttctactcaggttgtagagttggacttcctgtaccctagcgaaggcattcatcggcgatgggagagtggttacaggataacttccacagcggccaccaatgaccaagctgctttcatcttgagcatgccaaagcggaagccgatggacgagacgcaagaaaccctccggacctctgcctttcccagttcacatgtcaaggagaaatgggcgaagaatctctacatagcctcgatctgctacggacgaacagtgtgctgatagtcgaagagaggggcggccgcgctgactcaatacggtggcttgcgtcaagagattagagatgtgagatgaacattaaatcaaaaccagttctaatgatgataggatcagtagatctgatgatacggtatggtatcctaccgtagctgtaaagaaatgttgtacccagtgccggccgcgagaccgttactgccatgaagtgaagctaatgcattttggagtctcttcccgggaaaatggaacacaatataatgctcatgtgcaaatcatataggtttaatttcttgcgcactagagtttgcacgtcaaaaaaaatcataatctgaaaaataggccttcatatatatatatacatatatatctatctatatatatatattatatagctaaaataacacaccagtttgaagcaaag

SEQ ID NO: 18941 - DNA, 844 bp, Zea Mays
acgagtaatttatttaggtggttttcatgagtaaacaagttagaagctagaccctcaaccctgtccaaacctgcaaatagtatcaggaaaaaatacactcctgcaaagaaaagattgacaaagcaaaggctgaaaccattactgacgatgaactcaatgcactacaaagcaagatggaagaaaaactgcaggaagagaagcagcttcgccaagagttaagagtgttacatgatgagcttgatgacctagaaagccaaagactttctataaaagaaagaaaggacgctgtcaagaagaaaaagaaagacacacagaaagcagaacgtacgctttccatgtgtctgtcggttacaaatatcatcccaaatttggaagaccaggataaggtttcaggatatattgtcgaccagaacaggaagaagatagagaagtttgaattcgagaacaccacgccaccagttgagatatgcgacgagctctggaagaagatttagcgtgtttcagatcattcttgttgtaaggcggcggaaacctgtgcctgtagattgccgcggtgtggttgtcctcccaggatgcagtttgccatgttgtttgtatcgttagttcatgacgctgtactgttttgtaaggcggcggaaacctgtgtttgtatcgttagtttgccatgtcagattagctactacttcttgtgttttaaattattccaaattataagttattctaattttcctgagagtcaaaccatcttaggtttaaagcatctcaagtttaaccaaatttatatagaaaattgccaaaaaagcatgacatcaaattggtatattacaaaaatataattaataaa

SEQ ID NO: 18942 - DNA, 2699 bp, Zea Mays
tttacaaagaccagtcgcctgaccgtacatcggtcggttcagcttcagcgccgaaaaagcatagcgcttcctcacgaggccggcgccgtaacttctcgtcgtcaacgtgcaaggattttctccgcaagtttgtggacagcgagcttctgacgtcaagcctagaggactggttctccggtcacagcgaagattgtggtttcaggaagccaggtttcgacgttcctttcgagcttacagagttacacaatttcgattacgctctggagggcgttacttttcagcagctagtacggatgccaagcgctctgtacgcgtcgacgtcggatgtttttgaggccagcgcgtatcttgctctggaggatttccttcacgcaggcgttaaaggactgtggcaaactttctggggtcctgatgaagcgatgccgttctcggttgcctgtgtacacagcacgagctccagattttatcctgctgagaaggctataagcagtggaaggctcgatggtgtttgcgcgactgctgtgctgctgaagaatttgaagccttcacaaggaaggtgggatcatatcgtcgtgctggctttgttgagacctgatgtcggaatggtttccgcacagggtgacgaggagccgtctcctgctgtcttaggggaggcactgttctttgctctgcgtgtcctgctatctcgaagcctcagcaagtcctccaccgttcttcgcaattcggactctgtttacgtgcttctttttgattcacagtttggcggagtggtaaaagtgcaaggtgatttgaacaggctggattttgatctcaacaacgtttatgactgtgctgctgaatggataaagaaacattccagaatttcagtctgttccgtagaccgagtatggaacaaacttgggaatgctaactggggagacattgggacccttcaggttctcatcgcaatatttcactcgatgatccaattttacggagagcctaagtattctctcgatgaactggcaacggaacatagttcaaggctacagagccgaagatcagaaagacatctggttgacagacaagctaatggcaatggtttatttcgattccaacagcgaagtcattctcctgaaattgttgagttacaggaggaagcagcagttgatgtgaaaccacatgaaaccttaaggcttgaaatagggtctgttgtattgatggatgatgcttacacacagaaaggttttcaaatcagtgacatcctaacaggcagtgatcctcctatttatacttctgctcctgtggaagaacctaccaaaacttgtttgctgtatgtaggctccagcccttctcatctggatccggcatgggaggatatggactcctggtaccaagtacagaggcagacaaaagtactgaccgtgatgaagcaaagatgcatttccagcagatatataccacacatggaatcgtccggacgggtcatccatccaggcccatgtaacaaccctaactcaaatgcaagttgtggtcatccatggtgcagtactccaatgcttgtcacctcaccagttggtgagaccatttcgaatctgatacggaatggattgtttggtgccgaggaggctctgagatgttgccatgactgtttatctgctcttgctgcagcagcatctgcaggagtccgtcacggtgatatccagccggagaatgtgatctgtgtcaacaatggttcaacacatccgtattttgtgcttattggatggggccatgctatccttgaagatagggatcgaccagtaatgaatctattcttctcgtctacatttgcgctccaggaaggaaaactatgtggagcgtccgacgcagaaagtttaatctaccttctatatttctcttgtggcggagtttgccccgaccttgactctgtcgaaagtgcacttcagtggagggagacgtcatggtctaggagagtcatacagcagaagttgggcgacatctcagcagtgttaaaagcttttgcggattatgtcgacagcctctgtggaacttcgtacccgatggactatgagatctggttgaaacgactgcgaagaacaataaacgaagatcatgggaaggaggttgacacatcctcgagttaatgctgcaacacattctcttgcagatccaaaatttggaagatcaagagtgataatcagctcattaccttttgttgttgttgtagataatttatttgtgggaggtccataggtcatagtattgtccatccttttgcaccatttttcttggatataagggtatttcaaaagttgcgatctgctgctgctatcctcaatgggatcactgtcaatgttttctattccttggtcttgccttcagcccttcacacaggagatccttgatgatatcagcaacatgatgtattttgtgaatctttggtaaattggtgagcctctgctcttgttgccctcagagattctggtcccattttattcggttctggtaggcttcaggatggtttgtttttcttgtgatcagtgtctaaactgttaatcggttggtaaatttgtaactgctctagaatagaggttacatagtagcatttgagcttgactaagttatttgtggggtgcgaggttccatgtaattatgtaaatgttctactgagctgctcagagtcttatcctactactgtttttgaatctctctgtgcg

SEQ ID NO: 18943 - DNA, 926 bp, Zea Mays
gataatgagattatgggcagaagtgatcaggacgacttgactgctgcccagattttttacccttgcatgcaatgtgctgatatatttttcttaaaggctgacatatgccagttggggatggaccaaaggaaggtcaacgtgctagctagggagtactgcgatgacatcaaacggaagaacaaaccaattattctttcgcatcatatgctccctggttttaaagaaggccaggagaaaatgtcaaagagtgatccatcctcagctatctttatggaagatgatgaggcccaagttaatgtgaagataaagcaagccttttgccctcccaaaattgttgaggggaatccttgtttggagtatattaaatacattgttttcccttggtttggaagatttgaggtcatccgtaaggaaagcaatggtggtaacaagacatttacatgcatgaatgaactaatttctgattacgagactggtgctttgcatcctgccgatgtcaaacctgcactggcaaaagcaataaatgaaattttgcagcctgttcgtgatcatttcaacaacaacaacgaagccaaagttcttcttaacactgtcaagaagtacagagtaaccaattgaggagtggaagctgtccatctttagggcatgtttacattagggtggatatcgccgtttgaaattcttgtatgctattctgttactagttgcataggtagctcaaaagtttcatgtttctagatatataaaaagaatactttacttgttgactacttgatgtgcatcatagggctcaacctaaacagtgttgcactgtaagtattcgataaaagataaacaaagccaatatccaggagagacatgagatggcatgtagatttaaaaatgtcttttggccatgtccaatggagctaaatagcaagcgttgg

SEQ ID NO: 18944 - DNA, 1924 bp, Zea Mays
gtcctctccctcccctcaacctagcaccgccacttgcgcccaccacgccgccgcaccgccgctggtgaacgaatccgtccatcccgtacaccagccatgtcctgacacactgacacacacctggtggaggaggaggcgctacctccgtccgccggcggtgcaggggaggagccggccatcctcagggcggcgttgggctccggcaagctgcgcatcgaggggtcgctgagcttcaagcgggcgcagaccgcactgcaggtggagaccgagatctccatccggaccgctgccatgcccgcgccgggaccgggacccctacccaggggaacccccgagaggaacacacaacaacgtctcaccagtcagccaccaccgtgctccatttcctttctctctctcggctcctccgctctcttgcccgagtcgctagcttccctgccccgcctcctcccatccccgtggacagacaaccccccacctccgcttccatagcatccgagctaaggtcaactcctccatcggcggagcgagagcggggaagagacgggagggtcccgaatccgagccgagctgcgctccccgcgcgaccgacactcaggtcttgtcgtcccatgcagatctgctcttcctcctgaggccatccatgaatccgtggcacacaggaagttaagattaatctagacatgataatctacaggcttatgagggcttacataagttcatcttctctacggaaatctgcattgagggctcttgcaaaggcactgacgacagatcaactcttcaacctaagagagcagtttacattattcggtccaaacaagagtggccatatatcattgcaaaatatgaagacggccttgatgaaaaattcctcgggtgcaatgaatgattctaggattcttgactttgttaactcaatatgcaatatccaatatggcatgattgattttgaagagttctctgctacggccattagtgtatatcaaatggaaggcctggagacctgggaagaacatgctcaacaagcatatgaattgtttgacaaggagggcaaccgaccaattgtgattgaagaacttgcatcggaacttggacttggcccttcgatctcatttcatgttgttctcaaagattggatcagacattcagatggacacccaggaagttgagttgccccttgaccaggaggaatccacctaccgtctggacgaaaaacgatcccatccatggggcagcgccaggtgtaccgaatctttggcacagcgatcagggatctatttcgcaaatgaacggaaagatagcacaattctttttctttttgtgctagtgccagtattgtggaacgaatttataaggttggaaaggggttgctgaaggacgagaatgctcagaagcttgcgttgcagcactggctggaagcggccgcacttgaagaaatcttatatcagtttgaggaaaaactccaagctgaaagagaggaagctgctaggaagcaggaagagttgcaagcacaactacaagctcaacaggccgcacttgaagaaaaccaaagtttgctgcgccaggcccaagaggaagtgaaggggatgcataccaagtttgaagagaccaatgcactgctacgagctgtcctgaaacttcagaaagattgaggtagggatgcataccaagtctggggatgatgcctttgcttaaggtttttctaccttgctagaacatatctgtggttagaactttgtcagaactacgtgcaatctgtttgaatgcttcaaacctttgtggtggaacctttgtatgtttgaacctctgttgtggaagaactagtgtgctggaattgtgtatgacttgtgatgagaatgttgtgtatgatggcttttctgtgtattatgattctgtgagctgtcatgagagctcagtgtgt

SEQ ID NO: 18945 - DNA, 1977 bp, Zea Mays
gcacccgaaatccacacctcacaaaccacgcagcggaggcgacccacaaaaaacacgcgcggcaggaggaaggcgaggaagcatccccttgtgcgcgcccccctcatcctctcaatcccacggattcgccggggtaatctcgccacggccgtgctttgacgccgaattcgtgctctgtaggttcaattgaccccaccaccgcccgctgctgcttcgtttctagctcgagagagtttagtgggttgcttgattccgaagctccgagctcgtgggattgaattgagcccccccaagatcagaattggagcagcgggttttggtttcctgcttggtgccgctgattggagtacgcttcttttgtggtggttgagaggctgctcggcttccgccgaccatgtccaatgtttcttgcaatggctgatgcacgagctgttcttataaagttagcagatcgtctgcacaacatgaatacgatagaagctttgcctttggttaaacaacaaaggtttgctaaagagactatggaaatatttgtgccattggccaaccgattaggaattgctagctggaaagaccacttggagaatatttgcttcaaacacttgaacccagaggagcacaaggagctttcctctaaacttctgatgtcttttgatgaagcacttcttacatctacgcttcataacttggataaaagccttagagatgaaggcatttcatatcacagtctttctggaaggcacaagagtttgtacagtatatactccaagatgataagaagaacttaacaatggacgatgtccatgacatccatggtctacggcttgtggttgaaacagaggaagattgttatcgagcacttgacatagtgcacaagctgtggccccgagttaccggaagatttaaagactatatttgtcatccgaagttgaatgggtatcggtcgctgcacactgtcatcatgtgtgagggtgtccatccatttgaaatccagatccgaacaaaggaaatgcacctacaggctgaatatggattcgcagcgcactggaggtacaaagaaggtggctgcaggcattcctttgtgctccaaatggtggaatgggcgaggtgggtgctcacatggcaatgcgagacattgagcaaagagcgtccctcgtctttgagcagttctgttggcataaggccaccatgcccttttcccctgcattcggaagattgctcctactcttacagccgacagtgcaactatgaaggccctatatttgtcatcatgcttgaacatgacaagatgtctgtccaagagctcccagccaactcgactgtagttgatctaatggagcgagtcggggccaacagtccgagatggagcccttgcagcttcccactgaaagaggagctgcgaccgagggttaaccacaagcccataagcgacccaaataggaagctcagcatgggcgacgtggtggagctgacgcctgcgctccctgacaagtcgctgtccgagtaccgggaggagatccagcgcatgtatgagcggggagggtttgcgctcgccaccacccctagaagctgacaccatcgtcgccatgttaacctgctgctgtacaatacacctgtaaatacgaactaatccttgcagcagagaaatcccagatgaacaaaccccccaactgaattggctaatggtgcggggtttgatccaggacgctgctgtgtgtaacgctttttacaagttgaaatgtggccaagttcctccgaagattcatgagaaacatgaagtacttgtgtccttgtacgcttttggtttggtttcaatgtttcatttggactggatcaagtccgacctcttccgcgctctaatcaggacgcgacaactgtgttgattgtggcttctcttccacaccatgtaaataagcaggaaaatatgaaccaacgttatcgtaccttctcgtccacatatatctaactaaatactcc

SEQ ID NO: 18946 - DNA, 2672 bp, Zea Mays
tgttttcttgtggttctcgcgtgctactgtgctgagaggggaccaggaagaatccgtcgtccggccggctcgctctctgccggccatgacgagcgccaataaggcgaagctccagctgcaggagagggtcccgctcccccgcacggcgtggaagctggccgacctcgccgtcctttccctgctcctggccctcctcgcccgccgtgcgtcctcgctggtgtcgtcgggcggcacggcggccgcgtgcacgtggtgctgggtcgccgcgctcatttgcgaggcgtggttcacggtggtctggctgctcaacatgaacgccaaatggaaccccgtccgcttcgtcacgcaccctgaacgcctcgccggatattgggcgggcgacgacgagctgctgccggcggtggacatgttcgtgacgacggcggacccgaagctggagccggcggtggtgacggtgaacacggtgctgtcgctgctggcgctggactaccccgcgggcaagctgtcgtgctacgtctccgacgacggctgctcggcggtgacatgctacgcgctgcgcgaggccgccgagttcgccaagctctgggtgccgttcaccaggaagcacggcgccaaggtcagggcccccttcgcgtacttctcctcctcctccggcggcggggcggcggagcgtggcggtggcggtggggccgccgacgccgacgccgagttcctgcgcgcttggacgtccatgaagaacgagtacgaggagctggtccgccggatcgagagcgccgaggagaagtctctagtccggcgcggcgacggcgcgttcgccgagttcgtgggtgctgaccgcgggaaccacccgaccataatcaaggtcctgtgggacaacgacagcagcaagagcgagagcgatgagcaggcggcaggggatggagtcccaagcctcatatacgtctcgagggagaagagccgcacgcagccccaccacttcaaggccggggccatgaacgtcctgacgagggtgtccgcggtgctgaccaacgcgccgatcatgctgaacgtggactgcgacatgttcgccaacaacccgcaggcggccctccacgccatgtgcctcctcctgggcttcgacgacgaggtccacagcggcttcgtccaggcgccgcagcggttctacggcggcctcgcggacgaccctttcgggaaccagatgcaggttatattcgagaaagttggacacggaattgccggactccaaggcatattttactgcgggacgggttgctttcaccgcaggaaagtcatgtacggcgtgccaccgggctccggcaccggcgccaccaaagattcaccgtcctacaaggagctacagaagaagtttggcagttcgaaagaactgatcgagtcggcgaggagcatcatcacgtcgaaagaagcgccagctgcggtggcagatctaacgagccgcgtcgaagtggcgaagcaagtctctgcctgcagctacgagacgggcacgagctggggtcaggaggttggctgggtgtacgggtccatgaccgaggacgtcctgacggggcagcgcatccacgccgccggctggaggtcggcgctcctgagcccggacccaccggcgttcctcggcggcgcgcccaccggcgggcccgccagcctcacccagtacaagagatgggcgacgggcctgctggagatcgtcctcagccgccacaacccgttcctcctctccgcgtccaagcgcctccgtttccggcagtgcctcgcctaccttgtcatcgacgtgtggcccgtcagggcgcccttcgagctctgctacgcgctgctcggaccctactgcctcatcgccaaccgctccttcctgccaaaggcatcggagcccggcttcgtcgttccgctggcgctgttcctggcctacaacgcgtacaacctgggcgagtacgtggactgccggctctcggcgcgcgcctggtggaacaaccagcggatgcagcggatcacgtcgtcctccgcatggctgctcgcgttcctcaccgtggtcctcaagacggtgggcctctcggagacggtgttcgaggtgacacgcaaggagcagcagcagcagcagggctcgcccgacggcgacggcgccgacgccgacccggggcggttcaccttcgactcgtcgccggtgttcgtcccgccggcggcgctcgcgatgctgagcgtcgtcgccgtcgccgtcggagcgtggagggcggtcaccggtggcggcggcggcccgggcgtcggggagttcgtgtgctgcgcctggcttctgctctgcttctggccgttcgtgaggggcctcgtcggcggcaggggaagctacggcatcccctggagcgtcaggatcaaggctgccctgctcgtggccgcgttcgtgcacctgtccacacgcaagtaacttgcccggccccggcgtcgactcaccactgctactgctgcggaaggttttcatgtcagagacccgtaataatgcagacaacagcatgttccgcctaagatttgtacacaactctctgcttccactgcttgtatagaattcttgctcaagattacaagtcgaggccagtggtcggcgatagaaacagcgagtattattttatcctactcccaccagttcctgagcgtcgattctgggccgcgtctga

SEQ ID NO: 18947 - DNA, 3185 bp, Zea Mays
aaaggaaagagaaccaattgaaggtcctgtacctcacctagacacccggctgtgcatgttgttgtctatcacaacacttgcgattgctgacataattatggaagcagattcactttgcaatgaaacagaactcaacagtcatgtgaatgagaagaaagcaattggtaatctacgcaatgaattgatgctaagcttacagatacttggtgattatgaaagcttgctggttcctccttcatgtgtcatcccagcagctaatcaagctgctactaaagctgcaatgttcatttctggaatcagtataaacaatggctacatggataatgtcaatgggatgaactatactggaaatatgcgacatttgattgtggagtcatgtatctcaaggcagttgctggatacatcagcttactattggcctggttatatcatgaatcatgccaactctacatctcatacactccctagtcaacttgctggttggtcatccttcatgaagggtgcaccactgactcaaccactggttaatatgttggtatcaactcctgcttccagcttggcagaggtcgacaagttatttgaagttgcagttgatgggtcagatgacgacagcatttcagctgccactgttttatgtggagccacccttttacgaggttggaattttcaggagcatacagttcggttagttgttaaactgctctcaccatctgatccaattgataattctggaagagagagccaattgataaagcttggtccaatgctcaatgttattctttcaggaatatcggccgtggactatgctccaatcttctcgttccatggcctgattccagagctggctgcttctcttatggcaatctgtgaagtatttgggtgtctttctccaagtgtttcctggacactgagaactggagaggaaatatctgctcacacagtcttctcgaatgcatttattcttctgttgagactttggaagtttaaccatccaccacttgagtattgcataatgggagatggtgctccagttggctcgcagctaactcctgagtatcttctgctgttacggaattcccaggtcctatcttccagcagtttgtcaaaacaacgaaacggacaaaggcaatcacaagtatcaacttcacacccatcatctggaaatcctatttttatggactcgtttccaaagttgaagttatggtaccagcagcaccaagcttgtctggcctcaactctctctggacttgctcatgggacacctgtacgtaacaatgtggatagccttcttaatcagatgttcagaaaagctaataaaggaggcacatcaataggttctttatctggaagtagcagcataagtaattcttccagtcctggtggggatgattcacatctttggcctcagttgccagcttgggagatactggaggctgttccttttgtggttgatgctgctcttactgcttgttcccatggaagactatttccacgtgaactggccacaggcctgaaggatctggctgatttcctccctgcatctcttgctacaatagtaagctacttttccgctgaggtgacgcggggtgtctggaagcctgcatccatgaatggatcagattggcctagcccctctgtgaacctatccatggttgatgagcacatcaagaaaatcgtagctgctaccggtgttgatgttccaaagctagttacaggaggaagctcttcaggtacacttccgttaccattggctgctttcgtgagcctcacaatcacatacaagcttgacaaggcatcagagtgtttcctcaaccttgctggtccagctctagagaacctggctgcaagctgcccttggccaagcatggcaatcgttgcagcactgtggacccagaaggtgaagcgatggagcgatttcctaatattttcagcttcgcgcactgtgttccaccacaacaacgatgcagtcgtccagctcctccgaagttgcttcgccgctacccttggcatgtcttcgacatcagtatgcagctgtggaggtgtcgccagccttctgggccacgggtactgccctggtggtttctcgccagttgcgccaggaatcctctacctccggatattccggtgcatcaaggactgctccatactcgccgaggacatactctcccttctgatgctctcagtgaaggatatcgcagaaacaactgtgcccagacaaaggccagacaagctaaagaagaccaagtacgggatgaggcatggccaggtatctctttccgctgcaatgacgcaggtgaaggtggcggcatctctgggggcgacactcgtctggctatccggcggcacggctctcgtccagtccctgatccaggagatgctgccgtcttggttcctgtccgcgcagaacctggatcagggcggggctagcggaggcgtggtgtacaagctaggcgggcacgcgttggcctacttcgcggtgtactcggggatgttggcctggggcatcgaccagacgcccgtgtcccggcgccgcgagagggtcatgcggtcgcacctggggttcctggcgagcgcgctggccgggaagatcttcctcggctgcgacctctccctgtggcgagcctacgtctctgggttcctaggactggtggttgaatgcaccccgtgctgggtgcaggaggtggacctgagggtgctcaagcgcctgagcagcggcctccggcactggggcgaggatgagctcgcggtggcgctcctccgccgcgccggtcccgaggctatgggcacagccgcggagatgatcttgggcagggagttgtgacgccgatgcgcgcgcgcgccgcgcggcgtatgctgttcgtcagcgatgatgcagtttttgtatataatcggttaaaatctggccatgtgtatgctcacgggtaatatttgaatgattttatctgtaaaactgttaagacgttttgatctctctaatactaaccttcatctacccgtttgcaaaaaaaagaaatgatgtaccagaatgtaaaacctaggtttatgaacggacatgtttggcacagttctcatgcagcttccactgagttgattaaagttagaccatgttccaaagctatagagttaattgtcagccagctcataagagcaacttcaatagagaccctaaactcataaacaatttc

SEQ ID NO: 18948 - DNA, 5346 bp, Zea Mays
cgcctctccacgtgctcctcgcctcgccgccgcggccacagccgagaggccgagaccaaaaccccaaacgcgggatgacagcctgaccggagcgcgctataaaacgcctctcgtccaaaaccccctcggttcgaccccctttccgcccgcctgcttgtcgagttgctccaccccggcccccgcgcacgcgcctcccgtgccgccccggcgccgccgcgtccgagcagcagatttttgcgtgggggattcctgttcttccccatcaattgcttgctgcgccagtatcccagcactaattgccttcagctgggtgacatggtgaaaactccgagatctcctgttaccacaggaacaagaagatgcagagcaaagccacaaaagaaggaagaggaatccacagaaaacaacaagctggagaatggatctctggatgcaacagaagaggtgcatcatggagtcgaaaaaggtgatggacatgttacccgcaagagaccaaggagatcagcggcctgttctgatttcaaagagaaatccatacgcttatccgaaaaaaaatctgttgtcatggtcaagaagaatcggatggaggaggaagaagtagatgctgtcaatctgacaaaacttggaccagaagatccaccaccttgccggaagttgatcgattttatcttgcatgatgcagaagggaacccacaaccctttgaaatgtcagaaattgatgacttctttataacagctcttatcatgcccatggatgatgatctagaaaaagagcgtgaaagaggagtacgctgtgaaggatttgggcgaattgaggactggaatatttctggttatgatgaaggtactcctgtaatctgggtgtcaactgatgttgctgactatgaatgtgtgaaaccatcaaccaattacaaatcttattttgaccacttctatgagaaggctcaggtgtgtgttgaagttttcaaaaagcttgcaaaatcagttggtgggaatcctaaccagggcctggatgaattgcttgctagtgttgttcggtcaaccaatgccatgaaaggatatagtggaaccatgagcaaagatttggtgatatccattggagaatttgtatacaatcaacttgttggtttggatgagacatcaaacaatgatgatgaaaagtttgctaccctgccagttcttctttctctaagagaccagtgcagatctagggtggaactgaccaagttgccctctaacttctcgaacacaagtctgaaaattaaggactcagagtgtgatgagacagcagaagacgatgatgatgcaaaattagctagattacttcaacaagaagaagaatggaaaatgatgaagaaacagaggggtaggcgtggaacaccatcccagaaaaatgtctacataaaaatcagtgaagctgagattgccaatgactatccccttcctgcatactataagccatttagccaggaaatggatgaatacatatttgatagtgatgacagcatattttctgatgatgtgccagttaggatactcaataactggacactgtacaatgcagattccaggcttatatctttggaattgatccctatgaaatcaggggcagaaaatgatgtggttatctttggatctggtttcatgagagatgatgatggcagttgctgttctacagctgagtctgtgaaatcttcgtcttcctccagcaaagctgaccaactggatgcaggaatccctatttatttgagcccaatcaaagaatggattatagagtttggtggctcaatgatttgtataaccattcggactgatgtggcctggtacaagctacgccaaccaacaaaacaatatgctccatggtgtgagcctgtactgaaaacagcaaggcttgctgttagcatcattaccctgttgaaagagcagagtcgtgcctcaaagctttcttttgctgatgtcataagaaaagtagctgaatttgacaaaggaaaccctgcatttatatcttcaaacatcacacttgttgagagatatattgtggtgcatggacagataatactccagcagtttgcagattttccagatgagactatccgtcggagtgcatttgtcagtggtcttttattgaagatggaacagaggaggcatacaaagttagttatgaagaaaaaaactcaagtgatgaggggagagaatctgaatccaagtgcagcaatgggtccagcatcgaggaaaaaagcaatgcgtgcaacaacaaccaggctcatcaacagaatctggagtgattactatgcacatcatttccctgaagattccaaggagggagatggaaatgaaacaaaagaaattgatgatgaacaagaagaaaatgaagatgaggatgctgaagatgaagggcagattgaagagaacatctcaaagactcctccatcaacacggtcccggaagttgctatcacaaacttgtaaggaaatcagatgggaaggtgaaacatctgggaaaacattgtctggagaaactctatataaatgtgcttatgttagggaactcagaatacctgttggtggaacagtggctctagaagatgattcaggagacacagtcatttgttttgttgagtacatgttccagaaagttgatggttcaaaaatggttcatgggaggattctgcaaaaaggttcacagacaattcttggcaatgcggcaaatgagagggaggttttcttaactaatgactgcttagaattcaaattagatgacatcaaggaattggtaatggttgatatccaatcaaggccttggggtcacaagtacagaaaagagaattctgaagctgataaagttgagcaggtcaaagcagaagagagaaagaaaaagggccagcccatggtatatttctgcaaaagcttgtactggcctgagaagggtgccttctttgccctctcccgagataaaatgggtcttggtagtggtttatgtagttcttgtgataatatagagccagattctgatgaattgaaaatattctcgaagaccagctttgtctacagaaaggttacatataatgtcaatgagtttttatacataagacctgatttttttgctgaagatgaggatcgtgcaaccttcaaggctggccgaaatgtgggtctaaagccctatgcagtttgtcaaatattgtccatccctgaaggggctggatctaaaaaactcaatccagcatcagcaaatatcagtgctagaagattttacagaccagatgacatttcatcagccaaagcctatgcatctgacatcagagaggtctactatagtgaggatgtaattgatgtgcctgtggatatgatagagggaaaatgtgaggttagaaagaagaacgatcttgcaagttcagaccttccagtgatgtttgaacatgtatttttctgtgaacttatatatgaccgtgccagtggagctctcaagcagttgcctccaaatgttaggtttatgtctatggtgcaaaggacaagtgcgttgaaaaagaacaaaggaaagcagatctgtgagcctgatcaaatagattcaggtaaatggttggatgtgcctaaagagaaccgtctagctactcttgacatttttgctggctgtggaggtttatcagaagggctgcagcaagctggtgtatcttttacaaaatgggcgattgaatacgaagagcctgctggtgaagcatttaataaaaatcatccagaggctgtggtctttgtagataactgcaatgtgattctaaaggcaattatggataaatgtggggatactgatgattgtgtttcaacttctgaagctgctgaacaagcagcaaaacttccagaagtgaacattaataatcttccagtccctggcgaagttgaattcataaatggtggtcctccgtgtcagggattctctgggatgaatagattcaaccaaagcccatggagtaaagttcagtgtgagatgattctagcattcctctcattcgctgagtatttccgtcccagattctttctgttagaaaatgttcggaactttgtttccttcaacaaagggcagaccttccgtttggcagttgcatctcttctggagatgggataccaggtccggtttggaattctagaagcaggggcttttggtgttgcccagtccaggaaaagggcgtttatttgggctgctgcacctggagagatgcttcctgattggccagagccgatgcatgtgtttgctagccctgagctgaagataacactgcctgatggccaatactatgcagctgcaagaagcactgctggtggagcgcctttccgagcgattactgttagagatacaattggggatctgcctaaagtgggaaatggtgccagcaaactcacgcttgagtatggaggtgagcccgtgtcttggttccagaagaagataagagggaatatgatggtactgaatgatcacatatctaaggagatgaatgagctgaacctaataaggtgccaacacattccgaaacggccgggttgtgattggcatgacctaccggacgagaaggttaagctgtcaaatgggcagatggctgacctgataccttggtgcctgcccaacacagccaagaggcacaatcagtggaaaggactgtacgggaggctggactgggaaggcaacttccccacatccgtcactgatccccagccaatgggcaaggtcggcatgtgcttccaccctgatcaagacaggatcatcacagtccgggaatgtgctcggtcacagggctttcctgacagctatgaatttgcgggcaacatccagaacaagcaccggcagattggcaatgccgtgcccccgcctcttgcctatgcacttgggaggaagctgaaggaagccgttgacaagcgtcaggaagccagcgcaggcgtgcctgcaccatgagaagttttccttccatcaaaccatgacccatgaagctaagcgctgaggtcgtccttgaggaccagttaattttggttttatcagtcttaatgcactcctgaatgtatatgttagagaagtgtcgattgctgattgttaccctgattcagggtagcggttatatctaaaaacttgagaaaatctagtgtactctagttgtcatgtgttccattttgttggctctaaactttcaactagttttggtgattaatgacaacatgagattaaattaaattttgtagaggcatttaaattaggccactaatagtgactatttagtcgctcaatttttttgcccctaattatggaatttgttttttaaaggatgaacaacaagattaaatggattagttcaagtgtcgattgggg

SEQ ID NO: 18949 - DNA, 2025 bp, Zea Mays
gttcaacagtcaccgtcatccaccctccgtcttccccccacccgtccgtcaccagtcaccacctcactccacgtctcctcggtccctcccgcgctgctcactgcccaccgacactctcctgcgctgcgccgccatggaccgcgacccttccgtctccgacgaggacgacgacctcgagaccctcgtaccacagaaccacgccaagcccccgtccccctccgcccgctcccgctcgccgccctcctccttcagcgtcgccgcgctccgtccgacgcttccgtccctccgccgcctccctccggcgcgtcctctggtcccgccgctacctcgtgctcttcgtttccctcccgcttctcttcctaatcctcttcttctcctacgggggtgcgtcctccctccgcctgcccgcctccatccgcctcccctccgccgcacccgccgccgaccccgcggcctcccgcatgcgcgaggccgagctgcacgcgctctacctcctccgctcccagcgctccggtctcctcagcctcttcaaccgcaccgcagcccccaccaacggctccgcccccgcccccatctcgctctccgatctccagtccgcgctcgagagccagatcaagatcaaccgcgagattcaagcggcgctcctctcctcgcaccgctcagggtccggcaatgcgaccgaggacggcctggatctcgatctccctttctccggctgcaggaagagggaattgccggccagccggcggaccattgagtggaaccccaagaaagaccggttcctcctagtcatctgcatctccgggcaaatgtccaaccacttgatttgcttggagaagcacatgttcatggcagcgcttcttggacgtaccctggtggtgcccagccagaaggcagattaccagtatgatcgggtgcttgatatcaaccacattaatgactgcattgggaggaaggttgtgatcacctatgaggagtttgtggagaagaggaagaaagtggccatcgatcagttcatatgctatgcagcctcgcctccatgtttccttgatgaggaacatattaagaagctgaaaggacttgggatttctctgagcaagattgaggcagcttggccagaggatgcaaagctgaaggagccaaagaagagatctgttggggatattgcaccaaagttttcgacagaggctgaggtccttgccattggcgacatgttttatgctgacatggaggatgagtggctgaatcaacctggtggtccattggctcacaagtgcaaggcattgattcaaccaagtaggctcatagtgctcactgctcaacgtttcgtccagactttcttgggaggaaactatattgccttgcattttcgacggcatggattcctgaaattctgtaatgtgaagaaagagagctgcttcttccccatcccccaggctgcagaatgcattctgcgaatcgttgagaaggccaatgcacctgtgatatatttatctactgatgctgctgagagcgaaacaaatcttctgcagtccttggttgtgttcaacgacaggcaagtccctctcgtgaagaggccagagcaccacagctccgagaaatgggatgccttgctaaacagaaaccgcatgggtggagatggtcaggttgacgcgatgcttgacaagacgatctgtgcgctatcaaacgtattcataggatcgtcagggtccaccttcacggaggacatcttccggctgcggaggggctggggatcggcgtcgcactgtgacgagtacctctgccagggcgagctgcctaacttcatagcagagctagattgagaaggcaacttcccaggaggatcgatagctgcaattttctcccattcgtgtccatatgtcctgtaaaaaaaatggtggtgtgtacatctagtgtgatttgtggtggtgctggtgtgtgtgtgtgttggggggcggggggaaggtctctgtatcggggatgtccattgatttgttcggtgttattcttgcacaggtaccttcg

SEQ ID NO: 18950 - DNA, 673 bp, Zea Mays
cagagtgccacctgccacggacacggagggagggaggtgtgccatcagcgcgcagcatcctccagccgatagcctctcactgcctcacttcagcctcggacctgaacagacctcaggaaaggggagacctggaacgaccgtcgagctagagcggctgcgcgctgcgccgagagctggggagtggggactggggaccgaattgaaggcaagaaagtagaaacgaaccaccacaggcggcgcggcaatggatgagcgcggggagaaggaggaggagcacggagtagtggaggaggagacggcggcggttgtgctcaaggaggtggaggtggagatggagatggtcggcggctctgaagaagcctcggcggcgccgctcctcctcgcgcacccgtgctcgctgctgcagctcctgctccgcgcctgcgccggctgcctggtgcgcctgctgcacggccactgcagcgacggcgccaacgacgacccaaaagctgctgccgacgacgacgacgctgcgcctgaagctgctgctgctgcggcggcggcggcgggcgatggcggcgacaaggcagccacctacttgtacatgcaggaggtgtgggcagtgaggaggaggccgacgacgcccggccgtccgagagaaggttccggtggcaatggaggcagccacaactag

SEQ ID NO: 18951 - DNA, 2889 bp, Zea Mays
ccagtcctttacctttttccctcggagctctctgactctctgagattttttttttgtcttcatttcaaattttgtggtttcctcccacattcccttcccccgctcccctccaggctccagccgctcgcttcgattcgcttcagctctgccttcccgtctcatggccacctaccagcccacgcccggtgacgccttcccagcccgctgctgactgcaccgattcacccacagttggccttcaggcaaccctagcgtcgccgatccgccgctccggcgagatgccggtgggccacatcgccgtctctcccgccgccgtctatggagaacagggatagcttcactcgccccccagcgccctcctacgcccacggaacccaaaccgctaagggcgtcgcggtccctaccggcggggacacggccgccaccaacctgacgtcgtcgtcagggttgtcctcgtctctcacgctctcccctccccacttcctgcaacagattcatgcagctgtcaagcggcagaggcctttcggtccaatgcagtctaaacttccaagagcaacacgggtcctggtttccggaggtgagcgtgcaaataaaattggtgccaacccttctgtttcgaaagaccaggaacgaattgttacgcagcctcagagaggcatgttgggaccctctatgctgccaaatgtgacgcctgatcaacagaaagtcgatagcacttctaaattagggtcctctgccccagatgagttgatgttgacagcaccctcaatgctaaaaagtaccactgatacctgtgcacaacgtgttggccagcagaaaaacaaggctaatctgttgatggatacagagaagtcagctttcgatgctttgtcatctcaaattacatcatgcaatgcattgatgggggaaagtttcaagaaaggacagcttgattcggttgttaatccacagttgacgtcacaaagagataattttcctgcaaatcaaggagctcagaatgatcaccagaagaaccatcaggagcttcaaactgttgatatagcagctgatatggatatcgaatatgatgcgtctaatttgtctcggagagggatccaagaggctcgtaatcagaatcatggaaagcatatgattcctttctctgccattggttcatctgtgactgctatgtctcttcactcgggacctactgtccaaagttcacagactccacaggttggcggatacacttcaccagtgcagataccagaatctgctgtagaatcctccaagggtgcactgggccatggtgctcaaaaggagcatgctggtgcaactggtgttggtgactggaatccccacaaccagcaggttcaaaatctaggtaatggtgccacggacaaagctgtttctagcattggcagattgcgttctgaaggattacctgcaaatgatcagtctacatctgccagggatggtggtggttcccgaccaaacaagggtgagaaggagcgccgtaaaaagaattatgatcctaatgttttctttaaggtgaacgggaaactttatcagaaacttggtaaaataggatctgggggtagcagtgaagtacataaagttatatcatcagattgcataatatatgccttgaaaaagatcaagcttagaggtcgtgattaccctactgcatatggtttctgtcaagaaattgagtacttaaataagttgaaaggaaggagcaatatcatacaaatgattgattatgaggtcactgataaaagtctacttctagaaagtaccgtgtcacccagggatgggagaattaaggatgatcactacatttacatggttctggaatatggtgaaattgacttggctaacatggttgctcagaagtggaaggagaggaacaactctactatgaaaattgatgaaaattggctgcgcttttattggcagcaaatacttgaagctgtcagtacaatacacgaggaacgaattgtccactctgatttgaagcctgcaaactttatgcttgtgaggggctcacttaaactaattgactttggcatcgccaaggctataatgaatggtacaacaaacattcaacgtgatgctcaggtagggactctcaactacatgtcacctgaagcgttcatgtgcaatgatacagactcggatggtaacattattaagtgcgggctcccctcagatatctggtctcttggctgtattctttaccagatggtgtatggcaagacaccatttgcagactacaagactttctgggacaaatataaaggagtgactgataggaaccacaagatcatgtatgaaccagttgacaacccatggctcattgatttgatgcaaaggtgtctcgcctgggaccgaaatgaacgatggagaacacctcagcttcttaagcacccttttctcaatcctccagttccaagggatttacctccctctgacgatgatccatataggttgctcattgagaggatcagagtccactgggataacccaatggttcaaaaacttcgtagtttaattgaagaactcgatggggatcagtaaaaatgggtttttaacaatcctgattgatactcgatctagggcctgggtagtggtggcacaagtgttttagtttctgtattgttcctgattgatagggtactgttgtaatttgtaattagagagtggcggcatcggttggagacgtcggagcatattatgatgccctggcatttttgcttcctcgtgtttggaggttgatgtgacactttgtcagaaatggcggctagttaacgttaagagtcaagatatttttgttgtctgatcagtggaagcatctccaggtgtaaatagttgaaccaattggtagtttgtgttttaccatgaatcaag

SEQ ID NO: 18952 - DNA, 875 bp, Zea Mays
attcgtcccacaacagcagcatccaagaacccacccatggcttcaatcaacacagacctcggtgcaatcttcgttgcttccttctacttctgtggctcccttgccttcttccctcctggtcctggtcaccaccacgagggagcccaccaccctccaatcggaagtgctccaatcccaggtctttctacagactactacaggttgacatgcccgcaagctgacgagactgtggcgcccatactgaagaaggctatcgcaaaggaaccacgggtagctgcctcccttctcaggctcctcttccatgactgctttgtccagggctgcgatgcgtcggttcttttggatgacgctgaggaagtcgtgagcgagaaaaacgctatccccaacaaggattccattagggggtttgaggtcatagacgagatcaaagctgcactcgaggaagcatgtccgcagacagtgtcctgtgctgacactgtcgccctggcagccagaggttcgacagtgctgagtggtggaccgtactgggagcttccattaggaaggaaaactccgacagcaaacatgaagctagcaaacaagaaacaaaactccaccaaacgcaacactgcaccgtctcatcaagttcttccgaaggcaagggctggacaaggtggaccttgtggcactatcaggaagccacaccattggaagtgccagatgcgtgagtttcaagcaacggctctacaaccagcacagagataacagaccggacagcacgctagagacgagtttctaccacacgttggcgtcggcgtgcccatttttccggtggcgacggcgagatactgccactggatctcgtcagcccttcgcgatttgacaacagctttttt

SEQ ID NO: 18953 - DNA, 504 bp, Zea Mays
gataagagaaggtcaggcacaaacacgcggggacgaagcacacaacaaacctgcagatcccccatggcaggctccacctccctcgttccccttcccgtccccgcccctccatctcgccaccgcttccacacgtccacgtccgcatccccccgccacctgcgcccctcccctgctacacgcctccgcgctgcccggcgtcggcatcccgacgccgtcgttgtcgtcccagatgcccgcccctgggtcggcgatctatcgggcgccgccgcgtcctaccgggacggaagtgaggaggacgaagacgacgcagatgaagatgaggacgaagacgaggaccgcagcctggacctactggcccggttcctgcactccgtattcaggaaggcctcacgccgcgcgcgccgcgctgccaggtgaagttttcggtcaatggcgtgcttgtcctgacgttcttatggatcctgaagggtcttctcgagatttcattcctccatttcagtaaag

SEQ ID NO: 18954 - DNA, 2712 bp, Zea Mays
gcgtcagttccaccagaaacagaaaggcaaattcggcttcgcttttacgcccgcttgatttgcctcttccaccctcttccaccagaaggcgggcggccgagcgaccaaaagtcaaaaggaggattggcccacggccacggccgagagcggcaggcgggcagggtgagtaccgagatatgtaccaaaagtcgatcgacgacccagctggtttctggtcagaaatcgcagatgagttctactggaagcagaagtggagccctgataatgtttgcgctgagaaccttgacgtgaccaaggggccgatcatgattgaatggtttaaggggggaaagaccaacatatgctacaatgcagtggaccgcaatgtggaggcagggaatggggacaagatcgccatgtactgggaggggaatgagcccagtcaggatgggaagctcacctactctgaactgctggaaaaggtttgccagctgtcaaattacttgaaaagcgtcggcgtacgaaaaggtgatgccgtggtgatctacctaccaatgttgatggagctgccgattgcaatgcttgcttgtgcccgcattggtgctgttcactcggttgtgtttgctggcttctcagcagatgcactggcccaacgagtcattgattgcaagcctaaggttgttattacctgcaatgctgtgaaaagggggatgaaaatcatccatctcaaagatatagtagatgcatctctggatcaaagtgcaaagaatggagttgatgtaggcatttgcttgacatatgaaaatcagtccgctctgaataaagtagacactcgatggaaaacaggaagagatgtctggtggcaggatgttgtgcctgatttcccaactaaatgcgatgtggaatgggttgatgcagaggatccactgtttcttttgtacacaagtggcagcacaggaaagccaaagggtgtgttgcatacaactgggggatatatggtctactctgctacaacatttaagcatgcatttgactacaaaccaacagacatatactggtgcactgcagattgtggctggattactggacatagttatgtgacatatggtccactattgaatggagccacagttcttgttttcgaaggggccccaaattaccctgatcctggccgctgttgggacattgttgataaatatggagtgacaatattttatacagcaccaacacttatacgctcacttatgcgtgatggtactgagtatgttgctcggtactctcgcaagtctctccgagtacttggaagtgtgggtgagccaatcaaccccaccgcatggaggtggttgtatgatgttattggtgactcacgatgccccatatcagatacttggtggcagactgaaaccgggggattcatgatcactcctttacctggtgcttggcctcaaaagccaggatcagcaacgtttcctttcttcggtgtgcagtcattgttgacgagaaaggtcgggaaatggaaggagaatgcagtggatatctttgcataaagaaatcatggcctggggctttccggactctgtatggagataaagagagatatgagacgacatacttcaaaccatttgctggatattatttctcgggcgatggctgcagcagggataaagatggctaccactggctgactggaagagttgatgatgttatcaatgttagtggacaccggattgggacagcggaagttgagtctgctctggtttcacatccaaaatgtgctgaggctgctgttgttggtattgatcatgaggttaaaggccagggaatatatgcttttgtgactttggtggatggtgttccctacagcgatgatctacggaaaagcctcgttacgacggtccgcagtcagattggtgcgtttgctgctcctgacaagatccattgggcacctgggctccctaagacacgaagtgggaagatcatgcgaagaatcttaagaaaaatcgcatccaggcaactagatgagctcggcgacacgagcacgcttgctgaccctggtgttgtggaccagctgattgcactcagtgacagctaatctatcggctatgtgggagggggtgagacatgatcactgcctgcactatacttatgcaaaattcagctttatgatgcgaggtctgttgggcccagcgttctcttaattgcttcggtgtcatggggatgccaacaaaagagagatgctgcgaacttggggagatgcggacatatgcggggtgcgtctgtaaattgttggatcgcagtcactgatagttattgtacattggtaaataaggagatgaagtgtatatgcgagttttggctaaaatgtttaatgatagatctcgcattttatggttacgtacaggattcagccatggacattgaaggacaacgtgtttactacacctctttgttcgctgttcaaagcatgagcaccatcttagaaacattggaatttagggatctacatgagaattgagctgcttcggtcgaatttctgcggaggcagctgggatgtgtcccaaactagacacggtcggtaccaatactccttgaaccaatggggcacgggaatttggcagagttccgctcccaacttcggagcggattctacgtatctctaccaaacacgatacaattgtattttggtaggtgataaatcgcttcttcatttatactattgagttctgacttctg

SEQ ID NO: 18955 - DNA, 1924 bp, Zea Mays
aggccgcgcgcgtccccgatgccgtctcctccagcgagagggggcaggtcagggtgtaccaggagaagatcgccaagtggcaggcccaggtcgaggagcggctcagagtgcttggtcagagaagcggtgaaggggccactgctgcagaagtgcccaagaaggttgctgcaaacaatcctatcattaggactgcaaaaacagcgtcaaatagcatccaaagatctcccttgcaaaatagccctaccttcaacaggggtggccaagcatctacacatcagaagatagggagcggagcttccagaccagttcagaaggctggtggaaactatgatgacaagcttgttgaaatgattaatacaacaattgtggacagaagcccttctgttaaatgggatgacgttgctggtcttgacaaagcaaagcaagcactcatggaaatggttattttgccttctaaacgaagggatttgttcaccggacttcggagacctgctaggggtttgcttctctttggcccacctgggaatggaaaaacaatgcttgccaaagctgttgcatcagaatctgaagcaacattttttaatgtttcggcttcttcattgacatcaaagtgggtaggagaagctgaaaaacttgtcaggacacttttcatggttgcaattgatagacaaccatctgttatttttatggacgagattgatagtgtcatgtctacaaggttagctaatgagaatgactctagcaggcgtctgaaatctgaatttcttatccagtttgatggggtgtcctcaaacccagatgatctagtaattgttataggggctactaataaacctcaagaattggatgatgctgttcttcgaaggctggtaaaaagaatatatgtgccactacctgatccaaatgtacgaaggttacttctgaaaaatcagctcaaaggacaatcattcaaactgtcgaaccatgattttgaaagacttgctgtggagaccgaagtgacctgagagccttgtgtgaagaagctgcaatgatgccaataagagagctcggtccacaaaatattcttactatcaaagcaaatcagctgcgacctttgaggtacgaggacttcaagaacgcgatgacggtgatcaggccaagcttgcagaagagcaaatgggacgagctggagaactggaacgaggaattcggttcgagctgacggagacgcgcgctgcctgatgatgatgatcaagcggccctatttccagatgtacatgatttatgtctcacacacacatggtggcttacacacacacacgcgcccatcggccatcgatgcgtcctcagtctggacagcgcgtcttcaacagaagcagaaggtacaatataatgctgggaacagccctatatgtatacccattgaaatgccgctgcccaagttatttaaaaaaacaaacctctagtgtgtgttattattagcctatagctgctctgggccgccgagggcgaaatcgaagtatcgtcgggcgtgttcggcaggctgcaagccgacactgttgcagctgtttggactgctgcagctgcaatccatagagagaaaaatactgtagaagccgcagccgcagccggattgcagccgcagcaagccgcagcgaacaagccggtcgttgtgtaaaaagaaacacaaaacctacatgcttaatgactcgtatatgtgttattattagcccatagctgctctgggccgccgagggcgaaatcgaagtatcgtcgttgtgtaaaaagaaacacaaaacctacatgcttaatgactcgtatatgtgttattattagcccatagctgctctgggccgccgagggcgaaatcgaagtatcgtcgttgtgtaaaaagacaaacacaaaacctacatgcttaatgactcgtatatattttaacaaacag

SEQ ID NO: 18956 - DNA, 2290 bp, Zea Mays
aaagaatttttttccctctgcacctcctccccgtcctcgagatcgttctcgcctccctccgctccccttcccctcgtgcgcagtgcgctcctcgagcaccccacactccagatctccgaacccctcccacatgccattgccattgcactgagcggcagccaatagccaactagccacacgccatggcgcagtcctgtagttggggaatcctcctcgccgtcctcgtcgcgggactcgcggcggccgtcgccgtcccgccggcgaccgcggcggtggcgagcatcgacctcggctcggagtggcttaaggtcgcggctgtgcatcttgccccgggccgtgctccgatcgctgttgccaccaacgagatgtccaagcgcaagtccccggccctcgccgcgctcgccgacggcaaccgtctcattggggaggaggcggcgggcatcacggcgcggcacccgtccaaagtattcgcccgcgcgcgggacctcttggccaagcccttctcctacgtgcagtccgtcacggagtcgctcttcctcccctacgacctcgtccccgacgcgcgcggcgccgccgcggtccgcgccgatgacgggcaggtatactccctcgaggagatcgtcgccatggtgctccactatgccgcggggctcgccgatgcgcacgttggggcgcccgtgcgggacgctgtgatcgccgtgccgccctacttcgggcaggccgagcgccgggcgttgacgcaggccacgcagctggctggaatcaacgtgcttgctctcatcaacgagcacgctggggccgcgcttcagtacgggattgacaaggacttctccaatgcgtcgcggcatgtcatcttttacgacatgggcgctggtagcacctatgctgcattagtgtgctactcggcatacaacgccaaggagttcggaaagacagtctccgttaaccagttccaggttaaggacgttagatggaactctgaacttggaggcgtcgaaatggaaatgcgtctggtcaactattttgctgatcaattcaataagcagctcggtaatgtggttgatatccgtcagtctcccaaggcaatggctaagttgaaaaagcaagtcaaacgcaccaaagaaattcttagtgcaaacactgcagctccaatttcagtagaatctctgtataatgatgttgatttcaggagtagcataacacgtgagaaatttgaagagctctgtgaggatttatgggagcaagctctgactccagttaaagaagtgctgacacattctggcatgaagatcgatgatatctatgctgtagaactaataggaggagctaccagggttccaaaactgcaggctaaactgcaggaatttctgggtcggcgcgggctggataaacatcttgatgctgatgaagcaattgttcttggagcttcacttcatgctgctaacctgagtgacgggattaagttgaaccgtaagttgggaatgattgatggctccacttatgctttggtacttgagatagatggtccgggttatttcaaggatgaaagcattgatcaaattttggtgccaagaatgaagaaaatgccaataaagatgtttagatccatcagacataccaaggattttgatgtgtctctcaactatgacaaagcttatgaactgcctccaggcattccatcacacaagtttgcagagtattctgtatcgggactgacagatgccagtgaaaacactcccattgatgagggcaatgttcaagaaattattgcagagaatgtgctaaagaaaagaacatttagggttccattgaaggttgtggaaaaaacaactggtgctggaacaattctttcaaaggagttgtattctgaagcaaaaaataggttagaggcactcgataagaaggatgctgagcggaggaaaactgctgaacttaagaataacctagagtcatacatatattctatgaaggagaagttggaagaaagcacaggtattttgactgtctcaactgaacaggagagggaatcctttgcgcagaaacttagtgaggtgcaggattggttgtacatggacggtgaagatgctcaagctaatgaattcaaagagcgccttggtcaacttaaggccattggtgatccgattcttttcagattgagtgaattaaaagcccgaccagctgcctgtgaaaatgctcgattgtatcttgatgagctgcaaaagatttggcggagtattccccagaggacgtgggtagccgtctgtgccaatcaagaacccctggatgaaga

SEQ ID NO: 18957 - DNA, 12475 bp, Zea Mays
gcatcagcactgcaggggtctactgaggcactccaagtggggaaatggcggaggcgacgaattcgagcttgggcacgtaggcgtcgctcctgccatcgccgcagcggtcactggactctcacgccgccgccgccgccgccggagaccattagttctcctgcgcggcggctccgcggctcccgccctctcccttaccttcttcccgctagggttttctccgatccccaatcactctggttcacaaatggcttcatctcagcatgttgagatggaggctgcgaaacttctacataaacttatccaggagtcgaaggatgagcctgctaaactagcaacaaaactttacgtgatatgtcagcatatgaaactaagtggaaaggagcaatcactgccatatcaagtcatatcaagggctatggagacagttgtgaaccaacatggaattgatatggatgcattgcgatcatcacgaattccatttgctggtggtcctcaggcaggggattctagtggtgtcatgtcaaaggacaaggaggtcattggtaaccagtctcccatggtcggaagtgatgcttcccaaagtagtggacaagctggattatggcagcttccatcaggttcaaccgatatgataagacatggggcatctatttcaggtagggtacccacagggccaaataggggagatttctcagcagctgatattcatcaaggctccatgtcacaaaaaagcggtagatcctctggcattgaaagccctgcaagtctgcagatggaggacaccagatctatgaattcacatgattctttgaaatccgatgagaaaacaagtaagaaaacctcttccaagagaaaaaggatggattcaaaaggagctggtgatttgcgttcagaagacaactcaaagtcagatgttatctccactggacagaataccaggaaggggaaacaggttggtaaggctggtagacaaggtcagccttccatgggaattgagcatgagcagcaacctcataaactgcaaggtggtactggtcaggtaccacctatacatggtggtgcaccttttctcaggactcgctcagaaggtccttctgggaggacaatggacaagactaaaccatcaaatccattctcaatgggtcaaattccaaattttcctgaagggctggcttctactggtgctccaatcgagttgcagaaaagtatacagggtggagcaagtttatttaatcctggttttggctggaaccaaaatccacaagttcaaaccttgaagaattctcaaggttctattcataatttagtgaggtctggagttactgttgaagggaaagttaatgtaggggcacaaggagcttttaactctgcctctgcaccacagatggaatttcccacagttcctccatacaacccctcttccttcggagctagctcacagtttctggacaaaggcaaggagttggtttccagcattataagcactgaacctcattcatctaaagttgcatctcagcctgggatttctcatggaagtcccatgcaagaaaggcaaggtatgatcagggtgccacagagaggcgaggcatcatttcaggaacgcaggccatcttcacttccgagtagaagtactgggccaagtccaatgtctcacatttcttccaacacaccatttaaagaacagcagctgaagcagctcagagcacagtgcttagtatttcttgcatttaggaataatttgcagcccaggaaggtacatcttgaaattgctttgggcagagggcctcctgcagaaagtgacagtgcaggtcaaaggggcagcgagggcagagtgtctgatgctctgggaaaggaaaatggtagcagtcgggagaactctggtgtcttttgtaggcaaactgatatctctagacttccagccacatctgcaggaagtattgcagaggatgattccttatcgaaggatccagaaaatgctacaaaaaaaatcaagttagctgaacaggagaagtcattgatggaagtagaaaatgtccagcaagcttctgttatgcaaggaactagttctgaaatgcgttcccaagaaactgcatctcaaaatccatatcgaccacaacagtcatattatcaaggagatacaagaagaatcgcctcggatatccataggactgatgctgaaattttgaaccagaatttaagttggggaggccagggatctactgctttgggtggtactagacagcttctgaatcaggaaactaaagaatcacttgcaccttcaaagtcacaccatatgcctgttgatggttacaactccaatatacaaggaatagatcggactccagagatagctggagctggtaatgatgttgaaaattgtagccacgtagcagatattgtgcctgagcaggctgctgatgaaggagatgaggacctctcagagcatgaggatttattgtcatctccaaagcacacaatgacggaaaaatggatcttagattaccagaagagaatttacaatgagaaacaaaagagaacattggagcagcataaggtacacagcagaatgtcagcaacatatgaggagctaaaggagagcgttaattcatccgaagatctttctgcaaagaccaagagcgtcattgaattgaaaaagcttcagcttctgccacttcaacgtcgtgtacgcagtgaatttttgctggattttttcaagcctaatacatccgacttagagcgcataaaatcactgaagaaacataggcatgggcggcgggtgaaacagcttgaaaaaattgaacagaaaatgaaggaagaaaggcaaaagagaattcgtgagagacagaaggaattctttgctgatattgaagcttacagagagaaactcgaggataacttcaaggttaagagagagcgcttgaaggggttcaatcgatacataaaagaatttcacaaaaggaaagaaagaattcatcgggagaaactggataggatccaacgcgagaaaatcaacctgcttaagaacaatgatgttgaaggttatcttagaatggtcaaggatgcaaaatctgatcgtgtcaagcaactattgcgtgaaactgagaaatatcttcagaaacttgggaacaaattacagagtgcaaagtccacagatggccgctcatcttttgttactgataagagtgacactgcaaacgacattgaagatgagagctaccagccacagcattatctggaaagtaatgaaaagtactatcaactggcacacagtgtaaaggaaactgtaaatgatcagccatcttatcttcagggcggcaaattgcgagagtaccaaatgaatggcttgcgttggctggtttcattgtacaataataatttgaatggtattttagcagatgagatgggccttggtaaaacagtacaagtaatctctttgatatgctaccttatggaaacaaaaaatgaccgtgggccttttctcgtggttgtaccatcatctgttcttcctggatgggaatctgaactcagcttctgggcacctagtataaataaaattgcttatgctggtcctcctgaagaaaggcgcaggatgttcaaagagatgattgttcatcagaagttcaatgttcttctgacaacatatgagtacttgatgaacaagcatgataggccaaaactaagcaaaatacaatggcactatataataatcgatgaagggcatcgtattaaaaatgcttcttgtaaacttaatgctgatttgaagctttatcggagctctcatcggatattattgacaggaacacctcttcagaataatctcgaggagctgtgggcacttctaaattttttgttgcccaatatttttaattcgtcagaggacttctctcagtggtttaacaaaccatttgaaagtaatggtgataattcacctgatgaggccttactttcagaggaggagaacttgttgatcataaatcgtcttcaccaggttcttcggccctttgtactcagaagacttaagcataaggtcgaaaatgagcttcctgaaaaaattgaaagacttgtaagatgtgaggcatctgcttatcagaaacttctcatgacaagggtggaagaaaatcttggtggaattggagccgttaaggttcgctccgttcacaactctgtcatggaattgaggaacatatgcaaccatccatacttgagccagcttcatgttgaagagattgagggctacctacctaaacattacctaccatctattttgaggctctgcggaaaacttgagatgttggacagattgctgcctaaactcaaagctacgggccatagggttctacttttttctacaatgacaagattgcttgatgtaatggaggattacttggtttggaaaaagtataaatatcttcgattggatgggcacacttctggccatgaaagaggagctcttatcgataaatttaacgatcctaattctcaagcattcatttttcttcttagtatacgagctggaggtgttggggtcaatctccaagctgccgatacagttatcatatttgatactgattggaatcctcaggttgatctgcaagcacaggctagggcccacaggattggtcaaaagaaggaggttcttgttttacgtttagaaacggtccgaactgttgaagagcaagtcagggcttcagcagaacacaaattaggtgttgctaatcagagtataactgctggtttttttgacaataacacaagtgctgaagatcgaagagagtatcttgaatcactcctacgtgagtctaaaaaggaagaagcagctccagtgttagatgatgatgctctgaatgacattctagctcggagcgaagctgagattgacatattcgaatctattgacaagcaaaggagagaagaagaaatggcagcttggcaaaaggtggttcaggatggttcaactagtgggctagaccctggagtattgccttctcgtcttgtaactgatgatgatctgaagcccttctgccatgctatgaaactttatgagccatcaaatgtgaaaacagtaaatgtgaatgtgaggaagaagggtgaacttgggggccttgatacacagcactatggaaggggtaaacgagcccgtgaggttcgctcttatgaagaccaatggactgaagaagaatttgaaaaactttgtcaagctgattctcctgaatcatcccaacctggtggcatgtcgaaggatttggatattcttaataaaggcattaagactgaaattcttgtggagagttcaaaagaaccagaacaaacgaagatggaggcatccccaactgtcggtgactctccaccagccaaacggcggagaggtagacctaaaaggtcagatgtttttgtatctcctactgctggtctgactgatgctgtcaaacaagacacaggaaccacacaggacggtagttctgctacaccagcaagtaccatccactctgatgcaccagctactgcaatcaattcagctgtttcagatgttaatatacattctattccaccagctgataccaagaaacaagagttcagtactgataccaaggtttccagttctgtttctgttttggaaggatctgtgccgaatgaaattggtacaccattacagagtgttcataatgtagcagtttctgcaccaccgcatcaatcagctaggggcaggaaatgccaagcaggagaaacacctcgtaggcgaggccgaaaaccaaaatctctatcttcatctggtgtagatgatgttagtcttaacccaaccttttcaactgttagtggtgtagcagacactagttatgttccttcatattctcaggtctcatcacaaggcactgctgtggcactggcaggaatccagaaggattttgtgacagttaagttggatacattgttaccagatagtggtaagggtgctcctcctgttaatgagggagataaaggtgctactgttacaacacctgtggcaaaagatatatgtgctgggactgtgacaacatcagacaacactgtcaccctgacaccaaatactcttaaggaaaacattggattagttcaagtggcatctgcaccttctatgctcgtggcttctgaagaactaatgaaaatagcacatgttgcggtggccgataagcctgttgagaagcaaactgcttcacgtcgccgcagaaagaaaacatctagtagcgaggatactggagtcagcactagacaaagatcagctatgaaaagatcttactacaacacctctgttgccgttgatgatattggttctgctgtgatcccaaatgaaaaatcaggaataacgaaggaaagagatgtcagttcaattcaaagtacatccaatgaactaccaaatattaactcaccattgtatgagaagtctggatatgattctcaaccaagcacacctatagctgtccccatcaatgaagacactcttcctagtggttttgacacctgtactaattctatgataactcttgccacatctgccaactctgctgaagatgataaaccagttgatttgcaccttaatgcacctgtttctgttgattcccaaaaccaagaacaacacatgacagggaaggaccatttggcagtgtgttctagaatctttgctactcagttacagacggacactgcaaatcctgctattgatcataaaccaggaactgcccagtttgaaccatctgcttccttgccccagaattcaggcaaggatgctactgcactaccttctgaggttgacagtgctgctccaaatagggcatcaagcaggaggaggaaagggtcaactcgagaaccacgcaccagaagtaattctgcatcagctgcaagtgaacgtcgtgcccgacttactggattgaagcaggcagaggacataaagaagttagagatgtcagcaacgccgaccacaacagtgtgtatttcatcggtagagcaacagggagctgcttctttaagtgcgaagattaccaatgcttctgtttctgaaggacagaagaatcctggaaattatatgccttctgccatttcaattcccgtggggagccatgttctgggcctgggcgcaacaagtattgaagaaacaactgccactatgataactcaggctcctgcagtttcaaaatcagaacgaagaaaacttccaggaggcagtcaacaaggtattcagtttgagagttcagcatcaaaaacaaagatggtatcagctgtggaaccagcacctgcaaatgttgaatgcatgcaaggtactgaagttaatagttcagaacagacaatagtttctgctactgaaccagcacctgcaaatgatgaacacatgcaagagcaaccaacaaatatcgtttcatctgtggaatcagaaccttcaaatgatgaagagcacacaaagcatgaagtgtttcttgcgactactggtgataatatgcttgcttctagtgcaggaactgaaatattgcgggatacagttgagcatgctgcttgccagccagaagcagtatgcacagatggaactgcaaggcagtctgaattgtcgcaacttgatagaaaagcctttcatgatgcctcatataaatacactcatgggtccactaaagatgatggtatcttgcccagtgaaggtacttctgttgatgttactggttctaagcaggatgatgtgaacattgttggcacacaaactgatgatgtttctcggggttctagtcattttccagttattttacaatcaactgagtcagatcggcctccaggtcaagtgaagaatttggagagtaggatggagcaggtgaaaacagaagaagctttggttaacagttctggtggcaatcaaactcacagtctgggcgatgaaccttctcataatacatcattagcaagaaattctccctcagaacactcgaatgagcgttgctctgatcaagtaattggtgaaaatttcaaaagtaaagaaaatattgttgaagtccattctggcattaatactgatggccccgatgaagctctgaatgcattgcacacccaatctaaggaggccagcatgacagatattggtgtacctactgatggtgatagatgtgaaggtaaagggactagtgtcgaggtctgtgctgacatgaatactgatgggcctgtggctacccaggatgcttcgtccacgaaatctgataaagagtcctgcatgatggaatgtggtgtgtctaccgatggctgtcccacagtttgcaaaacacacaatgatctccagggtcatgtatcttgtgaagaaacctttgttaggactggtggtgatgacacaacccatatcaccaatgcaaattatggttctaataatgaaagtgaggccaccattgctagtcctgttgaaaccacacaaaaactgatggaagggagcactgttattgtgtcggagaattctgatttaaataagcaatgccacacattgcatactagaaatgatcctcctgcaaataccctgttgatagttgagtctaacaaagttacttgtgatgctgaaattgtttgtgctagcaggttagaatcttctggcattgaggctgaaacagtgggtatccaagagtcagctcttactgattttgagggaacaaaaggaactggggatttgggtgacagaactaacagtcaactgcatgatgatgttcatgggacatcatgttccacgatagctcttgtatctgagaaagaaccttccgaagatcttaccaccggtagccattcagaagcatctaatttacttgctgctgtagaacaaactcaagaaactactgttgagaaccaagagatcatagatgcagtagtgtttatggatgcctgcaaggcagaacctgttggtgattttactattgctaaaggagctgaacagactgtagaaatggttcattatgttgataagcaatctgctgtattagactatgttgagacacagacaaaacgaacttcggtttgtggttctacgctaaatgaatcccctcaggctgcagggttggaagaagactgctctgtactgaagcatggtgatcctacttcatctgagcttcttactgtagcacctaatccaatcggtgaaacttctgttattcaagtggaaccagaggcaagaaactcagatggatactgcacaacagaggctggcagtgctttatctgaaactgtcatgggattggagccaaataaagaaactgcggttccaatgcaagagaatattggagaagctaatgataattttaataattgcgaagcacacaataattcggagattcatgcatttgaagtgtcgatggaaacgcagtcatcagaagtcaaggaagtatcttctattcagtctggtgcagcaaatttgagcacacagacaactgcactgcctgatgtaacaggacaaaccagtatggcatcgactggagaactagtatctacaaatgaacacatacacatgcaaggcactgaaatcaattcagagcaacaaacaaagatggtttcacctgctgaatcagcacctgctaatgatgaacacgtgcaagacattgtgattcttagttcagaacagcaaacaaagatggttttagctgcagagattgacgcattatgcgtccaggagactgcaattattgatcttgggggagcaagaggaacagttgacctgaatgacataagaacacaggttcctgcattacctggaagggatgtgctagatgtggaggcacatattttggagcaaaaaaaaacatcttcaccaggtgatgaaattaagggttcagaacaagcaaaaatcgaatcgattgcagagatcgaaacagtgggcgtcaaggagaatgtcattgctgatcataaggaaacaggtaacaacagtggcgtaagtatacatgcgcctctattagttgaatctggacaaaaggcatcacctggagttgaattgcgtggtattgaggttgatgctcatgttttggaacaagcaaagatggtttcagctctagaaccagactctactccagaagtttgtgctgacaagttagaaccttctggtgctgatgatgttggaatgattgttgtccaggaggctgcttctgttgatgatcacaatagagcacaaggtggtgaggctcattgttcagaacaaataaagatggcttcaattgcacaagcggtgtctagcatggctttagtaggatattcttcttcagaagactcaatggtggatgctgctgcccgagtaactgatgctgattttgtggatagtaaagcagctggtgtttatcgccaagaaactatgcctactcaaaccacctctaccctcccagagaacatggattctcctgcaactgctgctaccatggttgaatcgaagtttgctgcctcgtctgagcacgttgcaggacccgagccaattgatgaaacttctgttatgcaagtggaactggcaacaagcacaggggatggatgtgcagcagatggtcacaatcttgtttcatctgaaactgttgttgaagtgaagcttgctcaagaaattgttgttcctagtccaggtggtagcatagaagctaataatacttctaccatcagcgaagtatacaaagatacccagtctcgtgcatctggtgaagcatgcaatgatggtcagtctcatggtgatgaaaatatgaaacttggtgaagcttacactgaactgcagctggcaccttcctctggtgaggaggccatgacatgtatgtgtagtgagctgcccagccaggaggtggaggctccaagcagtgaccctttggagaataatgaagaaacgaaaaatgaagctgctgctcaaggatcagtaaatgaggattctgctcctcgtgctgaaaatgcaaagattgatgaagctgacacagaacaggaactgcttccatctggtgaggccacggtagacgaatccagcgagctactcagccaagacgaaaaggtggctcgtaaagatgcaaagatggaagagtctgctgctgctgctgctgcacagagacagctaactactgaagttgctcatgcaagtgaaaacgcgaaacttggtgaagatggcacggagctgcaactgccaccaccttcaatggtagacatatctagggagcaactcagccaggaagtggaggttgcaagctctgggccttcaggaactgatgaaactgctgagatgaaacggctaaacactgaacattcacctggtgatgaaacttcaaaacttgttggaactgatctaggactgcaattgtcaccttctggtgatgccatggtagatatatctaataagccacccagctgccaagacgtaaaggaggccccgagcagtgacattttgggaaatgatgaaaattcagacaccgagaagactcctgctgccttgcatggacggctgaacaccgaacttgctcctagtggcagaaatacagaatttagtgaagctgacactggaaaacaagagacacccgtgtctgctgaggctatggtagaatcatcgagcgagcctcgcagccatgaggcaaaggaagctccaacccctgacctgtctggggatgatgaaaaagcgaagtcagcaagggctgctgttgttgcggaactttttggagatgcaacagaaggtggttcggatcagccattgccgtctcctagagaacaaggcaaggaagcagaggccgatggaggcttttagagtaaagttgcaaatattgtatcaagagatactagaatccgtgtaagtaagaactgctaatagtgcttttagttgtaactggtgtaagcttctactcagaatcaaaagcgacgtgctgagattacagcaacagtggcctacggcagtttactactgttttgtgcaatattgctgctgagttttgttgagacaggcaattgatctgtcatctgtctcgtcttgcatcgaagttggcagcaccatggtgaggtgctcccgccttaacctggaagcgctgacagagggaagaacaatactctctggtttcctaatgttttcctgttcactgttttgatttgatgctgcattgcagtagtgtgacttagtaacataatggtgcgtttggatagacggacataccgatccagaatcatctgaacctaaatattgagtacaagcttagattatctgtttggtctgctttatgtctgggtgcaatgctctctgatttctggacggagtggtaccgcaatccaaacagactttaatgtttgggtgcttcaggtcataatcaaccatctaatttactttgcaaatgaatgtttcaaactggactgctcaagcctaccaagtttaatggtccttcctagtattgaatccttttgagtctagcccgtttcctcatttgaattttcactgttagtgtgcctatacttgcctcacgtagaattttgaaagcttatggttgggtgcgttgtactcgac

SEQ ID NO: 18958 - DNA, 1501 bp, Zea Mays
ttttgagtgccgcaaaaagcttctactttcctgtgtcaatgtatgtcgtaagagcaaaggctggtaaaaggcaatctggaaaagatgctactggaaaagttgcacactcagcaggttcttctctacggcgctataatgaagcagcactgaaaaaggaagttcaagaattaattgtttcatggaagtcatactttgagacatgtgtttgtgccttcatttatgctccatctaggaaccgccagatgctcttcgacggggagaagactcagtcagtaattcagtcttgtgatgttcgtccagttccattgactgttcatcgccccaccatgaaggaagcgaaacgggtatattgtaacctaacacaactctactatgagatggaatgttcaaccacagatgaaacactacctgatgctggaagtgtgaaaaatgttgaacaaggtcaaggaaaaaagaatgaagtgactgcagaccctggggaatctatttctgacttgtctgcccgtttggaattgttgaataagaatgaagcagcaaccataccatcatcaaagaacgaaacaacacctcttcatgaggcagcaaagtgtggcaatgctcagctgaccctggagttacttgagcagggtttggatccttgcgtaaaagatgcaagaggaaagacatcttattcgctggcttcagataaggaagttaggaatacattcagaagatttatggcgctcaatcttgacaaatgggactggcatgctgcagatgtgcctagtgcactaacaaaagaaatggaagaatcacaagctgcaaaacaagcagacaaggacgccaaaaggaaagcacgtgcaaaggaattgaagaaattaaaaaaagaaagagaaaaggaagaaaaggagaaggagaaggagaaggctaaggctcaagcatcacaatcacaatctgatgttaaaggcacttcgagcggccaaatggccaacagaactgcaactgcgccaggccttgtaccaaagcatcagacgccacagcaaatacttatagcaaaggaggaggaacgacagagaaaacaagctgaagaaagagagaagagagcagctgcagcagagagaagacttgcggctctcgctgtccaatctgccggaacgagcgcatcaggtgcagcagcaacaaactgctccgcgaagagggcggcaccagatgacaattcgtgttcgtgctgtttcggttccttggtcggcaaggtgccattccaccgatacaactacaaatactgcagcactacatgtatgcatcttcattcagaaatgctgcaggatgattaaggaaaccgcatgatgcgtgattttgatgcaattttacctcatatacaatcaataacaggctttcttccttcccttgtgcctgctttccgtaattttgtcgtgcacatcttcataactttaaaggttcgaaatcacattcgttctggttcgtgctaatgtttttgcttcattttggaacacattttatt

SEQ ID NO: 18959 - DNA, 2950 bp, Zea Mays
atggctgagagcaagcggtttgatacgaagagcacaggttgtcttgaaggcctcttcaacttccttgccctcaaccaacggttgcaaatgccgaagacgattgcctatcgaaggcacagcgaaggaagtgacaatacactcattgcagaaggaaactagcagtgaccctcaaattgataaggccaacatgttcgtatggaggacactcatgttcaagagaaaaacactcgggaaagacaaaaagaagagcagctcaccggccagctccccatcctcatcacgtctgctgcgctccagatcaatccatcactcgaaatgctttgattatgaggttcctgatgagttagctgcacattatcatgcaatgaacaactcgggctccattgaaatgggttcttgtcacagtgaaccgacaccattgccacatgagtgtccacaacatcccactgtccaagagccttgcagggcttgtggcagcatggatggcaaaggtagcatagatatggaggcacccagtgagacagcacctgggaatctcactgatgagagtgaggctctcgctacacaaaaaactcgtgatgctgcaacacatccttcgaaggagttcttggattttcttgaattatttaatgcacatagggagctatttttgaagattcttcatgacccttcattactaggaacacctgaacaacaagggcaagaagcttcatccagtggttctgtaccattgaacaaattggaatcatttccaagaccaggagggtcatcagggaaacgtaaccctatatttgatcggagtgacagtgagaaaaacatgccagaaatccaaaggtcaccatcaagacctacctctgacccggaagctgcaaaggtcatcagtacaagaatgcctactggtgttgacagctccgcagtttctcttgcagaatcaaggagcctgaagaaagctggaacagcttcaaaccgttttaaagctatccgtagaaagataaaagatgtcgtaagggagaaccggaaagagcttgctcggattaccaaggatggggttttccacaaactgccatatggccaaaaaatgactgggttgaccaggagctcctccatggagaagtttgtccaggaggagaaacaaatccgaaggacatattctattgcagaatcagtagacaagtattcaacactttatgagtcaatctctagggactcaagaatttctctagaaagattaaacataacaatggaaggcggtgcaaacttaaatgataagaagacgccaacgagcctcaaaagaataacctctcttccagagatgcggttgtgttcatctcaactagaggtcctgcctgaagtttcagcttctcggattgggtccaagatttggaatgtggaatctgaccgcttttcttcacgtggaactgatgccttcagtatctgtgcggaaggaaattcctatcctgatgatgtcacggaaaaatcagaaaatattcacattgaattaaattgtggaggcttcttggaagaagatttccgcagcatccttcgaactccatcttctcttggccggtctttctcccaccgccgcattaatagtttaccttccttcgatcggtcattctttcaagaccgtactggtagtttcacggagtgttctatagcagattcagagccacagttcgaaaacttgcagcttgaggacgaggactggttagtcaagccaccactgtccgcaggagcatatgctgccaatttcaatgatgaagaatggctggtcacaccactgaagcgctcccgtgtcatgaatggtattgaccatgaggatgaagagtggttagttaaggcgacgaaactgtctggtgccaaggatgctgatcttgaagctgaagagtggttagtcaagtcagggcagcctaacgatgctttggattcggacttccgcttcatacacgaattttctgaacaaggtgctgcagaacccttgcacatctatgtcagtgacaagaacgaggctgatttccagtatgtcaaggacatcctcaagaaatcagggttcagctgcggcgatgtcgactggtacgcgtccaatcagccagtgagccctgtggtctttgacgaggcagaatgctcgtgtcaggaggtcagcatggcaagcgatgaacctcacagcatcgtcaggcgcatgctcctgtttgatctcatcaacgaggtcctgctggacatctatgactcctcactcgtcatcggcccatggcactcacgcttcgacctgcgaaccagacccattcccatggggtaccatgtccttgaggaggtgtgggcgaaggtgagctgctacctgagcctgcattggaaggaaggccagacggtggaggacattgtggcacatgaccttatgagaaaggacggctggatgaacctggtatatgacgcggagtgcaccgcgttggacatggaggatctgatggtggaggaccttcttgatgacgttgtcattcagatagtgttagaatccattgatgaatgactatccggagcctctttttttaaccagcggcttgagcttcgcagtaatctgttcataaggctgaacagtgaagtgatatccgaaggaatgtactagatagatggatcgcttgtctgtctcgcattgtgcaacagtaactgtgtagatcattttaaaagattggcgattctatgaattgtcaaatgtggcagatgttggccatgcatacaaagttggaaacagaaggtaaacaatagataagaaatagcgaaacagatagcattatatacctgttaaattcaaccaaactgtcgtgagtttttattagtcaatactggtatatctaggttgtgtctcccctacaaatcctggtgttttgtactctattcatgagtctgtggaaggcacaattctgagtgtgaaaaacactactctgttatatatgtg

SEQ ID NO: 18960 - DNA, 624 bp, Zea Mays
ccatgcccatgcccccaaccctagccgccactaccctgctccctctcccaagccgccgccactccttctccctccccctttctctctcttctctctctatcgcccacctctctccacctcctctccccaagccgcgccaccaggagttcgccccggaggaggcccagcccggaggcagtgcggcggcatggctggtggtggtggaggaccggggccgaggcgggtgaaggcggggagccgccgccgtgggtcaaggaggcgctcggctacaaccagcaggcgctcaccatgctcggcgtcggcaacgacatcggcgagaacgtcgccatgccttattgggtgacaattgaaaaagagaattgttcttttttatgggcgaagtgttgaagatggctttggtgaaggaaatgtcttgttagcatcaagtaagtggcgacatcacaacccctacaagcttgtgccttaaaacacgaggatacataagaagctggagtgcttttgtgaaggcttttgcgaatcacttgaagcgttaggacttttgtgaatgattttgtaaagtgtttgcaaatatgtgcaaaacataataacatatgtaggttttgtgaatgattttgttgtggtgct

SEQ ID NO: 18961 - DNA, 775 bp, Zea Mays
gcacgaagtgctgatatcaagtgcagaaagcttcagctggtggatttatggtagcatttgctggtaggaagtatgcagctagatcaatcccgatattcgtatccaacacctcagttacagtgtccagcttcaccctggtgctcgagttcaacaaaggcagacttgaaaacctgcactggaagaaggacggctgcggtgcctgctccggcaaatcaaacttcgtctgccttggcaaacagacatgcgccatccggacgcagagctgcaagagccaagggcctgtcgactgcagcgtcggcatccagctggctttctccggcacggacaagcacgagtcggttctgaactcgtggtacgaggtgtccaacctgaggcagtactccctctacgggctctactcaaacctcaagggcaccctgagcggccagttcaacaagatcttctaggctgttttggcgctgccattgtttattctcccccctgctccctcctcttctttctgtccgttgctccggttcctcatgctgtgcttgcttcacattcttttagttgccgcccgcccaggttgcttgtatccagacctgttttaacgctgtctgaactctaccgttgcccgttggtgtcattttagcgccctttttttggtcaccacttgagctttaactttagttttgtgatgagctgtctgccgtcctgctgatgactgttgtgtttggcccaaaggaagcgtcatattgccctgtctgctgcagagttgcttggtcctcgtgatacc

SEQ ID NO: 18962 - DNA, 812 bp, Zea Mays
gtattaatgatatacaaaagtttgctttatggcaagttagtgtagctatttccactgcaaactatcaaatcattacaaactgctgggaacatgctccatcttatcgaagcatgtatcttgagaaagttgatcgatacatctgcttatttatggcctggttatgttgtaccatctgggactttaaaagatacagctttgccccaagaatccccttggttaaactttatgaaagtgtctcgactttcaggaccccttattgatgctctggtcgcatctcctgcttcaagttcaagctctgcaaggtgaggtctgttcagtttggccagaaaggcatctcctacctgaacacctacgacggccgcacaatccgctaccccgacctgctcatcaaggccaacgacaccatcaagatcgatctagagaccaacaagatcatggacttcttcaagtttgacgtcagcaacgtgttcatggtaaccggcgggaggaacaccaggcgtgtaggagtgatcaagaactgggagaagcacaaggccagcttcgaggtcatcgacgtgctgcttggagctttttgcatgctatgtctagttttctcctatttgttgtacaagaaaacataaaatggaattcaaatttggtggtcgcaaaagtgtggagacttgaattcatataaagttaggcttaacattagtgcaaaaagttgtattttagtttagatttagagtacacttatgtatgccttgtttgacaatacttatttatgatatattgaatggtacctattgtaattgtctattattgtaggatattcg

SEQ ID NO: 18963 - DNA, 624 bp, Zea Mays
ccacaacaaaaaacagatattctatcgtcagcaatcctgcgttccctgcccgacggaggtgcttccctcgttgctgcgttgcactgcggcggcctcgagcttgttgtcgattccagctccatgcgcccatgatttactttacttgtaattgccaagaacctgatggagaaagctggccaaagatttcgcacgttcgttggaagagctttccaccaaaatcgatctggcttccttagagttgccactttgaaataaatgagaaggcaccttgacgtcacccctcttctcttgaagctccagagttgaggctcaagtcagaagccaatccgtcgttaatgctgccgtccccgcggttccctgtttttgccgcttgtattgctccgctatttcagttgctatatcattcattccttggttgtgcacaattgccaatatgtatttctctgacagaatgaagtaataactgtggccagggcttttgttttcatgtgcacaattgctatatcattcatgtggcaattagtataaatactccaggcaatgcaatagagaagatagttcattttcctgcacttgtgcttgtggatggtgtagcagagaagttcaccatggaaccagttccag

SEQ ID NO: 18964 - DNA, 1095 bp, Zea Mays
aaagccacctcctccagcgccccacccgccagaggcccgatcgtcccacactcccaccacgcgacaggaacacaaaaaccctagcacaagcccacacgacgccacccggccccggacggccggcccccccgtcccacgttcccaccgggctccgagcacaaaaccctaaccttctcgctattaaagtcggcgtccagtccgtcggctgctgctacgccaccgaatccgcatctcctcgccggtcgcgcacgggcaaagcagcgatggcagcagcgacggcagttggcggacacgacagggtggaggctgcggcgtcgtccgcgggggctgtgctggccgtcgccgttgcctcgcagaggttgataggcctgctcgctcttgcggttcaaactgtaaattgtgtagcagaaatatataatgaagaccagcaggaaatatacaagttattatatggaagaatcaaatctgaaaatgtccctgaaattaaggctgggtcagatgatgatgatgacgatgaagacgatgaagatgaagatgaagatgatgatgatgatgatgatgatgatgatgagggtggggggagtgatgatgacgacgatgataacgatggtgatgatgatggtaacgatgatgacgacgatgaagatgatgacgaagatgaagatgaagaggatgacgacgatgaggaagaacagccaccttccaagaagaagaagtgatttgctctttcatggattcacctcagcttctccatgctgttagttgtgttgtttagatcatggaacagctttgggacaaatgttgcttgtcatggtattatagtgtaggaaaccttgacatctgatgttaaatcgttatcctactttctcctctgcatgtagtcttaattgtgtgttttagatttttactttattggagctgtgattgtgtcatgccattcagttttattctgctgaggccagtgtcatgccattcaatttatttcttttactgaggcctgagcactcaggcctggattgtatgtgatgctatgtctgttactgagaaggttgagccaggccagaattgtatttgatgagttgcagattcttgagc

SEQ ID NO: 18965 - DNA, 651 bp, Zea Mays
ggattctgcaattatgctttcgagcaaaggttctgtacactatgggtggcttggaaaatcttcagacagctaagaagtactatgcatcaacaatccagttgactggaggcaagaatacaagagccctctttggtgtatgtctgttgaccaaaggaaggaataaagaggaagagggctcggagctgcagagattggctgcagaagtactgctgaataattacaagcagcaggctccatcaaaggcgccccttatcagcagcttgttgaagaacatgaaactcagctgataccaactagctctacacattcagaatgtcctgattcgatagatagttaagttaaattgatgtggcataatgcttgtttttttttgtggcactggcaccaacattgtgcaatggttaaaaagtaggtgctcccaaggccatgggttgtgtacactacacctgtttgcttgccgagaaatatgcatgacttctttttcattggatgttctattatagatcacaataaaccccggccattgtacttcagcacaaacaaaactttgaatcagtcgctggtgaagttgtacctgttgattttgattggtatctgactgttgtagccttgtagatgaatccctgactcggagcatttttttctttatcg

SEQ ID NO: 18966 - DNA, 4046 bp, Zea Mays
ggaaggtgcggagaggaagaggaagcgaagcagcagcagcaccaccactgcgcggcattgcagcgagcaagcgggagggatctggggcatggtggcggtcgctgccgctgccgctcggatctagagggccgcacgggctgattgccctccgccggcctcgtcggtgtcggtggagtgtgaatcggtgtgtgtaggaggagcgcggagatggcggccaacaaggggatggtggcaggctctcacaaccgcaacgagttcgtcatgatccgccacgacggcgacgcgcctgtcccggctaagcccacgaagagtgcgaatgggcaggtctgccagatttgtggcgacactgttggcgtttcagccactggtgatgtctttgttgcctgcaatgagtgtgccttccctgtctgccgcccttgctatgagtacgagcgcaaggaagggaaccaatgctgccctcagtgcaagactagatacaagagacagaaaggtagccctcgagttcatggtgatgatgaggaggaagatgttgatgacctggacaatgaattcaactataagcaaggcaatgggaagggcccagagtggcagcttcaaggagatgacgctgatctgtcttcatctgctcgccatgacccacaccatcggattccacgccttacaagtggacaacagatatctggagagatccctgatgcatcccctgaccgtcattctatccgcagtccaacatcgagctatgttgatccaagcgttccagggttgatgatgcacgcctacctttgagccgcattgtgccaatttcctcaaaccagctcaacctttaccggatagtaatcattctccgtcttatcatcctgtgcttcttcttccaatatcgtatcagtcatccagtgcgtaatgcttatggattgtggctagtatctgttatctgtgaggtctggtttgccttgtcctggcttctagatcagttcccaaaatggtatccaatcaaccgtgagacatatctcgacaggcttgcattgaggtatgatagagagggagagccatcacagctggctcccattgatgtctttgtcagtacagtggatccattgaaggaacctccactgatcacagccaacactgttttgtccattcttgctgtggattaccctgttgacaaagtgtcatgctatgtttctgatgatggctcagctatgctgacttttgagtctctctctgaaactgccgaatttgctagaaagtgggttcccttttgtaagaagcacaatattgaaccaagagctccagaattttactttgctcaaaaaatagattacctgaaggacaaaattcaaccttcatttgttaaggaaagacgagcaatgaagagagagtatgaagaattcaaaataagaatcaatgcccttgttgccaaagcacagaaagtgcctgaagaggggtggaccatggctgatggaactgcttggcctgggaataaccctagggaccatcctggcatgattcaggtgttcttggggcacagtggtgggcttgacactgatggaaatgaattaccacgtcttgtctatgtctctcgtgaaaagagaccaggctttcagcatcacaagaaggctggtgcaatgaatgcactgattcgtgtatctgctgtgctgacaaatggtgcctatcttctcaatgtggattgtgaccattacttcaatagcagcaaagctcttagagaagcaatgtgcttcatgatggatccagctctaggaaggaaaacttgttatgtacaatttccacaaagatttgatggcattgacttgcacgatcgatatgctaataggaacatagtcttctttgatatcaacatgaaaggtctagatggcattcagggtccagtctatgtgggaacaggatgctgtttcaataggcaggctttgtatggatatgatcctgttttgactgaagctgatctggaacctaacattgttgttaagagctgctgtggtagaaggaagagaaagaacaagagttatatggatagtcaaagccgtattatgaagagaacagaatcttcagctcccatctttaacatggaagacatcgaggagggtattgaaggttatgaggatgaaaggtcagtgcttatgtcccagaggaaattggagaaacgctttggtcagtctccaatcttcattgcatccacctttatgactcaaggtggcataccaccttcaacaaacccagcttctctactgaaggaagctatccatgttatcagctgtgggtacgaggacaaaactgaatggggaaaagagattggctggatctatggttcagttacagaggatattctgactgggtttaaaatgcatgcaagaggctggcaatcaatctactgcatgccaccacgaccttgtttcaagggttctgcaccaatcaatctttctgatcgtcttaatcaggtgctccgttgggctcttgggtcagtggaaattctgcttagcagacattgtcctatatggtatggctacaatgggcgattgaagcttttggagaggctggcttacattaacaccattgtttatccaatcacatctgttccgcttatcgcctattgtgtgcttcctgctatctgtcttcttaccaataaatttatcattcctgagattagtaattatgctggaatgttcttcattcttctttttgcctccattttcgcaactggtatattggagctcagatggagtggtgttggcattgaagattggtggagaaatgagcagttttgggttattggtggcacctctgcccatctcttcgcggtgttccagggtctgctgaaagtgttggctgggattgataccaacttcacagttacctcaaaggcatctgatgaggatggcgactttgctgagctatatgtgttcaagtggaccagtttgctcatccctccgaccactgttcttgtcattaacctggtcggaatggtggcaggaatttcgtatgccattaacagcggctaccaatcctggggtccgctctttggaaagctgttcttctcgatctgggtgatcctccatctctaccccttcctcaagggtctcatgggcaggcagaaccgcacgccaacaatcgtcatcgtttggtccatcctccttgcgtctatcttctccttgctgtgggtgaagatcgatcctttcatctccccgacacagaaagctgccgccttggggcaatgtggtgtgaactgctgatccagattgtgactcttatctgaagaggctcagccaaagatctgccccctcgtgtaaatacctgagggggctagatgggaattttttgttgtagatgaggatggatctgcatccaagttatgcctctgtttattagcttcttcggtgccggtgctgctgcagacaatcatggagcctttctaccttgcttgtagtgctggccagcagcgtaaattgtgaattctgcatttttttatacgtggtgtttattgttttagagtaaattatcatttgtttgaggtaactattcacacgaactatatggcaatgctgttatttatacgcaaagactgatacattcttcggattgtgagcaaacagtcagaacactgtaatctcttaggacaactatataaggcagctgttgtatcatctctattgtttctaatggccgagggatatgtagatgtaaatcacttgcaacatcgtattgttggcagtctgtaatgtttgaaaagcatggagggactgatgcggcgtggtctttcatgaattggggaatcagatggcagtccggtagaacttctgctaccgtattttctgatggcattacctttccagctccaccaactgttcgtgtcgtttttgttggatatttaacctagtttaggtatgtctgatttaagaaatctaaattatgtctatacatttgaggatttctagatattagtattgtgtaatggaccaattcttgggtcgtttatttttcggggcggggggccatcgattctaaatgtagaaccaagcaccctggctgttttt

SEQ ID NO: 18967 - DNA, 178 bp, Zea Mays
gaggtcaacagtacgaactaccacagtgaaaagagtcacaaggcaaaatgtttaatatctaatgaccttcttatgcagttccacaagatagttctcaaataaatcttcacgctcccttggacgctcaactgctttgaatctttcatcatcttcaaacataagtattgctttgctgcac

SEQ ID NO: 18968 - DNA, 1641 bp, Zea Mays
caagaactacgactacggtacggccgtccaccgctctaggactacgacaacaagtcctaaccctagccccggtagccgccaccgccaggctctacgactacggcccggccgtccaccgctcggccgtccaccggtccaccgctctacgcgacggctccatcgctcggctgctccaggctccagcgccctccaggctccagcagatcccggaagcaccgaccacggtccacggcgagtcggcgagcagacagcacaggcgcacaacagtgacggcgagcagacagcacaggcgcacagcctccgcgcatccgcggtccgcgtccggccgtgcagccgcgcagtatactggcttcctaaaggatcaatgtcggctatctctgatcagaagaaacgcaccttggaagcccttcagcaacagtatactgctgcaaaagctaagaaattgcaagatgaacaggttaagagtcagaagaagagcaattttaatacccctaagcctaaatgtgatgcaccaaggggaagcaaaggtccagaaatcactcctcgacgaacatatgcccaaccttctcataaaggtgtagcattttctagttctaattgtcaacaaaagccttccacgtcctcaggtgaagaaatcaatcctgtgtatgctgaactttcttgtgcttttcatgacactttgtccaaaggtgttgtctcggatttggatggcacagaggttgttcacaatgttatatatgacataattcagaaaggtggagatgctgggaaaattacaaagggtgccaaaaagttgaaactggaaaaagggatccttttggataattatgttcagaggggttctagattagtggattcccaagcaagatctttgttgattcattcaaagcgatcaaaaaggcacatgtctctaaaacaacataagaaatgtggttcatttgatttagatggtacattccacaagtacgacctctataagccaatgcatgagatgtggaaggactatatcagagagcttatggatctgagcccgaaaaagaaatttactgagaaccttctttcagcagatcttcatggggcccttctaatagtggcagaatgcaaagctgcttcatataaaggtgtaaacggcatcatgattcgggatactgcagagacgtttggaattatatccgaggacaaccgcttccgagttgtaccaaaagctggttcagtgttcgtacttcaagcagatcgctggaagttcacactgattggcgacaagctctcgcccagggagaagttgaaggaggatcagcgtcaacaacgtgcacaatcgctaatcagatagtttccaatgtgccagctgttctctcaaaatttttgctccacgaaatacttgcttttgtttagctgttttaccctttttagtttgcctctaacattgaaggtagataatgggtgtctgtttttgcaactattgattttattttacacagcaagatgtaactgcaacggccacgccgtcattgtttaactgtcattcatgctctccatgataaatatatagagttaataggaatgggaatgaggttgacctactaatttgtcactacagaatctgccttcagcggtccactaaaactttagtattgtacatat

SEQ ID NO: 18969 - DNA, 1942 bp, Zea Mays
aagaaattggtccagtagccctggaagaattgttctcctggattgaattcacaaaacaactgtttgttattttcttctcccgttcacttctctttggcccgaaaccgagagctagtgcttgattcggtcgtttttgggcaccgaacacgttcttgggaccgccgccgccgccctacttccagtcccagctgctcaggtctccatcggcctcgagccctttgccggcgacgagcactcacaacaccagggtgtaacaatgtcttcttcaatggaatcgtcataccttcctgctacaactgagtcattagcccaagctcaagaggctaaggatgcttcagagtccatttcaatcctttaccgtgtcattcaggacccatcttcttctgctgatgcactgagaacaaaagaagttgcaattacaaatcttacaaactacctcactaaagaaaacagagctgaggagctgcgtaatcttttgacccagctcagaccattttttgcagttattcctaaggcaaagactgcaaaaattgtccgtggaataattgatgctgtcgccaagatacctggaacatcagatcttcagatttcactctgcaaggaaatggtagaatggacccgtgcagagaagcgtactttcctccggcaacgtgtggaggcaaggttggcagctctcctgttagagaatcaggagtatactgaagcccttaccctgcttactagtcttatcaaggaagtcaggagacttgatgacaagttacttcttgtggacattgaccttttggaaagcaaacttcacttctccctgagaaatctgccaaaggccaaagcctccttaactgctgctagaacagcagcaaatgccatttatgttccacctgctcagcaaggcactattgatctccagagtggaatcctccatgctgaagaaaaggattacaagactgcttacagctacttctttgaagcatttgaagctttcagtgcactggaggacccgaaggccatctttagcctgaagtacatgctcttgtgtaagataatggttaaccaagctgacgatgttgcaggaataatctcgtctaaggctggcctaaaatatctgggtcctgatgttgatgctatgaaggctgttgctgatgcatactctaaaatatctgggtcctgatgttgatgctatgaaggctgttgctgatgcatactctaaaagatctctcaagtattttgaaactgcccttcgtgattataagtcccagctggaggaggaccctattgtccacaggcatctttcttctctgtatgatacactgctggagcagaatctctgcaggttgattgagccctactcaagggtggagattgcacatatagcggagatgattgaattgccgattgaccatgttgagaagaagctgtcgcagatgatccttgacaagaaatttgctgggacactagatcaaggtgctggctgcctcattatctttgaggattctaagaccgaggaaatcttccctgccactctcgaaaccatttcgaatgtcgggaaggttgtggacagcctttatgtgaggtcggccaagatcatggcttgaaagcagctagtcttacctgtttgctctgatttcatttccagtctgtcgatgtcctcagacatttattccttcaatattgacagtttattgtgaccgctacaggttcatgtgaccaaaggctagctatttttacgactgaatgagttatgcatgtattggtcttttaatatcagcgtgcagagtcggacggatgttattgtgtgttaattaatctaccatgttatcgaaatgcatgtctttagctccactgcggcttctgtctacagatggacaattagcacttatacgatgtgctgaattaggcacaacacaaaaaagcaccaggctaaccgtcatctcggcccgagcac

SEQ ID NO: 18970 - DNA, 148 bp, Zea Mays
aggataacactaggttagtgttgttaaatgacgaccacttgacgatcatcttcatcatggcactggatcaggtcctccatccttaggttcatccatcagcatcacctcgagatcaactcagctcttgttctccacactccgtgatcaa

SEQ ID NO: 18971 - DNA, 2553 bp, Zea Mays
aaaaaaattaaagagaaaaaccattctcggcttcctcatccgtcccatcgaaccgcaaaccctaacctttcgattgccgccgcggcccgggtggacgggggaggttcggcggcggcccgctgggcgacgagcggccagtccgtcacggcgtccgcgtcgaggagaacccgtacttcccattaccgcgtcgggcgtcgggctggggagtggcaccgccgtcgcggcacctgtgggtgggtggcctggcgcccagcgtcacggcgtccgacctgtcggagctgttcctccggtgcggcgacgtcgagggtgttgcccgcgaacccggccggaacttcgcgttcgtgagcttcctgcgggagggggacgctgtggccgcggtgcgggagctccagggggctcgcctggctggggcgcctgttaggatcgagttttccaagggggaaactggaatagagcttggccgtgtgtctaatattgagccttttagaacgcgggagctgggtcaagaaagaaggcttcctgaggagcatgagccccatagacaaagccctactgctaggagtgatgcaccatggaagccatggaacaacattccttttgacagaccttggagacccttaccattcgaagattcttgggacgttgaagacaagtcatatcttatttcaaagaagctgaagggtgctcaagtgcatgatactgaacttcctgaatatcttttctccggatttgatcgaggaaaagtttaccctgagtaccaaaggaggccccatcatgatctttcagaagatggtttacagtctagaacctcttcgtctacggatttgcatggtagacatcatgtgcatcctttaaagaatataactccacttacaaataaacatgaaccatggcgtgctcaagagagttttgataggcgtttagggaaaatggatagatctactcctgactataatgaacctgctcttaaggatgaatggaaatggaatggtacaatagcaaagggaggcacaccgatctgccgagctcgatgcttccctgttggaaaggtccttaacttcatgctgcctgagtttctggattgcactgctaggacaagtctagatatgctttctaagcactactatcaagctactggcagctgggtcgtattttttgtcccagaaaatgatgcggacatgacagcttataatgatttcatgagttatctaggtgataagcagcgtgcagcagtctgtaagcttggagagagcagcaccttgtttcttgttccaccttcagatttctcagagcaagtactgagagtgcctggaaatgtcagcatatctggagtcattctgaggtttcagcagtcaaatccagattacagctcaccaaatcgcaaaccattggatagagctcacccatcttctgcaagtaattttaacactgatgtaagaaattgtgaagatctgcatgcactgagaaggctcaatccttcagatatcagcacattccctcagggtccagattatgtctgctcatcaggtggaagctataccccagcaaatgcagattttattccgccctataagccagagagtgctcctccatatgtcgtccctcaatcaccgcaagaaaggccgccagcggagctccctatgggtattgcacaaggccaacaccagcaactcccaaacaggctgccctcaggatggtccaataacctggataatccaaatccaaatccaggttctggtaacttcagtttggcacagggtgcaatctctaacaggacacaggatccgtacacatttgctcctggagtagtatcaactgggacagcttcagggtatgcatcaggtgaagcatccaacagcatgtcctgggcttccatgcaatacaactcacagcaggtagctagatctgatcaacctactattccagtatcactgccacctgatcaacttgcacagctagctgcccttcttgcacgacaaaaccaacctagaaaagttggtttgcctgtggacagctcaaacaatctgtctggattcatacagagtcccaatcctcatggacatgctacaatgatgccaggcaactctggctccatccctatccagaactcactgccacctgttccatctatgcaacaattacatgccaatgtgccagtgtcaccaataggctcgctacctgcaaatccattcaatgtgccgaccagtgctcctgtactttgtaacagcacttcgcctatgctgcccagtcatgctttggtcaacccagctcattcttccatgccaatgagaccgttcattcctccacttcctgaaggtcctccaccctttcagcagcaaacatcaagtgctgtcacagtgcagcctttaggtccttctagccagcagtctagccaacaactactggctcaggaccttgatggagatcctcaaaagcgccttcaagcaacactgcaactggcagcaaccctgcttaagcagatacaaaatcaatcaaatcctggtggccagaaataaatataaggttttctgagtggatagctgattggaccag

SEQ ID NO: 18972 - DNA, 2576 bp, Zea Mays
ggcgcatccgctacgcgcacacgagctgtgcggtactgctcgctcatgcagccactgccacgctaccaccgcttcctttcctcttcggctgctccgcctcgcctcccagttcacagcccctcccaggctccgaatcggcggccacttctcattcctcacttccgtcctcgcgcaccaccccctccatccgttccggatggtgccttcgaaatcccgtccggcgccctagcgtagctcgggctcggccaggctccgggcccgccgcgccgttccgcagtccagctccacctccagatcttttcttgagtttaaggaagatgcttgcctttatttagaaggccctttttggtacgtcagcagtgttctttcctataggagtaaatgccattccgtagcatcgtgcgtgatgtaagggatggtttcgggagcttgtctaggaggggatttgaggtcaggtttctgagtcatcgcagagggaaatctcatggtgctgtccatgagctgcacgacccagtgcttgtggtacagagtagctgctgggctagcttgcctcctgaattacttcgagatgtgattgagaggttggagaccagtgaggatacatggccttctaggaaacatgtagttgcttgtgcagctgtctgcagaacatggagagagatgtgtagagagattgtcaagagcccagagttttctggaaaaatcacttttcctgtttccttgaagcagcctgggcctcgagatggaactattcagtgttttattaagagggatacatctacccaaatctacagtctgtaccttagttttagctctgccgtgcctgtcgaaaatggcaaattccttctatccgcaaaaaggaactgccgtgcaacatatacagaatatataatatcaataaattctggtgatacatctaggtgtacaagtaacaacacatacattgggaaattaaggtcaaatttccttggcacaaaatttgtaatatacgatactcatccgccatacaatggaactagtcaaacagtggcagggaaaacaagtcagagattctactccaagaagggatcaaccaaggtttcttgcaggtggtacagtattgcacaaatctcatacgagctgaatgtcttgggaactcgaggcccaaggcggatgaactgtgtaatgcactccatcccagcttcatgccttgaggctggtggcagtgtcccttgccagccggacagcattgcagcccactctgttggcggatcattcagcagtgtgtccttgtcaaagtcatcgactatggaccactctatgcatttcaccagttcccggctctctgatgccataacaggagatggcattgtgaacagaggccaggcattgaatgatgctgacgatgaagagtgcaaggacatgcctttgatcctccgcaacaaggccccaaggtggcacgagcagcttcagtgctggtgcctcaacttccggggccgggtgactgtcgcctcggtcaagaacttccagctagtcgcggcgacacagcctgccgccggagccctgaccccatcacaggcagccccgcagccagctccgcctcctccgccggaccaagagaaggtcatactgcagtttgggaaggtcggcaaggacatcttcaccatggactactgctacccgctgtcagccttccaggccttcgccatctgcctgagcagcttcgacaccaagttggcctgcgaataaatcctacctacaattctggtacctaccaaataatcaaaaacactgattgtcgtggtgttcgtccaagaaccgagtttagctgagacgccattgggcaccatgtgctggtgccttgttaactcagaaacgcgtgggggctgaatctgtttcagcagcttccttgtgataatctgtagctgctgcttcgctgctgttgtatcctatgctttcatttctttccggttccgctgtagcttcttaccccccggtgacattagttcggtacccgtatctggatatttttttagccttcttcgttggattgttcaccggtgatggcatgtattaacagagatagttacatacagatgtaatgaattcaggtctggataattttgctttcggttgctattggaaaaggatgtgatggctgctgtcatctttggactgctgatgtttcttttgctgtcaccttcagcagggtcatcagggaggtgactgatgaggtgtttatttgtttgttttgcttcaaagcgaggcctttagcacggacttttcgcgacgagtaaataaagctacacagataattgcaggcggagagagtaaccaaaatcttggggcgcaggtcgggagaaagatccgaaaggccaatgcaaatgcgatacagacgcacgctagttgctaatgctagctaccctcctcggtgctccccttgctcctgtggcgtgcgggaaaaaggcaacttaacaccagcatcgtccgaggcagcagcaacggacgactccacaagatcaaggttttcgtgtcttctttatcaacaactcacagcagccaacaacttccatttacatcaaagcaacagtgcccag

SEQ ID NO: 18973 - DNA, 1046 bp, Zea Mays
taacggcacacaaaatgtttgccatatagaacttcttggagaagtttgtatcccacgccagctggtcattacgaaagatccatcctctataccaacttctgtagctatggctggactaactttgcccttggttgccaagccattggttgttgatgggacgtctaaaggtcatgaactatatcttgcatatgacgaggcatccttgtcaatgcttgatccgcctctggttctacaggaattcataaaccatggcgggatcctctttaaggtgtatatcattggtgaaacaatacaggttgtccgcaggttctctcttcctgatgttaacacatatgacttactaaacaacgttggcatctatcgattgccaagagtttcatgtgctgcagctagtgcggatgatgcagatcttgaccctcttattgcagagcttcctccaaggccacttctagagaaactgggcagggagcttcgtggccggcttggtttgagattgttcaatatagatatgattagagaacttggaaccaaagatcggtactacataattgatatcaactacttcccaggttacggcaaaatgccaggatatgagcgcatgttcacagacttcttactaagtctcgcacaaagcaagtacaaaaggtatgcttccccaccgcgccaatgtacatttgctggagacataagcataagcgggaggcttgaggaagttggcaagtctcagtgtgtgtgttcaaaatcggtggcacatgctggactggagtaggaaataaccaaggaaacgcttggatgcgctgtactcatgttgtaaaatgtttaactgaatgaacaccttcctcgtgatggctccctccatcgtaatttggcaaccatgagaattaattctgcagcttggtagtgaacggtgttttgttgtgtgtatttggtaggtttgaggtctacgcaagtcaggagaccaccaaatagctgttgatgatcggatcatattaatctacatacaatctttctagcagtcatactaatacaaccatcatgggtttgtg

SEQ ID NO: 18974 - DNA, 2217 bp, Zea Mays
atttagcttctctctggatatttaacttgctgattgtagcatcaacttgatagagaagattgtgctgtttctgttggaacagcaaggaatgttggcaagcaggattgaggagttaggaaagcaaagggcaatactacaagaccagccagatatatctggtattgctgagttacgagaagcttatagggaagttggtattgacctcatcaaactccttaaattcgttgatcttaatgcaactggcattcggaaaattttgaagaagtttgacaagcgtttcggctatagatttactgattactatgtgacaagtagatcaaatcacccgtactctcagctgcaacaggtctttaagcatgtgggtgtaggagctgttgtaggagctttgtcacgtaaccttgctgaacttcaagaacgtcaaggaagctacttatctatttatgatcagccatcttctgctcttaaggaccccatcattgatatgataaactcctcagttgataagttgacaaggtcaactaattttcttcgctttttggggcaacatgccttgattgtggatgaggagtctcctagtactgcaggagaggaagaaatagaagatcagaaataccatttcatgtcccttatgctgaacctggtgaacacatttctttacatggtcaacacatacatcattgtgccaactgcagatgactattcagtaagccttggggcagcttctactgtttgtggtgtggtcattggttcaatggctgttgcacaaatattttcctctgtttacttcagtgcatggtccaacaagtcatatttcaaaccgcttgttttcagtagcattgttttgttcttggggaatgtatgctatgcaatggcatatgatatgaagtccctaacagtccttattatcggccgtttactctgtgggatgggttctgcaagagctgtcaaccgtcggtacattagtgattgtgtccctgcaagaatacgcatgcaagcttcggcaggattcgttagcgcaagtgcacttggcatggcctgtgggccagcgctagctggtttacttcaatggaaattcaagatctacatggttactttcaatcaatcgactctacctggttgggtgatggcagttgcgtggctattgtatttgatttggctatgggtctcattcaaagaaccgaaccgtgctactgaggtgaatgaagccccacaaaatcctgcttctggacaaacggttgatattggacaagtagagaatggacttgctcagcctctgctcatggattccgtagataaacaaaatgaagatgaagatgaagaagttgatgaaagtgaagaagctgcagatgattcacgcaagcctgcaacatcaattggctcagcatacagactgcttactccatcagtaaaggtccagttgttgatatacttcatgctgaaatacgcaatggagattttgctttcagagtctagtgttatcactaatcactatttcagttggaacacaagcgcagtggcaatttttctagcaatccttgggttgacggtgcttcctgttaatgctgttgttggaacatacatcagcaatatgtttgaggacaggcaactcctcatggtctctcaaattacgttgctagtaggcattatcttcagcttcaaggttacgagtacatactctgttgtccagtatgttgtctcagcacttgtcacatttgtttctgcagaagttcttgaaggtgtgaacctttccctcctatcaagcgtgatgtcatctcgcctctcccgtggcacatacaacggtggcctcctctcgacggaggccgggaccctggcgagggtggtcgctgactgcaccatcactgcggcggggtacctgggcgtggggaagcttctcaacgtcaccctgctaccatccctggtgatatgtgttgcgtccattgcctgcaccttcctgacgtataactcgcttttctgatggagcttcacaatgtatttgtgtcatcatgattcgttccatattagcgcaaatcaaggcagctgggagaccgccattgccattgcccgaaggggctattgtattactattattatatgttcgtcgatttaattgctgtaaattgattgataaaatgatggtagctactgaacctggtcttgccgtgcaaaattttgaccgactctatccttgtcatgaatacatgctgtccatattatggc

SEQ ID NO: 18975 - DNA, 1779 bp, Zea Mays
ccgtaacgcactcggctctcaccgccgcacaaattccgcctcctccaagcattttcaaattctctttcttctttctcctcccaataaacacacccacccggtcgctccgctccaccgttccgccctcgaccgcgcgcggagcctcctcaacccttcagacctccgcctcccaccgcttccgtagcctcgcctcgcctcgcctcgcctcgtccttctcctccgtcccaaccatgagggagatcctgcacatccagggcgggcagtgcgggaaccagatcggtgccaagttctgggaggtgatctgcgacgagcacggcatcgaccacacgggcaagtacgccggcgactccgacctccagctcgagcgcatcaacgtctactacaatgaggccggcgggggccggttcgtcccgcgcgccgtgctcatggacctcgagcccggcaccatggactccgtgcgctccggcccctacggccagatcttccgccccgacaacttcgtcttcggccagtccggcgccggcaacaactgggccaagggccactacaccgagggcgccgagctcatcgactccgtgcttgacgtcgtccgcaaggaggccgagaactgcgactgcctccaaggtttgccattcattgggtggaggtactggctcagggatgggcaccctgctcatctccaaaatcagggaagagtacccagataggatgatgctgacgttctcagtttttccatcacccaaggtgtctgatactgtggtagaaccttacaatgccacgctctcagttcatcaacttgttgagaatgctgatgagtgtatggtcctcgacaacgaagctctctacgacatctgcttccgcactctgaagcttgctacacccactttcggtgacctgaaccatctcatctctgcaaccatgagtggtgttacctgctgcctgcggttcccaggccagctgaactcggacctccggaagcttgcggtcaacctgatccccttcccccgcctccatttcttcatggtcggcttcgcgccgctgacgtcaagggggtcccagcagtaccgcgccctgaccgtcccggagctgacccagcagatgtgggacgcgaagaacatgatgtgcgcggctgacccgcggcacgggcgctacctgacggcgtcggccatgttccgcgggaagatgagcaccaaggaggtggacgagcagatgctgaacgtgcagaacaagaactcgtcctacttcgtggagtggatcccgaacaacgtgaagtcgagcgtgtgcgacatcccccccacgggcctggcgatggcgtccacgttcgtcggcaactccacctcgatccaggagatgttccggcgcgtcagcgagcagttcacggccatgttccggcgcaaggccttcctgcactggtacaccggggagggcatggacgagatggagttcaccgaggccgagagcaacatgaacgacctggtggccgagtaccagcagtaccaggacgcgacggcggaagaggaggaggagtacaaggagggagatgaggtggctgcctgatccaccggcacattgtggggttgtgcacattgtggggttgtgttattattgttgctcttcatctggtgtttaaaatgttactgtgatgctgctgcgaaactgacgtaagttttaactgtggaattgattacttctagatcgtggatttgtcgatctgatattagatgtattctatatcttggtatcttttttttagagttcaggggcacatgagtcatcgtc

SEQ ID NO: 18976 - DNA, 3227 bp, Zea Mays
aggtcacgacgcccagtccccaaccaaccccaacagaagcccgctgcgctgcccaccgctcttccactccctcgccaccctgcgccaatgccggacccgacgagccgccgccactgcggacgcgggggaccatagcgccgaacgggacgcgctgctgcgtcgccccctccccgcgcctcacgtctgcactggccggccacgccagctaatcaagtccaggagtaccatttcctcttccggccacggtgggttctccgtttcaacggacctccggttcatggcgagcgaggcgaaggagatgaagtacaggaggaggggcagggttcccgggccgccggagcacgggcaacgcagcgaccggagcggcgcgctggactgggccgcgctcaagcacgaccccgcggagctgctccggaagctcgacgaggtacgggaccagatcacccgctcctgcgagctcatggggccgccgccgccggaccgccaccgcgcgatgagccgccgcacggtctcgctgcgcccctcgtacgccgagccgccgcacgcggcaggccgggcccccgaccactaccgctcgcgctacgccgaccgcaacaggactagcttgccgccgagctcgtatgaccaccggtcgcagcgctccgtacccgacgacgaggcgtactccaggcagccgttccggcagcagtactaccatgagaggcagcgggagagccacggctttggccacgggaggcgccaccatagctcctgccagtgcgcgcactgcctccagagccagcgggcgccggtggtggcgccgccgaaggaccacgtcccgatggccaggtacttcgcgggtcaggggtcctttcggttcgatagatcccagccaatctcgtcggagcttgaccggaggtctgtggcttcgtctctctactcgcacctttccgtgtccaagaggagggtggagtatttcaggaaaaaggctgagaagttctgccggccgacgaggggcgccgcgccttttctcgtgtgcacctcctgttcccatctcctgcagctgccgcaggggaagttcgcaggccggaagaaggatcaggtccagtgcggttcttgttcagagatcattgctttggagcctaagcaagtgaaagttcatccggtgatcacgccaccgtctttcccagtatcaaaaggtgtcagaagtaaaggttccagtcaccgggacaccaagagttccgggtggtatcaacatcaggatgatgacaacttcaatttctataagccgcaagcacagaagaaggattttgctgacaatatgtcaccgtcttctaccgccagttatggtagaacagacagtgagcatgggtcaaacaggagcgttcagttaaaatcagtgcctgccagcaggtctagattttcaaatgacccaaaggatatattatgtcaaggagatacaggcggtcaagtggaagcttcaggacagtgtacagtcagtccacaaggtccaattttagtggacaaacaaatggatccgttctccagtcaatggaaagagaaagactatagtggtggaaaccaaatcataagaaaagaatgtgacaggcggtcaagtggaagcttcaggacagtgtacagtcagtccacaaggtccaattttagtggacaaacaaatggatccgttctccagtcaatggaaagagaaagactatagtggtggaaaccaaatcataagaaaagaatgtgacataaataccaaatcagattatgaagccaacgctagaggtgaaagtctcggtaggaaatgcatacagaagagtaaagaaggtcgtaagggtgggtttgaagatgaattcagtaatggaagaacacatggacaaaaaggtagacacggtaacactgacagtcctgaagatggaatcgttggaaacaaatacaaacataaggccgatgatgttgttataagcagccttgaagataaagatatgagcattaagtatgaacataatggtagctttagatttgaggaacttagtaagagagatgaaaaatgcaacaaaaaggatgacaacaatattcttgaacttgagagcatagctaggggatgtgaacaggacagaatcaaagatgactgcggaaaactgctgcactcagatagtagaaatggcaacacggtggccaagaattattcatcagttaatgaacacacaaattcaagttctcttgtttcctctgtggccgaggtagatgatatacagtcttcagttggcaagaatggggattcatccttttttactggtttcctcaagaaaggtttaaaggacctttctttattcaaccagtctgtagacagtgctaaggtttatatcaacggtcatccaatctctgaacgagctctccggaaatcagagaagaaagttggtcctgttggccctggttcatattggtacgactaccgtgctggattttggggtgtcttcggacaagagtgtagaggcatcataccaccattcataaaagaattcaactatccaatgcccaagaactgcgctggtggtagcactggggttttcgtaaatgggagagagctccaccagaaagattttgatttgcttgtagggagagggctccctcgaatacctggaaagtcatattctgttgagatatcaggaagcgtgatcgacgatacgactggcacgaagctacgtggtcttggaaagcttgcacccacaatcgagaaaatgaaacgtggctttggcatgcacgtccccgaagagacaaagtagctctatggatacttttgttgatgcttctgttgaaagttttacacacctagaaagctgccaattaatgggagtccaggtttgttgatctgttaggattggtgacagcggtagaaaggctttcacgtcttgaagctcgacagcgatgcagcctccggacattgagagaagaaatggagagatgtcataactcatacgcattcgcatcatcctacttggaattaaatgtcgtgtttccatggtgacagctccggccggcggcatacagttcctgtctccctctcgtttgtaaaattcgccacaccgtaggtgctaggtagcattcggagcatgtatccgtttcgggtttgtgatacagtggcgcaactcttcggctatataaatgtacctagtactttgtaacatgttgtccagtatgcaacgacgcatcagatttgtatacctctcgaattcgagccagag

SEQ ID NO: 18977 - DNA, 1854 bp, Zea Mays
tctaaggtttaccgggcaaacactggacgacaggtgaacggggatgcacagttaggagattgaaggagcgagaagggagggaggcaaaggagacagcatatgggatgtatttacagatgacaaagaacatgtcttagacagaagcaatggagaaattgcagttgatcactaccatcgatacaaggaagacattgagctcatggcaagtctaggttttagcgcatacagattttctatatcttgggcgcgtatatttcctgatggcttggggggaaatgtcaatgatcaaggagtcgccttctataatgacctcatcaattttatgatttcgaaaggtattgagccttacgcaactctatatcattgggatcttccaaacaatcttcagaagactctggggggctggatttctgacaagattgtggagtactttgcattgtatgcagaagcttgctttgcaaattttggagacagggtaaagcattggataacgatcaatgaacctctccaaactgcaatcaatggttatgggattggaatttttgcacctggaggatgccaaggtgaaactgctagatgttacttggctgcccatcaccaaatcttggctcatgctgctgctgttgatgtttatagaagaaaattcaaggttgcacaaggtggtgaagtagggttggttgttgattgtgaatgggcagagccattttctgaaaatgtggaagaccaaattgctgcacagcggaggcttgactttcaacttggatggtacctagatccaatatattttggtgattacccagaaagcatgcgtcagcgactgggcagtgatcttccaaccttttcagagaaagataaagagttcatgaggaacaaaattgattttgttggagtaaatcattatacttcaagactcattgctcatctccaaaatccaaatgatgtttatttctaccaagtgcaacaaatggagcgaatagaaaaatggaatagtggtgaaaaaattggtgaaagggctgcatctgaatggcttttcatagttccttggggccttcataagtcacttaattatatagcgaagaagtacaataatccagcaatttatgttactgagaatggcatggatgaagaggacgatcaatccgcaacgcttgaccaggtcctaaacgacacgacgagggtcggttacttcaaagggtacctcaattcagttgcgcaagcgatcaaggacggagctgatgtccgcgggtactttgcgtggtcgttcctggacaacttcgagtgggcaatgggctacaccaagaggttcggcatagtctacgtggactacaagaacgggctgtccaggcacccgaaagcatcggcgctgtggttctcgcgcttgctcaggggcgaggctggcactggcacaagctgagcgaactgcacgcaggaagcaagcacagaacgtcgttattacaatataaatattccacacaactagacgtttttctcctgttgttgtatcgtactactgtacagtaagcgccaataagctagcctcagatgtgtgctgcctgcctatacctctagtgactgccattgatccagcactagctgaaatgtacccggcctccaagaatcagcaccagaatatatgctttgaattgaactcatgcatgctatgctaggcgggggcggcacggcactctggttacagatagcaccaataactgttgtactattcacctgcaggtaggtaaggttgtgctgtcattactgatgcagatgttcgtctgtattgcgctggagctctggatcattagggccagggcactttttaacagttttagggttcaggtcccttttatcttttgg

SEQ ID NO: 18978 - DNA, 1582 bp, Zea Mays
cactacttgagatgtcatgttttaagggtttgggcggattggcaggttggtcctgcgaattgcaaccagcagagatgatattgaagttgtggctgtgaatgaccctttcattgatgctaagtacatggttctattcgtgtcgtggatgattcaaccctcgagatcaatgggaagaaggtcacaattacaagcaaaagagatcctgcagagattccatggggtaactttggggctgaatatgttgttgaatcttctggtgtcttcacgacgactgataaagcatcagcacacttaaagggtggtgcaaagaaagtggtgatatctgcaccatcagctgatgctcccatgtttgtagttggagttaatgagaatagctatgatccaaagatgaatgttgtttctaatgcaagttgcactaccaactgccttgctccacttgccaaggttgtccatgaggaatttggcatcgtggagggccttatgacaactgttcatgcaacaacagctacccagaagaccgtcgatggtccttcgatgaaggattggagaggaggacgtggtgctgcccaaaacataattcccagctccactggtgcagcaaaggctgttggaaaagtcctgcctgagctgaatggaaaactcactggtatggccttccgagttccaacaccaaatgtctctgttgtggatttgacatgccggattgagaaaagcgcctcctatgatgatgtgaaagcagccatcaagacggcatcagagggtgcactcaaaggtattcttggctacacagacgaggatgttgtttccaatgattttgttggtgattcaaggtcaagcatctttgatgccaaggctggtattggactgagctcttccttcatgaagctcgtgtcttggtatgacaacgagtggggctacagcaaccgggttctggatctgatcgctcacatggctcttgtgagcgccaagcactgatgttcgtactcgttcctccagtaccagtagtagcctagataagaggctgcagttttgacggccattttcttttagctgttgtttggaataaaagaccaaatgttggaacacttggaactcgcgcaaaactggaatccgattcatgacctgtgttttagttgtagagggggcaaatttgcatcgtactatatgcgggattgttgatcggatgtcgtatggttcattgacttgatttattatgatgcgtggagggctgatttggtgatcagtgatcacggctctctatgagagagaaatctctttgttatttaattttgaatagcaaagagatttttctccatagattctttcgtgatgcctgattatcaaaccagccctaagggctgatttggtggtaagggatcccaagaggatctatgtggagaaattcacttgcaattcaattttgaataaaaggggattcctccccatggatcaccttaggatctcttaccaccaaatcagccctgaatgagttgatattatttagacaacccatgctataatggaaactagtcggttgttcgtgtgttgcgacggtttacaccaatactcacgtaaactatcc

SEQ ID NO: 18979 - DNA, 3138 bp, Zea Mays
ctcgcgctcgcgcccgcgccacgacgcgagagcgcgcgaggcgtggagccctaaatcccggaagcttccgaggccgctcgccgggggcgggagagggagctcgccgccggtgacggagccctcgccgccgtagatctcccgatctgagacgccgcttctcaattccctacaggtttttcggtgccggcgacggagatgactgtggagagccccggggagctaggcttctgaagcgcaccgtggggcacagcttggcggacgacggcccccgacagccaactaggttttccatgggagatgggggtgtcgcgtgcgccgtccgcgcagtcgagggcttccatgccggcgccctcgtgaggagaggaggagcgggagaagcgatgccggataagggggagaaggctcatggacaccaccaccagcagcagcactggaagaaccagcagtcagcgtcagctactgacctggaggagggggagctgctcagtggggaggcggagaccaatgggttgcctgagaggagcatgccacctaagaagtggaggaagtatgaagttattgaggagtaccttattgtagcagatgtggaggaagtacaacgaaaaatgagagtttctttacctgatgactattctgagaagttgctttcacagaagaatggcaccgaaaatttggagcttccagaggttaaggattatcaaccccgaaaagtagcaggggatgaaattcttgagcaagaagtatatggcatagatccatatacacacaatctactgagtgacattatgccttctgatcttgagttgtcacctactgacaagcatatctttattgaggagttgcttctgaatgcattgaataagcaagttaggcatttcactggtttgggaaatacccctatgacttacaacattaggcctgtcattgaagaaattcaaaggtctgcggaggatagtggtgacagacgaactttgaagatgtgcttggggatgctaaagtccatgagaaatcgctctgatcagaactttgttgcttatagaaagggtcttggtgttgtttgcaacaaaaaaggtggatttggtgtagatgactttgttgttgaattctttggggaggtctacccttcttggagatggtatgaaaagcaagatggtattaaacatatacaaaataacagtgaagatcaagctcctgagttttacaacattatgttagaaaggccaaagggagaccgacatggatatgacttggtttttgttgatgcgatgcacaaggccaactacgcgagtagaatctgccactcctgcaaccctaactgcgaagcaaaaaaaaaaagaatttatacgtatgattatgcaaaagctgacatgagagctatagtgacagcagtggatggtaaataccagattggagtttacacacttcgaccaattgcagaaggcgaggaaatcacttttgattacaattctgtaactgagagcaaagaagaacatgaagcatcagtctgcctctgtggaagtcaagtatgccgcggcagctatttgaatttttctggtgaaggagcctttgagaaggtattaatggaatttcatggtgtgctcgataggcatagcctactgctacaggcttgtgaaacagactctgtctcccagcaagacttgattgacttgggtagagctggtcttggtacctgtttgcttgctggtttgcctgtatggcttgttgcttacacagctcacctggtacggtttatataccttgagaggcagaagctccctgatgagatcttaaggcacaatgtggatgagaagcgacagttccttatagaaataaacatggattctgagaagaatgatgctgaggttcaggcagagggagtactaaattcaagattacagcaaatagtgcatacacttgacaaggtgagatatgttatgagatgcatatttggagacccaaagaatgctcctcctcctatggtaaggttgtctgggaaaagtttggtctctgccatctggaaaggggacagttcgatagttgctgaacttcttcagtcgatggaacctcatgttgaagaagaggtacttagtgatctgaaggccaaaatctgtgctcatgacccatcagattctgaagatattgagggaggcatccgtaattctctcttgtggctgcgtgatgaattacgaactcttccatgcacttacaagtgccgtcatgatgctgctgcagatttgatccatttgtatgcttatacaaagtgctttttccgagtccgggattacaagacagtaaaatctccaccagttcatatcagtccgcttgacttaggccccaaatatgccgataaactgggaccaggctttcaggagtactgcaagacatacccagaaaattactgcttagcccagcttatctattggtatagccagaattcagaacctgaatctagattgacaagagctagaaaaggttgcatgtcattgcccgatgtctcgtccttctatgtgaagtctctaaaaccattgcaagagcgagtttatgggaacagaactgtgagattcatgttatcacgcatggaaaaacaggcacagagaccatggccaaaggataggatatgggtgttcaagagtgatccgagatactttggcagtccaatgatggatgccgtgttgaataattccccccttgacaaggagatggtgcattggctcaagacgagaccaaacgttttcctaggctagaaaaaaaatgattgtaggcagataagatggtatttggttgtttctcccttttggagattttagtctgcaggattttttttttccaggctcacaccttggctacctgatcacagggagtttagcttatagatagcagggtaacagtcaccaccccccatctgtacattccccagtccctacataccttgcggagatgtatctggttagtaaatgatagatttgtcattgatttaatgtagtgaattttcccataggaatgcccccccccctcttttgtttcatgtaaatgcagaacaatttcaatcttgaattcagtaatgtgttacaggcattttgcatttctatggttcagttgggttgtttcagtcaataaaatggttttaagggctcaata

SEQ ID NO: 18980 - DNA, 1489 bp, Zea Mays
gagtatctgaccgtccactcagaatatgccgccccaacggtcctgatcagacacaaaccctaaaactcctctataaaatcctccacgctcatctcctttgccaagcctaatccccacgaaaaccctaaaccctcgctacccggcggcggctacaagctcttcatagcaagcaaccgacccctcctcgctgggaaggagaagatggagcctggccagagcgggactgagcaggcctctccacgcgggaacgattgggaggtcgtgcagctcaccgcgtccgcatacgccgccgcgcccgctccgaggaagcccgagccctccgacgaagcggaagctaagagatacggcgcaaagggggacgatctagccgccggcctactcatgtccggccacttctccgtgtctcagagcgaggtcgagagcctcctcgtaggcgccgacaccaaagaaccaccgcccaaggacaaggaggagccttgcgagcatactaagctgctggaggacgacgtccccaccatcccgttcgatgacggcaaggcgctgaaaggcatgggtctggtcggggaagagccggccgggttctcgtcgcctgtctacagctccatcacggagagcaggagtgacaagaggagcgaggagcctactactctgcatagtttcaaccccgtgactggctcaacaaaggtcgtctcacctgacgagcagagcgagcctgctgctgggtctgggtccgggtctgggtcaggcccgcgtgaagcgtggtggaagaagcagcttctctccctttacaggaacgccaaggagagcaagcatctctggcctatcgtcgccaccactgctgctttggtgggcctggcgtatctggggcggcgctggcataagggcaggctgcagtttcagctgctcaagatatcgccttctaccaacaaggagaaaatcagcgacgcggttggaccgttaaaccgcatcaacgacattctcgttgctggcaaccacccaagtcacggtgtccatgggcatgcccgtgcaggctgaatgcagtcagttcgcgaacccatcgggcgtcctggacccatatactatcatgtgtcgctttgagaatcggctcaagacaaaccatcgggcaggactggagtagttgtccaaggactgaggatgtttatgcagacacaagtatgtttggtggctcgatgtatgtgaattccaaaactccatctgggtatgtaaatatttgtatgggtttagtttggttgctttttcgtttggtcatctcatgaaacctctgctggtggtttccttgtctatattactgtcttatttggggttcgttcatgcatgcatacatgtgatggggcataatatcactggattttatttcaccgtcatgttggctggctggctgctaccgtgaaggtagcctggttgttgcagtcccttgtatattttctgctgcagagttgacctgataataatgttttattgtggcttg

SEQ ID NO: 18981 - DNA, 536 bp, Zea Mays
tcctctgcatccggcatcccgatcctgtgtgtctctactctgcactcctcgattcgattcaaccgacccagcaggcgggaaatggcgaacggtgggaccgaggcatcgccgctgcggccccggcggcgcgccggctccagggacccgttcctcatcgtgtgccgcttcttcggcgtcgtcacggccgccgccgcgctgctctgcgtcgccgccaacgtcctctccgcggtctactccttccgcggcggcgctgacatcatcggcggcgtgttccggtgctacgcggtggtgttctccgtcttcgtcgccgttctcgagaccgagtgggcacccgtcatcaggctctggaagatatttgagtacttgccggcaaggggaatgctgcagatctttgttgctatcatgaccaaggcgtacccaaatgttgagaggagcgagctgattttgatccaggagatcgctacttacatgcttcttgtgtgtggagctgtctacataatcgcagtttcaaccatcttctgtttgggaaacttagt

SEQ ID NO: 18982 - DNA, 1620 bp, Zea Mays
gccaaactgactgattgtctgattgtgattgcggcagcaccgccgaccacgagcccgccgaaaggctcctccgcctgccgttccagggtgcactgccgccattgctcatctccccgtggtgcggaggtccacccgggcgccaattggtctcctctttcgttggcagactgagtggcatccaatcctgaatcaatgaggggctggggtttgctcgtgttatcgctacatgttctttcatgcctggttagtggcgttgcttctggtcgaacaagctcttatgtgcgcacagagtttccatctacagatatacctctagaaagtgaatggtttgctattccaaagggatacaatgctccacagcaggttcatatcactcaaggtgattatgatggaaaggcagttatagtatcttgggttactccagaagaacctgggccaagtgaagtattttatggcaaggagaagctatatgaccagaaagcagaaggaacaacaacaaactatacgttttacgattacaaatctggatacatacaccattgccttgtcgatggccttgagtataacactaaatattattacaagattggaagcggaaattcagctcgagaattctggtttgaaacgcctccagcaattgatccagatgcatcatacacatttggcatcatagtaaaatacactcctcaatggctgtggctgaagaacgaattcaagcgcgtggacagggaaaagacaccctggcttatcgttctcatgcattctcccatgtacaacagcaacgaggcacattacatggagggtgagagtatgagggctgctttcgagaaatggtttgtgaagtacaaggttgacttggtgtttgcagggcacgttcatgcttatgagagatcataccgcatttctaatgtcaactacaacataacgtcgggaaatcggtatccagtgccggacaaatctgctcccgtttacataacggtcggtgatggaggcaaccaggaaggacttgcttcaaggttttataacccccagccggattactcagcgttcagggaggccagctatggtcactcagttttacagctgaaaaacaggacccatgctatctaccagtggaatagaaacgatgatgggaatcctgttccagcagacaccgtaatgttccataaccaatattggacgagcagcacgcgccgcaggaggctgaagaagaaccatctccatctcgaggaccttgaggatttgatctccctattatagaaaaccgggttcgcaggacgcatgaactgtgtgtgggggaataatcgcaggttagcactgttgctagtgtgcccgcctctcttggaatggaagcagcagagccagctatcagactggcagtgaccaccacctcctcagctacctggttgcatgccacagatctgaaattctgaaatgctgtgactgtgactgtgaggtatgaaaaaacagtgtaaataacgcggttgcctccgtacatgtgtgacattttatacacgtgcaagaaagcatcggtgtccaccgttgtccgtgaaccattttcgcttgtatgcgcttgtgcccagtggaaatcctttccatctcgttggtttgctggtgaca

SEQ ID NO: 18983 - DNA, 1107 bp, Zea Mays
tgcagcttgccacgcatggtggagctgcatgttgcatgcatgcatggtgtgcgtgtgtagtgctgatttccagtgggtatgattataaagctgttagaagatggacaacaaaaaggaggttagggtacagtctaattgactgtgacaagatatttgttcccatacacaaggaagtccattggtgtttagcagtcatcaacataagggacaaaaagtttcagtatctggattcacttggtggcatggacacgagggtcttgaggatcttggctaagtatattgtggatgaggtcaaagacaaaagtgaccaacagattgatgctctctcatggaagcaggaaagtgtcgaaaatcttcctttgcaggagaatggtttgcctaatgtactgagtctgtcacttagatgggactgtggcatgttcatgctcaaatacattgacttctacagcagagatatggacctcatttttggacagaagcaaatgcactacttccgcaggaggacggcaaaggaaatactgagtttgagggctgaataaaccttggaggacatcataggtcattttggttaggttcagatatttgttggaatatgtacttaacaaatggctgcaacggcttaaaggtatagcattgagtggaatgattttgaaaatgttccggatgcacaacggtcaagcaacaggttgaagggaattttgcatgagcacagcagcgcctagttttgacagtgagcctttgcatggtcaagcattagattgcaatgagattcatcaaagatagggaggtatagattaacttggaactatatatatatataccagtgttcttgagcatcctgtgagctgtgaccaagtgagcaatcactgggttaagctgtatgaccggcttcggtgcatagttgtgtgaaatgctcaaatcccttttgtttttatcatgttttatttttttaatcgttctactttcctgagcctgttatgtatacctgtaatggctgatccgctaccagttgttttaggccttatttggtagagctctcctaccattgaagttaaaagcatgttgaccagtgctttaactgcttggacgttaattctttatgacaag

SEQ ID NO: 18984 - DNA, 1169 bp, Zea Mays
ggaggacatatccggtgcaatcactcattttggtgcaagcgtacaatcaaactatccagagcatccaatctagatccaacggtttcatacggaagtggttaaatgtaaaatagacactaggttttaggaggaaggggttaaatgtaaaataacagttaccattaaatctaaatcggatgcaccagatcgcttgattgcatgcttgcactaggataagtgattgcataggatattttcccactaagggttgagacatattttttagcgaatacaacttgagggatgagattgccgatgattgtcacttgactgggagtctggatctcaagcaaccagccccaagaactgttctgctccccagttgtatatacgatcgaagaaaaaaaaaagatcccaaaccctagcatctctcatggacgacggcgacggcggactgagcttcgacttcgagggcggcctcgactctgccccggcggccgggggccccgtgccgtcctccactgaccctggcgcgggaggcggcgacgggccgggtatgcacgggcgcggccgaggtcgcgggagctaccgccagacggtgtgccgccactggcttcggggcctatgcatgaagggcgaggcgtgcgggttcctgcaccagttcgacaaggcccgcatgcccgtctgccgtttcttccgcgacttcggcgagtgccgcgagcccgactgcgcgtacaagcactcgtacgacgacgtcaaggagtgcaacatgtacaagatggggttttgtcccaatggtcctaattgccggtacaagcatatcaagctacctgggccaccgccttctgttgaggaagttcttcagaagattttgcagatgcgctcttttaacagatacagtcagaatagaaatagtaattataatcagcaaggggagaggccacaacatccacagggttctgcgttgcctaaccaaaactcagcagaaaatgctactgctgcagctccaccagctggtggacaacaagcacaaacgctgaatcaacagccaccacagcagcagcagaagccaaatacaaatgaccaggcccaaggtgtttcaaatggccatcaggccactagaatcgccacaccccttccacaaggaccatctagtgttttaaagacgtcgcctgggtgtccagacgccc

SEQ ID NO: 18985 - DNA, 149 bp, Zea Mays
gttccctgctcagccttcacagctagcgcgtcgtctttcgtctatggtcgagcgtctgctccatcccggcaccctgcactagtgctcgacaaaaagtccaaacgaattgtcatgccatcgtctttgttgaatggaaatcgtcgtgttga

SEQ ID NO: 18986 - DNA, 243 bp, Zea Mays
atcttttgctgaccggctggagacggcagttaagcgtgtcattgcagaaggcaagtacaaaaccaaatatttgggcagcaccagcaccacccaggaagtcacagatgcggtcattgccaaattgggttagaaaccaacgtgtctttaatacaacttttgggcttgctggttgctgtcatgctattatgtaaccttctgtattacagtgtgtcatacatacgcatattaaggttcaagcttgac

SEQ ID NO: 18987 - DNA, 1980 bp, Zea Mays
gcgccgctcgtctcgacagacacacgcccacggagactcggagagggaggagggagggaggaggggagaggccgagagcacagggaacagacagacatggtcacgggatccatgaagcacctcgtgcaggtggagccggcaagggaggcggcggcggagggcggggcgccatcggcggggcccacgtaccgatgcgcggccggtggcaacgccgcgtcgccgcccgccgtgccggggctcgagtgctgctgggacatattccgcttgtccgtggagaagtgccccgacaacaagatgctgggccgccgcgaaatcgtccacggaaaggctggcagctacacatggctgacttacaagcaggtatacgacaccgtgctcgatgttgggtctgccatccggagctgtggcgtcggcaagggcggccggtgtggcatctatggagccaattctcctgagtgggtcatcagtatgcaggcctgcaatgcccatggcatctactgtgtgccactatatgacacgcttggtgccggggcagtagaattcgtattgtgccatgcagaggtacaaattgcttttgttgaggaaaagaagatcggagagatgctcaagacatttcccaatgcgaccaaatatctgaaaacacttgtaagcttcggtaaggttgatcctgggcacaaggaaaaagttgaacagaatggcttgtccatctactcatgggaagagtttctgcaactgggaggtaaagagaagtttgaacttccacccaaggaaaaggatgacatatgtacaataatgtacaccagtggaacaactggtgatcctaagggagtactaatctcgaacaagagcattgttaccattgtttcagcagtagatgagttcctcaacaactcaaacgagcagcttaacatggatgacgtttacatttcctatcttccgcttgctcatatatttgaccgggtgattgaagaggtgttcattcgtcatggtgcttcaattggattttggcgtggggatgtcaaactcttggttgaagacattggagaactcaaaccaacagttttttgtgctgttccacgtgttctagacagaatttatggaggattgcaagataaaattacagctggtggtttcctaaagaaaaccttgttcaatgttgcttacaaatacaaacaaggcaatatgttgaagggaaacaagcatgaagaggctgctgccatgtttgatcgcctggtcttcaccaaggtgaaacggggactaggtggaagggttcgcctgattctatctggcgcagctcccctatctagacatgttgaggagtatctgcgtgtggtaacatgctcccatgtccttcaaggatacgggctaacggaaacctgtgctgggtcctttgtttccctgccgaacaacatgtccatgctgggaactgtcggccctccagtcccgtatgtcgaagtacgcctggagtctgtccctgagatgggttatgatgcactgtcgagcgagacgcctcgtggggaaatttgcatcagaggggacaccttgttctcgggatactacaagcgagaggacctaaccaaagaagtcttggtcgatggctggttccacacaggagacattggtgagtggcagtctgacggaagcatgaagatcattgaccgcaagaagaacatcttcaagctctcacagggagagtacgttgcggttgagaatctggagaacatctttggtcaaactcctgctgttgattcgatttgggtctacggcaacagcttcgagtcgagcctggtagcagttgtgaaccccaacacacaagcactggagcgctgggcagagtcgaacggggtaactggagaatttgccacgatatgcgaagaccctagagcgagagagttcatcttgggagagcttacaaagatgggtaaagaaaagaagtggcctcagcaaatgatcttatgtatcgtcgttctcttaatcctg

SEQ ID NO: 18988 - DNA, 1037 bp, Zea Mays
acttcaataacaatccctgaaatactggaggatgagtggttcaaaaagggctacaagcgcccggagtttgacgagaaatatgacacgccattggatgatgtggatgctgtcttcaatgactcagaagagcaccacgtgacagagaagaaagaagaagaacccgtagctctcaatgcatttgaactgatttcaaggtcagcaggcctaaatcttgggaacctatttgactcggagcaggaattcaaaagagaaacgaggttcacgtcaaaatgtccaccgaaagaaatcattcgcaagattgaggaagctgcaaaacctctaggatttggtgtccagaagaaaaactacaagttgaggctagagaaagtaaaagcagggaggaagggaaacctgaatgttgctacggagatactacaggttgcgccctcccttcatatggtacaagtccggaaagcaaaaggcgacactctggagttccaaaagttctacaagaacctttccaagaccttaaaggacgttgtctggaaatctgaagacctgcaaatgcgagctgcttcttagcatccactagatggcgagatgttcgtacgtgtcagattccattcccgtagcatgatgtgtcgtcagccgtttctgttcactgcactctgcatggtccggtgggcgcgtggcttggcattttcagagaccgcgttgctcgttgcagcccgggatgaaggcgatgcagtaggttttgtggatgtggtgagctctgtatatgcctattgatgagtcatgttgcaagctgtaacgacactatgatccgtgaagtgtagaagcagccaagtatgttctttctatgctgccccatttcccggcagtttccatgcattttgaagaaaaaaatagtggctaactcattgatatttgtatttggtcatcattaataaatcgcctctccatctgtgcatgacccctctatcgttgtaagatttttttacaatcctcatctttctaaggttctgtttttttaccagattatataattcagctcaaat

SEQ ID NO: 18989 - DNA, 2300 bp, Zea Mays
atcgtggggggcgcgggcggaggagagcgtggcgagggccgagagcagcgcgcggccgggtcacgcaacgcgccccacgtactgccctccccctccgcgcgcgctagaaataccgaggcctggaccggggggggccccgtcacatccatccatcgaccgatcgatcgccacagccaacaccacccgccgaggcgacgcgacagccgccaggaggaaggaataaactcactgccagccagtgaagggggagaagtgtactgctccgtccaccagtgcgcgcaccgcccggcagggctgctcatctcgtcgacgaccagtggattaatcggcatggcggctctagccacgtcgcagctcgtcgcaacgcgcgccggcctgggcgtcccggacgcgtccacgttccgccgcggcgccgcgcagggcctgagggggggccggacggcgtcggcggcggacacgctcagcatgcggaccagcgcgcgcgcggcgcccaggctccagcaccagcagcagcagcaggcgcgccgcggggccaggttcccgtcgctcgtcgtgtgcgccagcgccggcatgaacgtcgtcttcgtcggcgccgagatggcgccgtggagcaagaccggcggcctcggcgacgtcctcggcggcctgccgccggccatggccgcgaatgggcaccgtgtcatggtcgtctctccccgctacgaccagtacaaggacgcctggaacggactacagggacaaccagctgcggttcagcctgctatgccaggcagcacttgaagctccaaggatcctgagcctcaacaacaacccatacttctccggaccatacggggaggacgtcgtgttcgtctgcaacgactggcacaccggccctctctcgtgctacctcaagagcaactaccagtcccacggcatctacagggacgcaaagaccgctttctgcatccacaacatctcctaccagggccggttcgccttctccgactacccggagctgaacctcccggagagattcaagtcgtccttcgatttcatcgacggctacgagaagcccgtggaaggccggaagatcaactggatgaaggccgggatcctcgaggccgacagggtcctcaccctcgacaacatcatgcgcctcaccggcatcaccggcatcgtcaacggcatggacgtcagcgagtgggaccccagcagggacaagtacatcgccgtgaagtacgacgtgtcgacggccgtggaggccaaggcgctgaacaaggaggcgctgcaggcggaggtcgggctcccggtggaccggaacatcccgctggtggcgttcatcggcaggctggaagagcagaagggacccgacgtcatggcggccgccatcccgcagctcatggagatggtggaggacgtgcagatcgttctgctgggcacgggcaagaagaagttcgagcgcatgctcatgagcgccgaggagaagttcccaggcaaggtgcgcgccgtggtcaagttcaacgcggcgctggcgcaccacatcatggccggcgccgacgtgctcgccgtcaccagccgcttcgagccctgcggcctcatccagctgcaggggatgcgatacggaacgccctgcgcctgcgcgtccaccggtggactcgtcgacaccatcatcgaaggcaagaccgggttccacatgggccgcctcagcgtcgactgcaacgtcgtggagccggcggacgtcaagaaggtggccaccaccttgcagcgcgccatcaaggtggtcggcacgccggcgtacgaggagatggtgaggaactgcatgatccaggatctctcctggaagggccctgccaagaactgggagaacgtgctgctcagcctcggggtcgccggcggcgagccaggggtcgaaggcgaggagatcgcgccgctcgccaaggagaacgtggccgcgccctgaagagttcggcctgcaggccccctgatctcgcgcgtggtgcaaacatgttgggacatcttcttatatatgctgtttcgtttatgtgatatggacaagtatgtgtagctgcttgcttgtgctagtgtaatatagtgtagtggtggccagtggcacaacctaataagcgcatgaactaatttgcttgcgtgtgtagttaagtaccgatcggtaatttttatattgcgagtaaataaatggacctgtagtggtggagtaaataatccctgctgttcggtgttcttatcgcttctcgtatagatgttatatagagtacattttctttctgaatcctacgtttttcaagtgtttttgaattaat

SEQ ID NO: 18990 - DNA, 150 bp, Zea Mays
tgggaagtagcagcacatccaccttcactcttataataagctgcttaggcgcagtcatgatttaattagaagcttcttgtcaaaggatgtttgtttctaactagttgtgcgcactggttaatttagctcatgtcgttatggttgtcttcc

SEQ ID NO: 18991 - DNA, 149 bp, Zea Mays
cggggagggaaagaccgctctcccgatattatattaagaagagaccgagacatggtcccggctaaaaaaaatctccaaaccttggcccccatcactagcgggccgtccgtagggtggcacgcaggacgtaacccgggagcaggcggggc

SEQ ID NO: 18992 - DNA, 429 bp, Zea Mays
gaaacattttgacataagatttcattgacaacatgcttggtccaaatggattacataaattattcaataatattatgcttcgacgtgataagtgtgataagaaaaaaggaactccctctaaagtagcttttgggcttttgatctcttgtggagagtagaactgcaattggcaagcatttatcttgatcttcgcatcaaaaataccatggcggcgatgctccttcttgacccgacgacataggtgcattccccggggcgccatgatctttgatcttgggaccttgctcagatggtgagacaacattgtaatttgccggtgagggtgctatggttgaatacatcgatctagatggtggtggaagtttcctgtggccacgtggtggttgtgcctcaccatgagaaggcgatggtggtgatggatacttgtaa

SEQ ID NO: 18993 - DNA, 1799 bp, Zea Mays
cggcgcggcgcgacgcgagttgcccgggcgccccggccttgtgcttctgcattggaccgcgatccaaatccagggaggatccgaacaggacaacagttcttgcttcttcctcttggaggaggagggctgcagcctgcaggggccggagagagcaggaggaggcggagacatgggtagcttcgctaagctggcgaggagggcggtggagacggacgctccggtcatggtgaagatacaagaactgctccgaggggccaaggatgtgatgtcgcttgcgcagggagttgtttactggcaacctcccgagtcagctatggataagatcgaaaagatcatcagggaaccaatagtcagtaaatatggttctgatgatgggcttcctgagcttcgagaagcacttctcgaaaagctaagcagagagaataagcttaccaaatcatcagtcatggtcactgctggtgcaaatcaggcttttgtgaacttggtcctcactctctgtgatgctggtgattccgttgtcatgtttgcaccgtattatttcaatgcctacatgtcattccagatgacaggtgttactgacatattagttggtggctgcgatcccaagacacttcatcctgatgttgattggttggagaaggttctgaaagaaaatgagcctatccctaaacttgtcactgttgtgaatccggggaacccctctggagcttttattccaaggcctatgcttgagaggatttcagatctgtgcaaaaatgctggtgcatggcttgtggttgacaatacctatgagtactttatgtatgatggaatggagcactactgcttagaagatgctcatattgtcaacctcttctcgttctcaaaggcttatggaatgatggggtggcgtgtaggatacattgcatttccaaatgaagctgatggcttccacgatcagctcctcaaggtgcaagacaacataccgatctgcgcctccatcatcgggcagcgcctggcgctctactcgctggaggccggccccgagtggatcaaagaacgggtgaaagacctggtgaaaaaccgggcgctgctggtggaggcgctgtccccgctcggcgaggacaacgtcaagggcggggagggcgccatctacctctgggcaaagctaccggacagctgctcggacgacttcgaggctgtcaggtggctcgcgaacaagcacggcgtcgccgtgatccccgggagcgccagcggaggacccgggtacatccgcgtctccttcggagggctcaaggaagaagacaccaggctggctgctgagaggctcaggcgcggcctgcaggagctggtgaccgatggaatggtacagtgacggctccatgggtgtaagtaaaagctccaattttccaacggtgtaattccgccgtgattaattcgggagaagaaaaggaacttgttttcaagaatgcactgcgttgctcggacgagagacgggacggaataaaatgcgtctggtctgcagagtcacctatgttatgaatcatatgtagtgcatatgtcatgagtgacagagtgagtaattgtttctgttcgacttccagttctacatattactgatcgatggcagcaactgtacacagtcaaaggtataaccgtataagcaagaaccgtgagctgttcttgacgtgcagagcttgcctgttagcaaatatttctgtccagataacgacagcatctgccttcagaaccagcgtcacattctgtaatggcatggatgagtgtctccaagaaagataaatctactatatctacatgag

SEQ ID NO: 18994 - DNA, 452 bp, Zea Mays
cagaaccacagaagctgatgaaattgcaaaaaagcttgatctgacagaggcaaatagacgaatacacgcatctcatcgcaagcataaaagcacagatcaagttggtatgtgaaggtatccgcgaagtgctgcagctgcctgcggagaaagagttatcgcccaggaatacgtggtagaatttggttctcaatggagcagggggtggtgttctttaaacgtggttccgtttcaactcttgcagttgaaattattgtggtgccgacagtattttagagcagagaatgaggttccccttcgtacaacaatctcttcgacgacaccacgtacaactcatactgatttctatgtattcattacgttggcatatggccttgccgatttgcagtttatttgagcctcttttccaagttaggttgagctcacaccaccgggccttccctgaccccgacgcg

SEQ ID NO: 18995 - DNA, 2450 bp, Zea Mays
aaacgaaaacgagccagccgggcaaacaacactcacatcttacaccagccgcactcccgtgtcctcctctccgagacgagacggacgggacggcaggcaccaccgcaccggcgccaccccacccgccggctcagagcgggggcccggccacccgaatcacacagatcggaacgccggaggaggagcaacgcgggcgcggagaggcccgccagcgaaggcgcagtgcaagctctgggttcccggatccgataccaccggcctctcggcgagtgtgtaatccagcgagcgagcgctcggttttagccgtgagagcgggagatgagtgctctgaagaaatccgacaagaaagccgccctcgacttcgcggcatggagcttcaatgtcaccacgtcggtcggactcatcatggtcaacaaggcgttgatggctacgtatggattcagttttgccacgacattaactgggcttcattttgtgaccactaccttgatgactattgtatttcgatggttaggcctgagccagccatcccacttacccctagcagatctagttaaatttgtgatattttcgaacttgtcaattgttgggatgaatgtgagcttgatgtggaactctgtgggcttttatcagatagcaaagctgtgcatgatacctgcatcatgtcttctggaggttgtctttgatcatgtacattattcccgggacacaaagctgagcataatggttgtgcttataggagttgcagtctgcacagttactgatgtcagtgtgaatgcaagaggtctaatcgcggctgttatagctgtttggagcacagctttgcaacaatattatgtccactttctccaacgcaagtactctctgaactcattcaacctgctgggccacactgctccagcccaagctgggtcactcctgctagtgggaccatttgcagattacttgttgacaggcaaaagggtggatcacttcagtttctcatcgcttgctctgtttttcctggcactctcatgcttcatcgccattggtgttaatctgagccaattcatctgtattgggcgcttctctgctgtatccttccaagtcctaggccacatgaagaccgtacttgttctgtcccttgggttcctattctttggcaaggagggcctgaatcttcaggtagtccttgggatggttctggccgttcttggaatgatatggtacgggaacgcatctgccaaaccaggcggcaaagagcggcgcagcgtcctaccgctgaggtctgcaagtctcaagggaagttcagaagaaaagggtggtgccgagaaatagtcttgctctctctgactgccaacttgaatggggagttttccgttccaaggttgaatttctggtgaggtgacgtgaagtaccacatattgggaactcttgcctaatgtttgacgcagaggacaaactcgttccatctagaaactcaggatcgttatagttacaggtacctgatggctctggacaagaacccgattgtgactaaggcggtcacttccgctgccctaactctggccggggacctcatctgtcagcttgttatcgatcgagttccagaacttgatttgaggagaacatttgtattcacatttttgggccttgcccttgtggggccaactttacatgtctggtacttgtatttgagcaaattagtgacaatcagtggggcatcaggtgccattgctcgccttatacttgatcagttcattttctctcccattttcattggcgtctttatgagcttactagtcaccttggagggaaagccctctcttgtggtgccaaagcttaagcaggaatggttatcatcagtgttggcgaattggcaattatggataccatttcagtttttgaatttttacttcgttcctcagaagtttcaggtccttggtgctaattttgtagcccttgcatggaatgtgattttatcatttaaagctcacaaggaagttatcgcgaaataggtatgaaggagcgcagtgaactcccccggtcggtccaggatagggataggatagtggcagctgaagctgtagggcttgtaaattgtcgccatgtgggactggagtggatcattctgatcagtagtcaacacaacactgaatggatgattgtgatggacatgcctgtgtgatctcttttgtgcatgctacaccaatacgtgtttggccagcatgtatgcctggacatgtgtgttactatttgtgctgtgatgggttgttcgagatctaggaaacacattgggttgttgatatctttaggccctgtgtggaagcgtctattttttttaagaaactggtttatagaaattgtggtggttctaaacataatagtttataactcagttcacttaaactactaaactttagtcacttttgtttcatgtctcactctttatttcaaacagtgcaaagcag

SEQ ID NO: 18996 - DNA, 1240 bp, Zea Mays
gcagattaatttgaaatagctgaggggttattttaaaaagatgacgcatgatgaccgttgaaattggtgctttaagtatagtatagaattcttggaaggttttgctattctacttatttgtgatacataaacttgcccattttttcttggtatctactatgaacttaactgatgcatttgataatataatgatttcttttgagcctgttcattagatgtaaattaacacagtatccatttacaaccaattcttttgcatttttacaattgaccttttcattttcatataaaatattggcatattcacaatatactgaattgtgaacttgtcaaggattcaagggcatgcaattcttgaacgttttagtggaatatgaaagtctcatctggtcatacaatatgtgagtctgagatgattcatattttatgccactttttacattttcaaatgtctctgttgtgttgattggtcacctatatcctgctgattttgcacacatcaggagttccaagtaggtatttacaccattcttcctactagtaagttttctataatctgacaaatttcgtggtgcctatgctaatggcttgagggttatcgaccaagccctggacagctggcaaatatgtatgtatttaatttcaattgaagcattaattttattcattgccaatttactgcatgcaaatatgggtttgtagcaaaactaggtggctgaggttctgccaatacggtagcatttattgtagcttaagtttggtcgagaatgtgacaagagtcttgctccagatgaactctgttgacgcagcaattgatcgaagaatatcagaaagtcggctggcaggacgcatggccctatgaagaatctgggctttgctcggtagattatcccccttgcatttcaccgaaggactctgcctgcgcttgtatctcgctgtgcagcagtcggccctcttcatttagttagcgaatggagttgctgcagttaagaggaatgtgttgtttctgacttgtttgagtgtcgagcctttgttcttctatgtttccagcatcgacaagaaaatgaattagcagcacttaggagttattttggtccaactgtcgcctcattgggaatatattgatgaacacctcaatttctgcccgattgtaacctggtcatgtgctattgccaattgaacctaatgctgtgcattggctggaaagcaacttaaaaatgttacggattttaatattttg

SEQ ID NO: 18997 - DNA, 1925 bp, Zea Mays
gggaggatctcctcctccaaagaacagggtggacggacgaacgaaccaaatttgggcaagaaaggcccgggcgcgacgtccatggccgacgagggaagcgaggccgaggcgctcgagaaagacggcggcaaggcttcttcaccttcggggccaggttcttggtcaggcgttcctgccgctctccttcctcccgtgtcgtcagaggaagccgcgaacagcacgctggaatcaggcggtcttgaggacgaggagctacaggtgcaggatgcagttgccagtggttccaagaggagcaaagactctgccgccgccgccgccgccacacgcagcgccaatgtcagctcaccctctgtggttcactctcaccatgccatcctccctgctcccgcgcagcggattccagaggttaagcaagcagactcggagacgacgccggcgcgggagcgggagtggaagccgctgtgcgacgtcacctcgaaccggcgcatcgactggtgcgagctggacggcgacgtccgcgtggtcggcgccaacgccagcgtgacgctggtggcgccgccgggcgcggacaaccggaccttccgcgcggagtcgtggcgcatcaagccgtacccgcgcaaggcggacccgaacgcgatgcgcttcgtgcgcgtgctgacggtgcggtcggtggcgtcgggctccggcgaggcggcgtgcacggacggcggcgacgacgacgtgccggcgctggtgttctcggaccgcgggtacacgggcaactacttccacgcgttcacggacgtgatcctgccgctgttcctgacggcgcggcggtacgcgggcgaggtgcggctgctggtggccgacctccagccgtggtgggtgggcaagttcctgcccgtgttcaggagcatctccaagtacgagctggtggacctggaccgcgacccgcgcgtgcgctgcttccgccacgtccaggtggggctcaccagccacgccgacttcagcatcgacccgcgccgcgcgcccaacggctactccatgctggacttcacccggttcatgcgcgccgcctacgggctcccgcgcggcgacgtcgtcgcggcggcgccggcgaggcggccgaggctgctggtggtggcgcgcgcgcggacgcggcggttcgtcaacacggaggagatcgtgcgcggcgccgaggccgtcgggttcgaggcggtggtgtcggaagggacgcacgaggtggcgcccttcgcggagctggccaacggctgcgacgccatcatgggcgtgcacggcgccgggctgaccaacatggtgttcctgcccacgggcggggtggtgatccaggtggtgccgctgggagggctggagttcgtggccggatacttccgaggcccgtccgtggacatggggctgcgctacctcgagtaccggatcgagccggaggagagcacgctggtggaccagtacccgcgcgaccaccccatcttcacggaccccaacgggatcaagagcaagggctgggagtccctcaaggacgcctacctcgacaagcaggacgtgaggctggacatggagaggttccggccgacgctccaggaggccatcgcgcacctcaggaaggccaaggccaaggccaatggcgacggaaacaactaggcatcgccgtgcgtatgtagcgtgttcattcgtcctcttattaatctactcttctttttcttctttccttttcgggttatgtcggtgtatgtagcgtgcagaaatcgagcaaatgtatgatatgtggcagggaaagaagctagagcgaataatatattctctctcttgtcatccagttttcgattgaatggcgtatgccaagtgatcaggtgaaggtcgacccggaaatttggttttgccacaataatgggaagattggcgaggccaaatatattagttttggg

SEQ ID NO: 18998 - DNA, 104 bp, Zea Mays
cgcccaggcagacgtgccctccgccagaaggcttcgggcgcaacttgcgttcaaaaactcgatggttcgcgggattctgcaatcacaccaggtatcgcattttg

SEQ ID NO: 18999 - DNA, 1173 bp, Zea Mays
cctacgtggtcatccacactcccctcggcatcccgcatcccctcgtccccggacccgccgcactactgctataggcgcatccccggcgccttcgcacactctctccccggccacttcccaaatccgcccgccattcatgcacccttctgtgcactgtcagcgccaccattagctcgcagctcaagctcgccactaccattttggtcggttcttgaggaaatcgatcgaaccgttggagtgccaccactggcagaggctgttgcattcttgagttgagcaggaagaggagaggaagcaatggctctgtcgacgttctctgtcccaaggggattcctcggtgtgccggctcaggactcccatttcgcttcggcggtcgagctccatgtcaacaagctgctccaggccaggcctatcaatctcaagcctcggcggaggccggcatgcgtgtcggcgtcgctgtcgtcggagcgcgaggcggagtactactcgcagaggccgcccacgccgctgctggacaccatcaactaccccgtccacatgaagaacctgtctgtgaaggagctgcggcagctggccgacgagctccggtccgacgtcatcttccacgtctccaagaccggcggccacctcgggtccagcctcggcgtggtggagctcaccgtcgcgctgcactacgtcttcaacgcgccgcaggaccgcatcctctgggacgtcggccaccagtcgtacccgcacaagatcctgacggggcggcgcgacaagatgccgacgatgcggcagaccaacggcctggcgggcttcaccaagcgcgccgagagcgagtacgacagcttcggcacgggccacagctccaccaccatctccgcggcgctcgggatggcggtgggccgggacctcaagggcggcaagaacaacgtggtcgcggtgatcggcgacggcgccatgacggccgggcaggcgtacgaggccatgaacaacgccgggtacctggactccgacatgatcgtcatcctcaacgacaacaagcaggtgtccttgcccacggcgacgctcgacgggccggtgccgcccgtgggcgcgctcagcagcgccctcagcaagctgcagtcaagcaggccgctcagggagctcagggaggtggccaagtcatcgggcagcagcagacgtacatga

SEQ ID NO: 19000 - DNA, 1340 bp, Zea Mays
atcaggacaagtccagcagtcctagtctatctctctgtctcttttgacgctaggtgaacaaggacgagtacctgtacttctgctgaagcttgacgaccccgtccctagaagaaaaccagctatcgtgttcctgcacagctcttacaagtgcaaagagtggctgcgcccactgcttgaggcatatgcttccaagggctacgtctgtgtggctattgactcgcgctatcacggcgaaagggccagcaatgaaaccacttacatagatgcactgaaatcggcttggcggaatggggatacaatgcctttcgtttttgacacggtgtgggacttggtaaagcttggagactacctcggcgagagggaggacgtggatccctgtagggttgggatcaccggcgaatcgctgggagggatgcacgcgtggtttgctgcttttgtggacacacggtacagtgtcgtcgttcctatcatcggtgttcagggattcaggtgggccattgacaacaacatgtggctggctagggtgaatagcataaggcctttatttgaagaagcaagaattgacttaggaaagagcgaattagatacagaagttgttgaaagggtttgggaaaagatagcaccaggcctggactcgcaatttgatgccccctattcacttcctttgcttgcaccacggccgttgctacttctaaatggcgctgaagatcctcgttgcccaataagtggtttaggagaagctatttcaaaaactgctaaagcttacgaagaatctggttgcgcggagaagttcatgtattatagtcttaaagaagaatttggagagttgtagcatatcaaatctgggccctttttaaaagccacccaagataagatcatggacttttggagttttctccaagtagagggtctaggcatgcaaattattataatcctcatcactttacaatgcaatgaggaatgtaggttgttattcaaccaaaaatatcatatatttagatatcttcgtactcactctgttcttttttatttatcgtgttttagttcaataatgaactatcgaacgataatattcgagaatgaagttagcatattttatggacgcaaactagaactgattattgctggtgagtgacagaaaagtagcactgactaccagctaggtctaatcggctagcgttttaggttgtctgcagtggggcactcaacgtaccgagatagcgtaataaattcgctacagcaaagcactgcatgtgctaccctattttaccatagggtgcacgaacgacgcgtcgatccactgcatgcgggtgtacgtgtatagaagagaattgaaaaaa

SEQ ID NO: 19001 - DNA, 739 bp, Zea Mays
cccgaattcgcccaccaaggccgatcccaggctcccctcatttccccctccccttcctctctatgacgggcgggccccaccccggccttccctttcctccagccgcacgggcacgcgcccagcgcgccgccgccacaggcagccgaaccggccgcgcctctcacctcctcgtcctttccccttccctcggaagtggagcactagcatcgttctctctcccttcctcttccccacttcctctccccattcactccgagggaaacggccggcgccactaatggcagccgccgacctctcccttcccggatttctctctccctctcctttctctctataaatatcgacgccgagcccccatggatccgttccccggccacccaagctcgccccacgccatctcctctctcgccgctctcgccgacgccctgctcaccaacgaccggagccgctggagcgccatcgccatcgaggaccactaaagcgccgccgtcgaggaccgcccggagcacgccaactgcctccctttcttctagccgtgcccctgctccctggctggccccctgctcttcgatttcgtccctctgcaaggactagtggaacaagaagctgatgaggaagactttgacaaagatgttaacgagtacttagtctagcgacgctccggtcatcttctgtgggagatgcctatgatatttctgttgtactttgatgattataatatttaagactcttatgtctg

SEQ ID NO: 19002 - DNA, 1104 bp, Zea Mays
ttgaatggttctgtgtggaggctgggagctcttctagtcctaaagtgcttttaattcacggcttgccatcgcaggcatactcttaccgcaatgtgatgcctgtactggcggacaaatatcatgccattgcttttgattggctcgggtttggattttctgataagcctcaaccaaaatatggttttgactatacacttgatgagtatacttcatccttggaatttctagtcaatgctgttgctcctgataagctctctattgttgttcagggctactttgctccggttgcagtcaaatatgctagtgaacaccaagacaaattgaatcatcttgtactagtgaatccaccaataaccgataaacatttgaaccttccatccaccctggcttcgttcagcaacttcttgttgggtgagatattttctcaggatcctctcagagctagtgataaggtattgactagttgtggtccatacatgatgaaggaagaagatgctatggtgtatagaaggccataccttgtctctggttcctcggggtttgcacttaatgcaataagcaaagctatgaaaaaggaccttaaggcttatattgaatccatgagaagcatattaagaagcagttcgtggaaaacaaagacaacagtatgctggggcatgagagatcgttggctaagctatgatggggtggaagaattttttggaggcctaaaccagaagattgtagaactgccaatggcggggcaccatgtgcaggaggaccgtggtgaagaattaggcaatataatcaaaagtatactgagatgatgactgcggatcgcgtgcagggggtgaggctctagagcgtgccaagaaccagatgctttacgaggggtcaaaatgtggcgaagcaataggatacgaaaaattgagtatgatgcacggggcaatccgctctatgcatcgatttttatcaagagaacgccaccctgaactcaagcggcgatgtggaacattttcagacaacaacaattgattgacgaccttgcgaaatctttttttttctcctaaactaaagtagcagaactaatgaaatatatccaaaaaaaaggaaggaagaaagaaa

SEQ ID NO: 19003 - DNA, 2235 bp, Zea Mays
cccgcgccttcgtcgtcaaggccggggttcctgcggccgcgtctccctcccctcgcccgtacccacacttgattaacgtgtcagctcgctaccggaggccctcgccaactcgactcgtactcccgttcccggcggcgatccggccggcaccggaaccctagggttccaacgaagcaggaaattaggaatgatgagtcatcaacagcaaattgcccctcctagtaggggttctgtgaatggattcccccatctaaagctggatagggtgggtagtggaaggcatgaaagtaaaatcgtgaggtcatcatctggcggttttaccaattcaggaaatgacatcaaactagggcatggaagccattcgagggaccgactaatctatgttctaacacaacttattgggcatcatgtcaacgtgcatgtgaaaaatggctctataatatctggaattttccatgcaacaaactctgacaaagacttcggagtagtcttaaaaatggctcaggtcataaaggatggttctgccagaggacaaagatttgcttctgatgttgtaaagaaacctgagactatgataataccagcaagggagcttgtacaagtttttgccaaggatgtagcacttggcggtgatgagctgccaaaaggtcctggtcatgacaaaaggaaggacttgctgattgattctgccatttcccgctctcattaccttgaagagagggaacttgagcgctgggcaccagatgaaggagattcagagtgtatcgaactggagaagtatgacagaaagggaaataggagctgggatcagttcgaaaccaatgcagccttgtttggggtaaagagtacattcaatgaagaaatttataccacaaagcttgagagaggtcctcatatgagagagcttgaaaagcatgcttcgagaatagctagagaaatagaaggagaagataccaaagatattcatcttgcagaggagagaggcttattcctgggtgatgacttggaccatgatgaagagataaaatattcagcagtgcgtagagacaccgataacagcaagtacaagccaccatttactaatgtcccaagcagtacataccaagttgatttgtttaacaggacagtcaatattgttcccaaggatttgctgggatgttcatcaacaatggatgaagaatcatcatcccacatatttgatgatattgatgcatctgccactattcaaaccaatagcgttagacagccaacatctgattaccttccagatagactctcgtccaatgatgaaaacaggttggacagaaagctgagcaaagggagtaatgaaaatatggataagagaaagttgcaacctgagaataatttatctgatggtgcaagacctcttatttctgaagggtcggatgggccaccctcaagttcatatgcatatgaaccctcatcttctggccaaggattcaaatctccagaaacacctgatttgacagtatctgtcaaacatccttctaagacggaacatgtgattaactctcaaagacctggtagttcaacatcgtcaacatcagagcgcattgctgcaaactcagctgcgagtgctcttggcttgtcaccaagctcttcaataggatcccttacctctgaaaaatcaactttgaaccctaatgctaaggaattcaagctaaatcctaatgccaagagtttcactccgtcagcatctttgaggccaccacaccctgcatcatctgatgcatcatattactatactaataacattccagcagcaccacttggacctggtttgccagtgggcatggggttcccaccggcatatggcacccagcctgtcatgtataatgctcaacctggagcatcacagcagggttacatgcatcctgttggtctacagtatgggcagcagatgatgatgggaggagggcagaatcgtcctgtttattattatgcgcctgagatgcaacaatacagaggaagaaacttctagatatactattttgaactgctgctaggtgaaagtcacaacaatccccacaagtgggataatgacccggcaaaagccgctattagaatggaaagaactggtgatgatctccctgactgtcgctccgattccttggacaaaaagccccatcgactttgtgttgcttggttgcctggtcaaaaagctcttcattgttctgtcactgttgctcagaagcagaggacggagaatctccc

SEQ ID NO: 19004 - DNA, 2694 bp, Zea Mays
ctcatcaaatcacgattcacataaaaaaggtgtgggagcccgatccgatcgccagatccgccggcctgtgcgccgactcgggcgtccttccacagatcctcttccttctatcgtaggctcgccctcgccgctcgctggagcggaggtctctccctgcagcccatactccttgattcattctattgcctcgccgccggtaagggattttgatctgcacactctgctgctatgaattgatcggagagccgtcaaattcaaattattattatcccgacccgaccggtttgtcgccgattcgattccattgcccttgcccccgtcccccgtgcgtgtcaattatgcgatccgagatgtattgagcttagaaccagggggtctcaaattgagttgatcaggcttcttgctccgcatggtggacgctgctgtttctggcagcgaagatctggcggaatcgcccgagcttcagcttaacgcattgcgagtccttctcggctctatggataagcaggagccagtagccaatggtgaacaaacgataggtcttgctgagaagccgaaggagctgcctgttgccagtaaggatgagaaagcaactgtgcccccgattttagttgattcaaatgctttcaatctaccaagtgaaggccaaacccaagctggcacatctaacatggatgggggccataatggtgcacacaacttttatgcttctcaggcacaaccattctattaccaaggctccggttctgaaaaccctacacaagcatgggatacatatcctccctacatgagtgttgaaggattggaagtgggtccaccagttgtatacaatgaggacccctcattgatgttccatggtggctatggttacgacccatattattctcctattgcaacacctgtaccaaatgctgttagtggagggtgatacaataatgccgattgacccaacacaaggagcttttatcgctgataccctgagtccaaacagcttcctgtttggcccaagacctgaatggttcagatcttcagaaggaactgggtcatttccatcacctgcagcttcacctcaaccttctaggggtgttccagggtcctatgaccaaaacaactttccaatggcttcaagaatgtcatcacctcaccagaagcccttctatggtttgagatccacaactgactcctatggaaggggtttttctcatggtggaatgttcccacaggccagtaattatgggggatccgtcaccagctttggccttaatggtagaagtttgatctcaaccgagaaagggcgcaggaggggaaggggcaatgcacttatttgcagctgcaatggtcctcttgactttcttaatgagcaaagtcggggtccacgtgcaactaagcctaagaagcaaccagaggttgacagtaaggatgaggtgcctactacaggagttggtcgtgagttatacaacaagcctgactttgttatggagtacacgaatgcgaggtttttcatcataaaatcgtacagcgaagataatgtgcacaagagtgtcaaatatggtgtttgggctagcaccacaaatggaaacaagaaactggactcagcctatcgcgaagctaaggagaaaggagagcactgtcccattttcctgttattttcggtgaatgccagtgcacaattctgtggtgttgctgagatgattggaccagtggactttgagaaaagtgtggattactggcagcaagataagtggactggtcaattccctgtgaagtggcacatagtgaaggatgttcccaataatcttttccgacatataattcttgaaaacaacgacaataaacctgtaacaaacagcagagatacacaggaggtgaaactagagcaaggaatggagatgctgaagatctttaagaaccatgatgatgatgcatcaatccttgacgactttgagttttacgaggagcgtgagaaagcgctgcaggaaaataaggcacgcctgcatcagcaacatctacccagttctattgttattgagcccaagaaacccttgactgcacccagtgacctcgtgggccatatcaccaagagttttgctgaggctgtgcggcttggtgaggccaagactgtaagccatttgactgagaaggtttctgggggtgatccgtctattcctgtgaagcatgttgaagttaagcagagtggtttatcttaggaactcttgatcgatgtgaatgaactgtaccaaaaattcacccatacgcttcctgatcaaaatgtcgggaatgcatatgcagatggatgatgatgaaacccaagacatcggcaaaagcatgcatgcacactagggtaggtctttgccaaccttggaagcatagtttcttgaatagtttctctctttttttcttctttcttcctagtattttctccccttctcttcgcatcatatgatgattccttagtgtctagcctcaaggagagttgctgtttttgtgtaagcctctgtaagtttcctgttccatcacatatgagtaaggcctttttgtttctttttatttaagtaaaagatccatcttttatgtactgtcgtggcagttttattatactatgtctgaacaaggcctattcactatgtaagcaaaacataaacgctatccaggtgacctggttgtgatgactacagtaataagtaactgaataat

SEQ ID NO: 19005 - DNA, 1591 bp, Zea Mays
gctcaattcccgccaaatctgctgaaatccgtggtgccccaacaaaaaaagcgggccacacccacactccgcagcaaaaccatactcgagtcgggctcggggctgacactagcgatataattggtgctgctgccgggctcctgtgtcctgtctcctttcctacgcggctacgccggtccgcccactgactgtacgacagcacttccgccgcagttcacttgctctctgcctcctcttcgctcttctgctcacataaccacggccgtctccccaacgtggtgctcgcaccgcagccgcaatgtcgtggctccttgtcgccgcggtgcttgccggcttcgcgcttggtccctccgccggcacggaccacatcgttggggccaaccatgggtggaaccccaacatcaactactccctctggtccggcaaccagaccttctacgtcggcgacctcatctcgttccggtatcagaaggggacgcataacgtgttcgaggtgaacgagacggggtacgacaattgcaccatggctggggtcgccggcaactggacctccggcaaggacttcatcccactccccgccgcccgccgctactactttgtctgcggcaacggcttctgcctgcaaggcatgaaggtcgccatcactgtccacccgctcccgcacaacgctacctccaagggctccagcagccatgcggacaccggcgcacaggaagaggccgccgcggcggcgctcgggaccaggagcgccgcgtggctggcgacgctcgcagtcgccgcagctgcagtggctgctttctgctaggagccttattccatgcattcactgaacattgttctagtatttttgtttttgctcccatctcattcggatctttcacttttctgcaagcaaatctgcttgagaagctaaactacccttccgacaactcatcaatgcatttcacaaaaaaaccaatttaagcaccaacatgccatgtattacaggttgcgacgactctgaacactagaaagaaggaagcaacaaaccctataagagattgtcgaatagaatcccttttcttatatacaccacctcactatccttttttgtctattatccaccggttagagctccacagcacggtgtgccactcaacgcctacttcggggggtaatctgggccatcgacctcgctgttcacaaaggcaactcaaattctgaaagaataacttgggattttacaacgctgagatttcaaacgctgctagtgtagtagcttcagtcaaaggaaagcttacttgggccgcatcccttctgcagtggtagcagactgctcagcgctagaagtagcaacagctaaagctggtttcttgaattgaaccacaataaccgtcatgttatcacatccttcgccaccagatgtaggtgccacacagcggttgagcaacttctcacacacactagatatcttatcctcctgttaagttattaggcgcatgagggaacaatttaaagtgtaaaggtatcaaacacaacagtgtgctccacttacggtctttagctgtttatgtacaaaatcaactacttcttgacttgacatgcaatccca

SEQ ID NO: 19006 - DNA, 2137 bp, Zea Mays
gcaaaaaggcccccgaattctcctcgcccgggcacaacctcgctccagagtccaggccagaccagcaggccgcctttccgctcgagcacccacgcaatcatcaccgccgtcttcctctcgctcttctcttccccttccattcctcggcaccacgtcctcgggaaccccgcatgccctccgcacaaggcgccgcctgttcccggtgaccgcggggccgagatcggcgcgccatggccgcgcccggaggcctggaccaggactgtgcacaggacgccgccattaagctcttcggccgcagcatcccggttctccactcctccgtcttcgccgccaccgctgcggccgcatccgaggttagcaccaaattatcaaatgatgttagaagcaatgatggcatgccatgccttccaaacatgtctttgattgtcaaaacaaatcccttcccttccaagagcaatatgaagaatggtttacaggcaatcagcagtcagcatgggaaaatggaagctgattccaactctgaggaagctaagaatagtttacaagctatcatcagtcagcctgggaaaagatacgattccaagtctgaggaagctaagactgaatctggtggatctggccaagagaaggtactcaagaagccagataagattctgccttgccctcgctgcaatagtatggaaacaaagttctgctacttcaacaattacaacgtgaaccagcccaggcatttctgccgaaactgcaagaggtactggactgctggggggactatgagaaatgtccctgtaggttctggtagacgcagaaataaggatccatctcatcaccatcatttcaccaaggtgtgtgattataccattgctactaatggagatgtttctgatgcaactcagcgccagtccgttgcagccaagccatgtctccttcaaggttcaggaaaacaaaatgaaacagcgtgcaagtctgtatctccagtcagtaatattaaagagcagaacaatgccgaccttatttccttggtctctggtgataataaggaagagaaatcatgtgcatcttctgcagtggtatctggttcctccgaaaattggatgccagaaaatacagttaaaaaggaggaggataatacttcagcgtacggtaatggtgtgaaagtacctgatcacaaaatgcagcctcaccatgctggacctgtttcggtgttctccagaaatcctgctgcagtcatggcgactaatcagtgctcagaagatggtattcatacgccgggaaatggtacggtcagtcctctttcactgccaccactacccatggtaccaaccccaggaatttgtgcacctgctgttccattccctttccctctcgtgccagccttcgtgagctgcattcctggctggccaagtggactatggggtgcaccatggcctggaagtagtgcccctacattactatctcttcctccaaacggtttagctctttcaggaagcaactctggggtgttaggaaagcatacaagggtagctaatttgcaggaagaacagaaggcagaaaagaagttttgggtccctaaagctctccgaattgacaacccagaagaggcagcaaagagttcgatctgggcctctcttggtatcaagcctgatgacagaatcatattcaagtctttccagtccaaggatctgaaaaatagtgcgactaagacgccagaatccctgcaggccaatccagcagcgttttcccgctctcagacatttcaggagagggcctgatacaaaaataaagtgtcctcaaaacaaaggataccagaggatggtcaatgttcctatttaagctttttcttgagttgatctgtcgctaagcgcagcagtttggcaatcaactcaggcctggccaagatttacattttttttctttctagcgatagctaggttggtgtgaagattctgactgctcaaggagcgcttatgtaaatacagtaggcctgtgaattgatgttgaatgttgatagtcttttacctggcaccggttaatgttctaatgtactccctctcttctcaattatagttataagtcattctggttttcgtaaacacatattttgctattctaattcatcctataaaaaagaaaaaaa

SEQ ID NO: 19007 - DNA, 1735 bp, Zea Mays
catggttcattgattggtggagccatagagaatcaccaattacttttgaatataactgaacttcttctcgcccctccaacccttcatgatgcttagataatatacagtgctgggttttagcactgttttgagtttttaaattgagctaaggcttcagtgttagtcttgaaagatgaacggttcaagtggttcccaagggcatcatgtcagtggagagaagaagcaagtgtgtcatgttagccggcccattcttaacaatggaccaaagcaccgtccattgacccccatgaggcgatgccgtggtgtagcatgtgtagtgattatactgtcaacagcattcctgttggtagtttacttggctcctattactacttttgctgtgcggctgttcagtgtgcattacagccgaaaggcgacttcctttctatttggaatgtggttatctttatggccgttcttgtttgagaagataaacaaaaccaaggttgtcttctccggtgaaaatgtgcctccaaaacgacgtgtattgttatttgctaaccacaggaccgaggttgactggatgtacttgtgggatcttgcactgaggaaaggccatttaggatatatcaagtacatacttaagagcagcttgatgaagttgcctatttttagctgggcatttcacatttttgagtttatcccggtagaacggaaatgggagattgatgaagcaattattcagaacaagctatcaaaatttaagaacccgagagatcctatctggttggcggtttttcctgaaggcacggattatactgagaagaaatgcatcatgagtcaagagtatgcttcagaacatggcttgcctatgctagaacatgtcctccttccaaagacaaagggcttcatttgttgtttgcaagagctgaggagttccttagatgcagtttatgatgtcacaatagcatacaagcatcgactcccagattttctggacaatgtgtatggcgttgatccttctgaagtccacatccacgtcagaatggttcagctccatcacatccccacaacagaagacaagataacagaatggatggtagagaggtttaggcagaaggaccagctcctggcagatttcttcatgaaggggcactttcctgatgaaggaactgaaggagatctgtcgacgccgaagtgcctggcaaacttcttaacagtagtatgcttgacggccatctgtttgtacctaactcttttctcatttgtgtggttcaaggtctatgttgtagcaagctgcgcttacctctcatttgttacctattactccatactaccaccccaactgataggttcaccagagggtgatgtcaaggccaaaaaggttgtgtagatgttgatgtaacttgccatgaaaactgtacatccgcaaacgatttttactgctggagtttctgccttgtgacatttaaggttccctttctgcagtaggaggtatgaatgtatgatagtgcgtatgtaggaattttctgtgattcatcagtgtgtgagggccctatctgaaggcagtaaactgattttagatatatgttcttaacatttttataaacaaaactagaccacatttgttacaaatattgaagatttatttatttattttatttgatctttgttctgatgcaaacaatcaaacattagctatatccaacttgaatatattaatacaaacaaccaaacaaaaacaaccaaacaaacg

SEQ ID NO: 19008 - DNA, 3617 bp, Zea Mays
agaaaattgacgctgtagaaaattttatgatcacaaacattgaaagcacacgacagcctcaaccactcgtacggcaacaaatggtcgttgtgaattgaagtagcttggaagagcagtgttatgcacagcgatgggagacaatgtcctaaaactcagggtgggcttctcagggtaaactgcattatggattctggcaacagttcatgctctagaacacgaagtgggcttctaagattaaagggcttactggattccagtggtgtttcgagttctagaactcgaagtggccttttaaggataaagagctttgtggattccagtgatggttcatgttcgaggtcacaaagtgaccatgtaagatgtagccctcctattgtcgaggctataataaatgacgaagcagtcttgaaggagtctcctgatggattgatgaaaaaagagatacctgttaggactcaaaatgagtttgttagacagaactctgctgacaaggctgtaaccaaggacgattcaggcatgcggacgcttcccaatgggagtttgagtgaagatatgccttctagaacacggagtgggctggtcaggagaagccctactgttaagactttaagcaaggatcaatcagtcattaatgggctggctgatgggtcactgaaagaagacatgcctcttggaacacggagtggccttgtcagaggaacccttgctgccaagactcctgatggatggatgaagaatgacaaggctgctggaacacggagtggtcttggtggtggaagattggtagccaagactgtaagcaaggacaaaagggctgttgagggtttgcctgatggatggcgaaaagaatacaggccaaggaagaatggttcatttctggatgtgtactacattgatccagtcagtggatatgaatttcgctcttttaaggatgtgcaccgttatcttgaaactggagatattagacagtgcgccgtgagaccaaagaagagtaccatctgcgaagttcatataatagaaagtcaaactcatgcaagtgcatcaccacaacacacgaggcctggtactgcggataagggtattcagtgtgaaatattaacttcggatggtatcatggtaccattgggggaactgattgctccatataatggaaatgatactgaacatactgtgttaccagagcctgagaacttgaaagcaattcaagggtctgacaacaagcttgagacttcggaacacgtgagtgttcaaccggtttctgcacgtaatggttcaaggcaaaccaaatctgttaaaaggaaagaacgaaatgcagaggtcaaatccaagaagcgcaaaaccagttctgctgtgactgctgttcgagcgtcgccccgcttagctgcattgaaggttcagcttgaagtgagcatcaaacatgaagatgccatggttagcataaatcatgtggaccaggtacagactatagaagagagcgccattgatcaggcacacaaaagccaatcgggctctgttgatgagatacatggtaatctggaaagcactttcagtcagttacagttgagccaagcagacactgctaatggaatgcaggctatgcaggaaaacactaccattcattcacaaccaagccaattggatactctgaatcctacacacagaagccaggagaatagtggcaatcagttacaatcggtgctcacagattcttcgattccaaaacgaaccacacaggaatgcactatagacgagccaagccagccaggcataaatcatatacacacagatcaggagttcactgggaatcaatttcggtcgaacctaccagatgacactgttatttcattaagggatattgaagaatgcacagcccactcaaagccaagcaataccgacagtactggacaaattcaggccaatgaggaaaacactgccaatcaagtacagtcgagcctaacagacacagttattccagtaccggttattcaggaatatgctactggttattcacagctgagcaaagctaacacctcaaataaaaaacaggccaatcaggaatacatagctgatcaagtacaatcgagcctaacagacactgtcattccagtacaagttattaaggaatacacaactggttatccacatattaataaagctgacatttcaaatcaaatgcaggccaatcaagaaaacactgatgatcacttatatttaagtcaagtaggctgtgtcactcaaatgcagataattgaggaaaatttgcccaagcaacctcagctgagccaatcaggcactgggggtagaatacaaattgatctggaaagcactaccaatcacttgctaccaaactatgatgaaaattctatgttgcaatgtggtttatcttgggctcctgaacagaacagcggagcccttagtacagatttctggaaaaatgttgaaactcaggcttcatcggtttccatgccaataaatggagcacctgttgcaagctttccagcaaatgttagattccacaatgcagcagcagcagcagaacctgctttaccgccacaggttgctccagctgaagcaggttctgatcagtcggggttggcctttcaatctgttttcggaaacatctggtcggatccttgcatcgagtttgcttttaagacccttacaggtgacattcctgttctggacgacacaacggctgtcacagactactttccggagcaacaagacttgaataaaggcccagcaccaaaccgtgcaggttctgttgataattccagaaaccacacacaagtcgatgtgaaccttccaccacctgctctggatgatttctacaatggcaattggttccctccccaatgaattcagtatgggaggaaacaaatgcaataacattttgtacctgtgaaaaacaaatcagagaaggctaatggccagattacaaagcaatggtcgtgcgctaatgatttctacaatgacagttggttccctcccccaatgaattccgtgtagggaggggaaaaatgcaatgacatttttttagctgcggaaaggcaaatcagagaaggctagcggccaaatcccaaagaatcaatcgtgcactctgaactgaatgtgtcatcccggaggacacattttgtaaaaaaaaaaaaacagtagctttatagccttattagactgttaaaacacactcgactgatctggttccatcaacaaggcttcacggagactgtcgagtacctgatctgggtcatgttttccatagtttgcttctgtgcagttgcctaataagcccattcgttgtaaactagctagttctaacttaagaaagctccctcagggcctatgcatgggtctctgattattgtgcagatgaactgttgttctggacattttgaacatgcaaatgtggaagcgtcactgtcagttgaattatgtttcagccgaattgagaagcgctaatccgctgtttgtgtagagtttgctgaatgttgatgcttgtgcttggttacttggatcagtgttttttagggggctcggcttgcagtaacgatgcaccttgttatatatccagaaaaccttggttgtcactgttttactttcatcacttacaacttgac

SEQ ID NO: 19009 - DNA, 2859 bp, Zea Mays
atgatcctgttgaagttgctgcggcctcatcagacattggcactgataagctaaaagaaaattctttggggttccccttggctgaagattctgcagggtcaacagacgactatgaaaattcttcacatacttcagatggtatttttactgaaaagaatgatccacacggtgctcatgaaatcaatagctttaggagctcaaatgacttacccctttgttctaccagtcaaagtcctacaccagaaaaaggtgcccattgggttaaacatcttttatcacaagggagcaatgattgggctcatagctcaagtcctgggtattgtgctgataaagatttagctgcggctcatgatgagaataaccggctcaggacaagattggaggtggctgagtcagcattttctcagcttaagacagaagcaacatctctggagcatgttactgacaagttaggcactgagacacagggccttgctcaacagcttgctgttgaacttatgtcacgtaatcaactcactactgaagtgtccttgctaagaacagaatgttctaatctgaaacaagagttggaagaaataaaatcttctaaacacttacagaacaagtttgacgtagaaggtaaaactatgactaagtatggtaaggatattcttgctacagagtccattcatcatctccaaactgaatggctgcaaggtttgctacttcttgaaagtaaactgcagcagaccagaaacaatgccctccatggactacaagcaagtgatcttgattttcttcttgctgatctgggggcacttcaacgtgtcattgagaacctcaagcaaggtgttcagccaggtcaaatgaaagaaaatcacaatgcagaacatttggttccaattgctggttatctatcaaactcaggacatgatgataccatcaagaaaagttccggtggtagtacaggcacaatggaggagaaaatgtgtgagctcctgcagaagctggaggactcaaaaactgagaaggagaatctcctggagaagatgagtcagatggagcgctactatgaatcttttatccataagcttgaggagagccagaagcagacaacaattgaattagaaaatctcaagaaagagcataactcttgcttttatacagtttctgtcctacaagctcagaagcaaaaaatgcacgaggaaatgaatgatcaattaatgagatttgtggaggaccgaacagctttagaagctcaaaataaggagtttgagaggagggctgttgctacagaaactgcactcaagagggttcgattcaattattctgcagctgtggaacgtctacagaaagaccttgagttactgtcgtttcaggttctctctatgtacgagtcaaatgaaactcttgccaagcaatcattactagaagattttgatagtttgcctgaggaacactctgccgtggaagatttatgtggcaataatgaacatgagcaatacaggcctggtgtcaaacaaatcagacctgaaggtctatatgcagagaaagaaactgatggccagaaaaatcttattcgggcactcaagattgaagacctccgtgcgaggtcagagtttcaagcacatactgattcacgggggaaccactcaaacttggaagggccaagaagggcctatagtgctatggagtctgagcatttagagatgtttatttctaatatcgagtggcagatattctctgatgtattacgtgagtctcactatgctacattggatatcattaaatgcatgcagggaaggttggacgtgttagaaatgcagcttcatgactctaatgatgctaggcaatctctagtgctcaagttgaactctgcactggcccaagccaaaagtgtcaaagagagcgaagcaggatatgttttgaagtgtgatgatctgactgtgaagaaccaaatattagaagcaaagcttcatgatattacagttgaaaatgctttgcttatggaaaagctcacggagtctgaaagacttgttcaggaacataaaacttgtgaaagcaagtacaaggtctgtactgaggaagttacgagattggacaaccttttaatcaaagaaactctactaaccaaccagcttaaggatgagctcacttcactaagagaaagttttgaggccatgaaagatgcgttaaataagcaatcatccataaacaatgatatacaaatgatttctacatcccttcaagatcaactgggtgacctatgctctaaaattatatcttttaacaaggaagcaaacatttcaggcttagaagaggcatctttgctgcatgaacttgagagtaagaattacgctgctgtgatgaaaagattggaatccttccatcagcaaacatgtgacaaggtacttcatcttcttgaggagaaggaagtaatggaaaaaatgtgtgatgctcttcagagaaggtcagagaaggctgagacaaaattgcatggtatggagcagcagtttatatgtgatatggatgccacaaaacagaagctaaacttgtctgaggaaattgtagagaagcttcagcaagaactccaggacatggctcacaaacttaggatttgctccgattctcaagaaaaatattctgttaccaatggtgatttaacatcaaaattgtcacaaatggaaattgagctacatcatgcaactagtgagaacaaggctcttgttgaaaaattgaaagagtttagtgttactgtagaggaactcgagaggacaaaatggtgtcttgtacaacatgaggaggatacccgtacctttggaccagtcattacagtctaaacatgaaattgttatgcattatggagagcgtaatctaatg

SEQ ID NO: 19010 - DNA, 938 bp, Zea Mays
cccacaaacacacacacacagaccatggtgatggaggagacgatagacgacagtgagatgagtttgtcgaacatggtgctgggcttcctggaagatttcgagagggacgagcgacggccggagaacgacgacgacaacaacgaggaagagggctccagcggcggcgacaccgccgagagcaaggccttctggcagacccaacacttgcagctgcgcgcgagcacagctacgtggaggtggcggtgcagacgaggagcggcaagtccgtgcgcgtggtggtggagctcagcttccgcgccgagttcgaggtggcgcgcgccagcgccggctaccgcgcgctggtgaccgcgctgcccgaggtgttcgtcggccgggccgaccggctgcgcggcgtcgtcaaggtcatgtgcgccgcggccaagcagtgcatgaaggataacaacatgcacatgggaccctggaggaagcacaagtacatgcaggccaagtggctcggcacgcccgagcggggagcggcggcggtggcggcggcggagacgccggtggtggcggttccgtcggtgacggtcggctcgccagagaagcagaccaagttcagggcgtccatgctgaccttcgactttggccggaccgcgctggaggtcgcgtgatgaacgcacatacgctgccggtcgagcggcattagtagttctctaaatatagacagaggaggtaactttcgagaagaaaaaaaagttatatagagtgtacctgggttttaggtttttgtcaggattcagaaagctgaatctgtaatatcaatcgagctaggtgtaaacagataaggcgagcttgtcacgcgtactccgatcgcgtcactgtaatggaaatgaagctaaaagatcatgggtgtcggttcacatgtcagtaacgaaatggataactgataacgttaaatt

SEQ ID NO: 19011 - DNA, 963 bp, Zea Mays
caatcgagcatctgttactcggtagtcgtgtccatctggagggctacagcagtgactacaccatccaggtgctggtgggctactgtgccgtgtacatattcatgcagacgttcatgatcccagggaccattttcatgtccctgcttgccggggccctctttgggcagctcggtggtctagccctggtgatctttgctgccactgccggtgcttcttcctgttatttcctgtccaagctagtagggaaaccactggtcttctcgttgtggccagacaagctcacgttcttccaaaagcaggttgcaaaaagaagagagaagctgctgaattacatgcttttcctgagagtcactccaacactgcccaatactttcatcaatttttcttcacctatagtgggtgtgccataccatactttcttctttgcgacggccattggcctcgtcccagctgcctatgtgactgtcagggtattccagcttctaatgtacccgttccatcagtcgatagcggtgctgttcctgatcgggcttgtttcggtggcgccaacgttgctgggcaagaacgagaagccaaccagcgcatcggacatggcagctaacaccaactgatcactagtacacgccactccagctctcttctcatgtacatacaaaagtccagcgtttggtagtggtggcttcgagactctggatcaaataggacatgtcgccggccacgaacatggcgagggtcccaatctgtagatctgtcgacacttctgggaaacttttgtgctgactgctgattttgcagaagtgatgtctcatgatcacctcatcgtgaatcttgctggcaaaacgggctgggaacatctctctttcggttgctttgttttacattgtttcgctgttgtatcttgcacacgtcaaccagattcaatcaatacagccgattcagtgattcattcatgaacgtttgctg

SEQ ID NO: 19012 - DNA, 978 bp, Zea Mays
aaacaacaagacaagggagaaggagcttctggccaaggaggccgagttgaacaggcgtgagaaggaaataaaaaggcgagaagacgccgcagcacgagctggcgttgtgttggaagagaaaaactggccaccgtttttccccatcatccataacgatattggcaacgagatacctgtccatctgcaaagtacactgtatgtcgcattcgcgtcactcttagggttggtcgtgtgcctgttttggaacataatctgcgttacggctgcctgggcaaaagggtcaggtcctaaaatatggtttctcgcaatcatatacttcattcttggatgccccggcgcctactacctttggtaccggccactataccgtgccatgaggaacgagagcgctcttaaatttggatggtttttcctattctacttggttcacatcgccttctgcgtgtacgcagctgtttctccttcgattctcttcgtggggaaatcgttgaccgggattttcccagcaatcagtttgataggcgacagcgtgattgtcgggatcttctacttcattggctttgcactgttctgcctagagtctttgctaagcatgtgtgtcattcagcgtgtttacctctacttccgaggaagtgggaaggaagcggagatgaggcgggaagcagcacgcagtgctgcgagggcagcattttgacgaaccgtgtgtgtatatatagcacggcgtgtgttttgttcatagtttgaagtgtctgtagatcaacatacatatgtagagtagcgttggtgtactgtaaatcttcagaatttttcttaccagtatttgagccctaatacaaataataaaattgtaatgatgatctcactcaaccttttaggaaaaaaatatatacttacattgtcaagggttgtactcatacccactcgcaaagatcttttttcccctaataccagcaaataataagttcttcaaaatttggg

SEQ ID NO: 19013 - DNA, 1359 bp, Zea Mays
gttttcttagacggaaaacggtagacggacggtgaggagctgtctaaggtttagacgtgtttagacggaattaaacggcctaaacggcaataaatccagagatggaagtcattaaagaccagatgaatagtatggatccaaaatcagtgcaggagggacaagctaaaatgaaagcgctgttcaaaaaacatggtgttagtccacttactccaatgaaaggactcctgatccaagggccaatattcatgagctttttctttgccatatcaaacatggttgagaaagtaccttcattcaaaggaggtggaacattgtggtttactgacctgacgactccagattctctttacatcttgcctatgttaacaggactgaccttcttggccacagtggagcttaacttgcaagaaggaatggagggaaatcctatggctggtaaaatgaagtacttttctagaggagtagctgttttgacagtcccatttacaatgaactttgccacggcagttttctgttactggacctcatcaaacatattcaccctgttatatggtcttgttatccggcgaccagctgtgaggaagtggtttgatcttcctgctttggaaaatacgcgttcgctcacggcaaagccagtattcaatatgtttggtggatccaaggcaataccagccgcacagtcaccagtagcgatcgcaggagcccagcaatctggtctggaccaacctgatgcttctgctcttggctataaggtcaaaaatcttgagaagaaagtgaaatccaggggtaaatctcggaaacacaggtaaaattttgtgcatctgtgccccagatgagcaatctgtacttccaccatcggaatgatggatacttgatttgtcctgatatgccccccaaaaatcagattttgtattaggaacctatcttttcgtcgtttttggctgcttttgttttgatttttcaggggggggcgggggtgaaataagccacataaatgtttgacttagtaccagagttgattatacacaaaatgtatttcagtaacttgtgatagttaaaacattggagggtcatcttccaaggattggtatgaaagctacgttgaagttcagggacagtcaatcaacttttgaggcaccattcgacattctgtagcaattggcaattaggttcaaagtgtgctgggcagaattttgtggcctgaatgaatattgagtttgtatgtactaaactgtcttagaataccatttacaggacgtttggatcctttcattttagaggaattggaattcactcaataaagtaacttatttagtttggaatttgacattccaccactttctaaaattcagatataaa

SEQ ID NO: 19014 - DNA, 972 bp, Zea Mays
ctttagtccaggtgtaatgtattggaagaggcgcctagcgaggataacccggaagaagatgaagaagctgagattggcatgtgggaggcagtaacatggcttgcggtgttaacattctgggtgtcttttctttctgagtacctagttaacgccattgagggagcatctgattcattgaacctaccggtggcttttatcagtgttattttgcttcctattgtgggcaatgcagctgaacatgcaagcgcaataatgtttgccatgaaagataagcttgacataacacttggtgttgcaattggttcatcaacacagatatcaatgtttgtgattccattttgtgttgttattggttggacgatgggacaaaagatggacttgaattttcagctatttgagacagcaactctcttcataacagtacttgtggtggcatttatgttacaggatggcactgcgaactacttgaaaggacttatgctgatcctatgttatctaatagttgctgccagtttctttgttcacgttgatccacaatcaagtgaaggctgaagccatatatcctgtaagtaacgcgccaaataccttttgagacttaataatcttgttttgttccgcctgtctcaagccgggttccttcatgaactgcagaaggaatttttgtattttgttttgtggatactgatgtgtactagggtagtctcgatgtatacagaaacaagaagtggcagcatgttatattcgattaattgtatgggttttctgttttccttgaaatttaactattgggctgaatgtaaatttgggtatatgatttgatgatgacagatgctagatctttcatcatttttttgtagttgatgatgtctgcatagtcacggttctgcatcaatgtttcttttccttccctagtgattgtgtacacttttgatggcagatcaattttatatggccggtcattgtaaaaaaaag

SEQ ID NO: 19015 - DNA, 1054 bp, Zea Mays
atggaggggagggaagaatagccacgtgagtttgctgttggcgagtgcgttaatgcagggaaagaagggagatcgaagagggcaagatggccttttgccttagctgacacgccggtgacacgctggactgcctatttgacacaccaggcatggcaatgtatgcctgacagggcattttcttggaatgtattgtcactgttcacaaaatcaggaatgttattcttggaagtcagtttgatagcctttctacttcaaggaaatgatgccagtggttttgaatctttggcacgaacctttgttatctctggagctgtagttgcagctgacgcattgctcaagactatatatgtttttggcttcggtgttcctttgttcattgatgctgatcaaggaactggtgggaaatggggcctatggattctccacaaacttgtgcttactggagtttatgggttgattgttttcatgcatcattcaagatggagaaacaggctgcctgcaaaaccagcatactacaactatgtatgtgcgatgttgctattgaatggtgtatcactgtttggatgtttccttgttgcaagtggagctggatttggtttatggttatataatctcacaatcgtatgctatcattcgctttaccttcccctcctatatgtgactttcttagcggactttttccaggaggaagacatgctcctagagagcgtttactattctgaaatgaaggatgctgggttctttgatgctgactgggattaatcggtggctactgcgctctatgaccactccaatgtgaattacgatgtgtttctatctgtgtactctcaacgtagaacagaaaatgtatgtagctaaccgtggtaatgaatggaaatatgtaaatattactggcgcatacttcagatttcaagtgatttcaacactgagattgccaccccaacggttggtgataagttcacgtcagaaagtgctatagcgtgtttggtttgagggtattcccttctcactcctcattttcttatttggtttatagaatgaaatgaattttctt

SEQ ID NO: 19016 - DNA, 722 bp, Zea Mays
acagaacaaaggagaaaaaacaaacggatcctttaaagcaggatatagtgcgtcttcatgttcgtctggatcaccaggttatgtttggtgagcatgttggcattattggttcgacaaaagagcttggctcatggaagagtcaggttgatatggattggacaccaaatggttgggtctgccagcttgatgtccctggggaagcacttctggagttcaagtttgtgataattttgaataaaggcaaggacaaaatatgggaggatggtgataaccgtgtagttaatttgccaaaaaatggttcatttgatatgccatgccactggaataagacaaaagagcctttagatcttttaggatcatcagagattaagttgtctggagatactgaggtgataggtgaagatgctaaactatctgaaaatattgctctagaagagatggggagtatctgcaacgctggggttggcgatctgacaccaaaacacgagtcaagcacacttggtggccaatggcaaggtagtgatacagttttcatgcggtctaatgagcatcacaatactgagaattgtaggaagtgggacatgactgggcttgatgcagtatcgctgaaattggtggagggtgataaagcatcaagaaactggtggcggaagaatttgtaaagctttcaaccgagattaatttaaagctgaatggtcttcatttactaagtaatataaaac

SEQ ID NO: 19017 - DNA, 841 bp, Zea Mays
cagacagcaagtggccagcagctgtgctgtgaatcatgcaacaaaaggctcctaaacacagacaggcttggcggacctgaaagctcatcagtggcagcgtcaccgaccattgggagtgactctgcatctggcatggttaaaaaagaacagaaaacatttcagggtgatatcgagcaatcaaggaagcagacggcacaggattcgccttcttcgacagacaagccaggtcacgaggcggtcgggggcagcagccagagggctcctcaaagaaggcaatcgattgccagggagggccaagatgggtggtcgtcatcatcctctaattcgaagtggaatcttgctcagaaacaatattcaaatagcccattgataagagggcttcatggatccagcagactagaggatttcggtggaagcataccaccagcagcgtcatcggcattagtcaagctgacaaaccggctcaacttcctgaaagaacggagggcgctgctggcaagcgagatgcagagcttggatctgggtcggcccccagcagcagctgctgctccatcagccaagtccccaacaccaaaaggccatgaaaggaagaagagtcgagactgaggaagatgttgtgctcttctgaatgctagttagccttatgattaccagcagtgtagtttgtgtgcatcccattcccttccatagtgctgtctgtctgtacatgtttccacaaattctactgcggatacataatatagatacggctggacaggctgctttgttattgttcaaattgttgctgaattgattcgtcgctcaaagcactttgctgacacatttctgatgttaaaaaaaa

SEQ ID NO: 19018 - DNA, 309 bp, Zea Mays
caggatcgcccgcaacgctggacatgttccgcacgcacaaagttatatataggagatatgcaggactttttttctctatatgtgtggacatcaccgacaacgaattggcatacttggaatgtatccatctgtttgttgagatattggaccatttcttcagcaatgtgtgtgaacttgatttagtatttaatttccacaaggtttacttgatattggatgagttcattcttgctggagagcttcaagaaacaagcaaaaggctcctagacttctcgttccagaatccagacttcactagtacaccggctg

SEQ ID NO: 19019 - DNA, 121 bp, Zea Mays
agaacgtatagagagggagagaggaggagtcgtataggacgtataggaggagtcgtataggacgtagagagagagagatggagagtcgtaggaaatggcgttcttaatgaagctttgattt

SEQ ID NO: 19020 - DNA, 1698 bp, Zea Mays
accatcctgcacacactgcaatctccgtccatccctccgtttccttttttcctctgttgccatcagttcagtagtagcctgcagctctcccaccttctcgctgcgctgtactgtgctggcaggggaggggccatggacgaccccgtcgagcgcttgaaggacgggttccacaagttcaagaccgaggtctatgacaagaagccggagctgttcgagcctctcaaggccggccaggcccccaagtacgtggtgttcgcctgctccgactcccgcgtgtgcccgtcggtgaccctgggcctgcagcccggcgaggccttcaccgtccgcaacatcgccgccatggtcccagcctacgacaagaccaagtacaccggcatcgggtccgccatcgagtacgccgtgtgcgcgctcaaggtggaggtcctcgtggtcattggccacagctgctgcggtggcatcagggcgctcctctccctccaggacggcgcacctgacaacttccacttcgttgagaactgggttaagatcggcttccctgccaagattaaggtgaagaaagaccacgcatcggtgccgttcgatgaccagtgctctattctagagaaggaggccgtgaacctgtccctggagaacctcaagacctaccccttcgtcaaggaagggctggccaacgggacgctcaagctggtcggcggccactacaacttcgtgtcaggggagttcctcacatgggacaataagcagccatcgacatggccgtcgagcgcttgaagaccgggttcgagcagttcaaggccgacgtctacgacaagaagccggagctgttcgagccactcaaggcgcaccagtcgcccaagtacatggtgttcgcctgctccgactcccgcgtgtgcccgtcggtgaccctgggcctgcaccccggcgaggcctttgccgtccgcaacatcgccagcatggtgccgccctacgacaagaccaagtacgccggcgtcggctccgccatcgagtacgccgtctgcgccctcaaggtggaggtcatcgtggtcataggccacagccgctgcggcgggatcaaggcgctcctctccctcgaggacggcgcgcccgacaagttccacttcgtggaggaatgggtcagggtcggcgccccggcgaagtccaaggtgctggccgaccacgcctcggcgcctttcgaagaccaatgctccatcctggagaaggaggccgtcaacgtgtcccttgagaacctcaagtcctacccgttcgtcaaggaagggctggagaaagggaccctcaagctggtcggcggccattacgacttcgtcaatggaaagttcgagacatgggaaccctaagtggccatatacgtacaaatacgccccaccggacttattagctgcgtggagtgcttaattatttgccgctatatatacacatataccggaatttaccggtgagaactatactgttgtaataataatagcgggaaaaaatattctttgcatctgggatacaaacacacttttttacgaatagaagaaaaataaattagtaagggattaatttataaatttgatctgtttttgtgggtttgcctctaggtagtggatgtgagaggcttcaaaagagtgtttgtatcccgaatacaaagaattttttcaataaggaatacctgtgttatttgacttctaatgctga

SEQ ID NO: 19021 - DNA, 812 bp, Zea Mays
cttgtgttagcgctggtgattcggcagccagcgaggctgatccgggaccgggtggctggccggtggccacaccagaggtctattatacctggattccgcgaggccacggaccacggtgcgcgcgctcttgtcttgttcctgtgcctgccactgccagtgccaccatctcgccgtcggcgtcggctcgtcgcctgagagccgaggccacgcaggcacccgggccgggggatgtcggcgccggcggcacaggccgtggtggcgctggctctcgcggccatcctctcgaccccggcgccccaggcggacaccttctccaacgtcccgcccacgctctccgggggcgacgggaagcaagagcggatcaagcaccccaggtcggccaaggcgttgcagtgcacgaccaagtgcgtcggcacctgcatccgcggcggcggcggcgcgcccggcgaggggcccctcaacgtcaggaggcccctcgtggtgttcaaggacggcttccgcagccggcagtactgcctgatagagtgctcggacatttgcaatcgcatcaaggatgggcaggacggaccctgagacgggccagaggaacaacatgcccaagcccaaagttgttggagcaactgccatggctgcggtgcaggctagatatgggatccggttcttctgccaggcctccagaagcagaacttcagaggcgacaagggtaataaggtacagtaaaccagtcagtaacatataggatccagagacatttgctagcaacaaaatccgagaaaagctgttaagagtgatgcgtagtggtcttgataacc

SEQ ID NO: 19022 - DNA, 1048 bp, Zea Mays
aattctaaagtacctgggttactgggttggctgcatgtatgacatgggagctggcggagtcaggaaaggatttcatcacttctcttgtcaatagaaatgatgtggtaccagcattttcgaaagtttcttcggagagcctgcgatctgaggtgatggtttcatcaaagctggatgatgtgcaggatcactttcaccatggtttattcgccactataagccagcgtgttgccttcatcaggtcccatatgctctccatctctcactcaacagggaagattgcagattacggctctagtatttctgagcctttgcttaaagatacaataccgcccacagcaaatggacacggcgttgactgcagccagcagcaacaggtggttgcctctgaagaaacggtcgttgtactggttaacaataacgaccatttcaccagtttgaaggccgctgattcaggcgtcacatcacaagaaggttcagacagcaacgcggcatcatcggacagtccacaacggccgcccccgccggcagacgaagccccgaaccagaatggcaccggaaaggataagcagaaagaaccggtctcagcgggctgctcgtcgtcgcgccagctcttccctcctgggaggatcatccacatggtcgcgctgccgccgcagcagccggacccaaactccgacgacggcacgagcagcggtgaggtcgttggcatatacgagacgccgaggggtttgtacgggaagatacggctcgcgcccaacatgattaaagaacattacatgcctagctatatacgtacgatggaatcgttgttggaacagctccagaaggacgacgatgatggcagtgtatgtacatgtaccgcaccaagtgacctgtgaattcttgtggagaactcgggcagtgattattccaattctttcttaaccatttcgtattgcattattggaaaggaaaaaaaaagtacaataatgtgggtgtgtgtttggtaaaatatgaacgaaatgaacctcgctcaagtctcgaacgttgggccctagccccaacctgt

SEQ ID NO: 19023 - DNA, 2723 bp, Zea Mays
gcagctccacaacaattcgtgcctgcctgccctgcctctcggacacctccctcgtcctccccctcctacgccgcccccgtcctcggcccccacgcgctcgcgcggcgcacgaggcgacgaacccgacctcctcctccgcgcccgtccctgccaccggtcgccgatgagctcggagggctggggcgctgacctgagttttatggagagaggatgccagagctgcgaagcagtactcgccaagcatgcctaaggtcgaagaagcttgaagatctgcagctaggagagccgcctgcgaaaccggtctcacctgctccgccgagggcaggaaagcgtgctcctacacgtgctgctaggggcagaaagggtgccactgggaaaggagtgccccctgcacctacgactagaagaaagcggggtaatattgtcgacttggaagctgatccagcttgtgaagacccccctaaagctgtcaagggactggaagttgctgctgctgctgcacccaagaaccttcctttgaaggaggtagccgaggttggtgttctgaaaatgaatggtgtgagtgcagagaagattattggggctgaagatgaatcaacagcgacacctgtgccagagagggttcaagtaggtaattctccagagtacataactgacaggaagttaggtaaaggtggttttggtcaggtctatgttggtcgaagggtttctggtggagctgcccgcactggtcctgatgcatatgaggtcgcattgaaattagagcatcgaaacagtaaaggatgcaattatggccctccatatgagtggcaggtttataacactctcaatggttgctatggcataccatcggtccactacaagggtcgtcagggcgactactatatacttgtaatggatatgcttggtcccagcctttgggacgtgtggaattcaatggggcaggcgatgactccaaatatggctgcttgcattgctgtagagagcatatcgattcttgagaagctccattctaaagggtttgtgcatggtgatgtgaaaccagagaattttctgcttggtcagcctggatcgcctgacgataagaaactttaccttatagatctcggtttagcatccaagtggaaagagaataatggtcatcatgttgattatgatcaacggcctgatatctttaggggaacaattagatatgcgagtgtccatgctcatttggggcgcactggtagtaggagggatgatttagagtcactggcatacacccttattttcctgattagaggaagattgccttggcaaggctaccagggagataccaagagtttccttgtttgcaagaagaaaatggctacttctccagagatgctttgttgtttctgtccagctccattcaaacagtttcttgagattgtcacaaatatgaaatttgatgaagagccaaattatgccaagcttatctctatttttgatggtttgattgaagcacctgcgtcgagaccagtcagaattgatggggccctcaaggttggacagaaacgtggaagattgcatgcaaatctagaagatgaacaacctaaaaagaaggttagattagggagcccagcggctcaatggatttcagtttataatgctaggcgacccatgaagcagaggtaccattacaatgtggctgactcaaggctaagtcaacatatagaaaagggtaatgatgacgggctttacgttagttgtgtggcttcctcggcaaacctttgggcactcatcatggacgctggaactggtttctgttctcaagtttacgagctctcaccagtttttctccacaaggactggataatggagcagtgggagaaaagttactacataacagcaattgctggatcaaccaatgggagttcattggttgtcatgtccaaagcaatcatacaaggttagcgaatcgttcccttacaagtggatcaataaaaagtggaaagaagggttccatgtaacatctatggccactgctggaaatcgctggggcgtagttatgtcaaggaactcagggttttctactcaggttgtagagttggacttcctgtaccctagcgaaggcattcatcggcgatgggagagtggttacaggataacttccacagcggccaccaatgaccaagctgctttcatcttgagcatgccaaagcggaagccgatggacgagacgcaagaaaccctccggacctctgcctttcccagttcacatgtcaaggagaaatgggcgaagaatctctacatagcctcgatctgctacggacgaacagtgtgctgatagtcgaagagaggggcggccgcgctgactcaatacggtggcttgcgtcaagagattagagatgtgagatgaacattaaatcaaaaccagttctaatgatgataggatcagtagatctgatgatacggtatggtatcctaccgtagctgtaaagaaatgttgtacccagtgccggccgcgagaccgttactgccatgaagtgaagctaatgcattttggagtctcttcccgggaaaatggaacacaatataatgctcatgtgcaaatcatataggtttaatttcttgcgcactagagtttgcacgtcaaaaaaaatcataatctgaaaaataggccttcatatatatatatacatatatatctatctatatatatatattatatagctaaaataacacaccagtttgaagcaaag

SEQ ID NO: 19024 - DNA, 1992 bp, Zea Mays
gtcgcagttccagtgtcccaccgcctcgcatccaaacaactttacccaaccgccgccctcaatctgcactcatccactacattcttctcttcctccacacgaccccacccaaccaagccgcctcgaacagtttccagaatactacatcccaccaacatggcgtcgccgccgccgggtgccgggcttactgagtatgagcgccgccgcgaggagaacatccgccgcaacgagactatcctcgccgcgctccgtcgcaaggccgccgagctctctgcctccttcatccccacggcttcctctcccaagcgccccaagaagcagcatcccctcgcgagaacgaccagccccgtcgtcctccgccgctccttgcgcacccgcggcatccccgccggcgaatcctccgcttgtgacggcgctaacacctcgctaaatacgccgccgtccccgacgaagccccgcagcacacggttctcatcctccctcgcctcggccctgcgagacgccaccgccgcagagccgtcgccatcggtcaaaagctggatcggtgcgcctgacgggttcgacccctgtagggagctggtgctacggcccgtggacgtgaggaaggtggtgccgggccggatattgtccttgcgaatcctgccgctgtccgaccggactgtggtggttgccgggaacgtgcacgggcatattgggttctgggatgtggatcgtctcgtggaggatgaggatggtgatggtgtagacggggtattcgagtattttcctcacagggggtctgtagggggcattgtgatgcaccccgctatgttgcataagatttacagctctagttatcatggtgaaatttgtctcatggatgttgagaaagagaactttaatacagtctacttgtgtgactatcccattttctcgctttgtcaagcaccaaatagtccaagctctctatattttgccgagggaaatgaattaaaactttttgatgaaaggatgggcaaggtaccaactacatggagtttacatgatcatagaatcaactcgatagattttcgtccagagaacccatatatatttgccacaagctcgacagatcgaacagtttgcatatgggacataagaaggatgaaaaagaagggttctgagagcttaaaagttttggaatacaacaaatccattcagtcagcttatttctcacccagtggaaatatgcttgcaacaaccagccttgatgacactgtccgaatttttgacatcgataacttcgatgattcatgtactcttaagcatgataacaggacaggcagatggctgtccacattcaaggcaatctggagctggaatgacagcaatctatttgttgggagcatgaaaagagcaatagatgttatctcagttgatcgcagacagaagagcatctcagcttcgtacatggcatttcttgagagtgaacacatgacagccatcccatgccgctttacgctgcacccgtgcaaagttggccatctggctggtgcaagctctagtggtaaggtgtttctctggaccagagcttgaagcaggctgatcatcgactgactgggatgtcctcggcctgttgctggccctgtcctgcccaagttcctgaccacggagatcctcatctcgcggttctgtactaatgatcgttagcattatcctgcttttaatgtataagggctagtttgagaactctattttttcaagggatttctgtttttttaatagaaaatgaactaatttctattggaaaaataaaaaaaatcccttaaaaaaatgaggtggctaaactagccctaatagtttgcactgcataaccatttggtatcgtgatgcatgtggttgttcggtccagtagaattagaaattagttttctaaaccaatgttagatcaggattgttatgaaaaatgtttgataaggttgttaatttgctatgtttgaggttatatattaggttgtttggataacacgagca

SEQ ID NO: 19025 - DNA, 1045 bp, Zea Mays
agctgctcttgcctcttggcccgatcatttcatttccccacctctctaaaaccctcgctcttgcccgctgttttacacctaaaagaaaggtcctcgccgtcgagccgccggctcccatctcccgcgccgtcgccgacgaggacacaccagacgcctcgctgatggccttggctcgcctcggacggtctcttgccggccgcctccaccgttctatctaccgtccaccggcgcccacagactaccatgcctccgtttcccgacccttcgctccgacccacacaggcgtatgcgtacgaggttttgcaagcttgacgtacaatgccagcagcatgattggccacaatctcgaggggccgttgccagtccacattgtgaaggttctggatctcgtagtacatatgaatcatgctagaccgatgtcaacagcagcagcatcaaaggtgcctgttggagcccggaaggttggtctgaaggttgccatgatgagtcctggtttcgtatatgagccgtacagcccacgggaacgcattcccttctggaaaagatggtttacactaagtggctggagaaggacaaaggaggacatcattttggagatgaagaacgcatatgctgtttcaaggctgaggaagaaaactgggtataccaaaaatcaattctacgatcaagcattaaaaatatacaaggaggttaacactttgatggcacatggagacacatcatcgcttcggaaaattctgacagagaggatgcattctactataaaaaatgaactaaagagaagacagtccatgtggaattctgtacactgggaactggtggagcctgctgttagtatcagaactttgagggctcgcatgattggcctcgataagaatgacctggataaagcttttatacagcttacacttgagtttgttaccaaacagaaatttgaagcctataattcaaagggtgcagttgtgtctggagacaagtcgaaggagggtgctttggggccactggccacagtagctgtaacagggctcttaactgtagaagggag

SEQ ID NO: 19026 - DNA, 1994 bp, Zea Mays
agctggtgccttgcatgggaacccgggagaggtgatgataaaggatatttgctgaccaaacttgcagtatttctccttaaggaaatagaaattggcgtcatgtcatatagaaatatgctctggacacatcagtccgttaatcctgaatgggagcaaggacatgtccaagtccaaccaagaagttcctattatgcaggcactgtaagtgattcatccaacctgggcatgcaagttgctgttggtgttccagtaaatactgttaatgttggtatatgtgatctgtggaatcatgagcgcctgcctgttcataattcatacccacatgccagtgttacatcgagatttgtcctcccaactagtatgtacaacccttgcatgccagcagcagctgtcaacatatatattcctcagactcaaagctttggactgggcaatgtgctaccaccatctttacatagtcaagtttccacaggaactattgatgagaataacagcagtttcaattttggtgatagtgccattggatccatgaaaaggaaaaccgcagtagttgccggaaaccatcacattcttcatggatttgctggctcaagttcatctgttcatgtccctcagaatcctgtgtatgggccatggaatgcttcatctcaatcaaattgtttacccagttctgcagcttcaaacctaccagaataccacaatagtaatgggtggccgttcttagaagaatcttctgcaaatgcttcaaacagtttcacttcagtggatgcttgtccagagttggtacctcatggtaacaatttatatccagcttgtcacataatacagtgcaatacatgggttccacagactgcaagtcatggagtaccacagtggggatatggtaatgtcatggtcaatcctccaggaaccgtagacatgccgaatggaaatattcaggattatcaagctgggcattcttctattcatgggccactacctcatttctgccagattcctttgcgtagtatgcaagtacctcaaatacaagtaccccatcaacagttcatcggtaacaatgtggtgcatggtttaaatccttcagccgcaggccttccgttagatccaagaatgctggctttcccattcaatgatgagcacacttttgggcatcaagtgcatccacctctgataaaccaagccaacaatggggctttaagaattctgccatatcagaatgctacagtgatggatcattcaaggatttatgaagcaggacatgttattgatgaacatagagatatgcgtttagatgtggataacatgacttatgaggagcttgtagcattgcaagagcagataggtgatgtcaatactggtttgacagaaagctatatccaagaaaacttgaggtccacttttcatgttccaggagcagctagcatttctgatcagttctgtgagctttcgttagagaacgatgcttgcataatatgccaggaggagtatgaagctagagaacttataggagcccttgaatgtggtcacaagtaccatgaggattgcataaagcaatggttgatggtgaaaaacgtgtgccccatctgcaagacaacagctttgtcatcagatagaaggaatggatgatcttcgccagtaacattattggttatttaccgcgtggcaagttagcgcgattttgtatatagacagggttgcctttatttgccgtcccccttcgctgtggacataaactgtacagatattattttgtaggatattttagacgttaaatggcaccatggtgtgtaaggctcccatggttgccttggtagatcctcccttcctttacattgtatttatctttactcttcaaaaaagaagcccgaaaacatgtatattttggaagtgaaagaaccgattttttttcttcaattctggagcttttttgctagagctgcatgagatttgccgctgaaatagggacttggttatgtttttttttcgctttctac

SEQ ID NO: 19027 - DNA, 603 bp, Zea Mays
caaaaatggggcttctaaattttaggaagtactgtaccttagtttcatatacacattgtattccaagggataagtttattccaccattccggcgaattttcgattccctgttctgccaccacaactacattgttcgatcgatccgtgtgccacaactccacgtctcccaggtcccagcgctagttgctaattttgtcgcggagccaaaaccccggcatcgtcctcggcgtcgacggtcgacctcatctgcggatctgcctcctcggctccacctccacgacgtccacgcacgtgatggccggccggcaaagtgcgcagcagccagcagcaagcagggcagcacaccagcacacggcacgcgccgtccacctcacccgaacggcgaacccgtgtggattttttttcgcgtggccgacgaagggccagcgcgctcggcctctcaagggcacgagcgatggccggggagcctcacgcgaaagcgccgcgcggtcggtatgcacagaaatcgcgccccgcgccgcgcagtggagcagcatcaccgtcgtgcgggcccgggacacacggtggcccgcgcttcggcgagccgggcaggagcgcgagggc

SEQ ID NO: 19028 - DNA, 1387 bp, Zea Mays
cggataacaaacgctcggcttgtcgccgtccgtcccctgccgccacccatcacctgctatcccgccgggatcgtacgccaattcgccaaaacgatggcggcggcggcggcggcgggcgcggcatcttccatcctctcgtccacgcccccgcgccgcctcaccttccctcccgcccacatccgcaaacccctcgccgcggccgcccccaaggccctcaacctgtcatcgcagaaactccccccgctctcttcatctgccacggcctcgccaccacctccgcccgacggggacgataagccggaccccatcaagctcgctttcgcccgcgctgccgcatacaagaaggggagggacagtcacagcccgagcccgagcccggcgccggccccgcctcccacgccgccgccacagtcttcaccaccgtcgcagccgcaggcttcggtcagtgagcccggcagtaaggaggcttttaagcgggcgttggagtaccgaaacggcaacggggccggagcgggcgcggctggtggtgactccccgctgctgggaggctcgccggattttgtatggcggtggaagaaatatacgccttggtggagagactcaaagtgcagaagaaaaggcagccaaagataagcgcaccaaagagctaatagctgcatataggaatcgacagaacatggtaatcgatgcaaagacaaaagcagagtgcatcaaggccttgagggaaggtgatgagatgatgaatactggaaggcttaaacaagcattaccttattatgaaaaagtgatggacgctgtggactttaagactgaatttcatggaagggctgctctgcaatggtccatctgtcttgattcactttgcaggtccaaggaagcaatgagcatgtatagcaaacttaaaaaccacccgaatagtgagatcagcaagaaagcaaacatgttcgtgttcagctttcaggcaatggatttcatgaaggtgagcagcattccagtgcccaaaagcacaggctacgagacgtacttcaccaaatttggcagcaagaagaattactacgcgagcttagaagagccggaggtgggaatcgagcagatcgtcccgtacatcatctttcttgtttcgccgatatttttagttgcttttgttgcactgagaaaatccttccaactatgaacagaaatcatggacgagttgctgaggttttaataccgtataggagcacatagcttggcaatagaagattattattatgatttttttgttttcatcaaaagagcaaattattttgtgtagctgagctagggactaatttttaatcccttttctttaggccctgttccaatcctataagataaattttagcagcttctttttagctacttttag

SEQ ID NO: 19029 - DNA, 384 bp, Zea Mays
gtgcaaaccgtctaaagctgactgttggatggggttggcgaaggtgtgcttgaataaggatcacctgaaggcgtggagtccctagctgctggttgttgtgtgtcctagcgggcggcagtttgagtcccctgcaggcagtggcggctgtaatatgtactagtataggcatgcggacaacaattggaaattgtatgattcatgtgatcattttccttgtattcttttctattgttggttatatatcagattttagaagaatattgtgatccttttccttgtattcttttctattgttggttatatatcatattttagaagattcttgtgatcattttccttgtattcttttctattgttggttatatatcagattttagaagattc

SEQ ID NO: 19030 - DNA, 1735 bp, Zea Mays
tgcactttgaccctggtcagggtatggaagagcataggcagatgtcggagtttgacatgccggtttcacagggaagcggccaagccactatccagtttagcagcatgaattcatctttctcgagtccacctgttcagcaaccccaacggccacatcagatgtcacaatcgttacacatgtttgggaatccacaccattctcagatccagggaactagttcaagctcacaacagcaggcatatgctgtgcacttggctaaagaaagacaaatgcaacagcatatggcacctcaacagcatagtgatctttctggagcaagtgcagtacccaatgtgcagagtaatactcaaacattgcagcagggccaaacctcatctgccaattcagccccttgttcaaaatcacagcatcagcgacagcaagcggcacaaaatctgccggatagctcttcatctcccaaccaacctgccacttttacacaacagaagcagaagaaacaacaggaacaacagcagtctagacaaaatgagccacaaaggaaccgtggcagtcaacaagctaagcttatgaagagtttaggacgaggaaacatgatggcccagactcctccaattgactgcacaccaaccaatgctgcttctactccatcaaaaaaccatgtgtctgaaaaactggtgcaacatggccaaggacatttccctgccaatacaacaccagtaccgtcaatgcctcaacctaggctagtcacttcgttgcctcagtcaccaacgaaggtggcagacattggtaaccaaggtttaaaaaagggtggttctttgagtcaggccatgttagctttgcaacaacctccacatggttctaaatcgacattgaccactcagctgcagcagcggcaggtcaatccgccacagaacaacaatgggagagcagtggtgcaacagaaccgccaaatgaactctgactgtaggacagacttgcacgtcggtcaggtccgtcacaatcagatggttccaacatccatgccacagagtgcagattcgtgtagccctgtactgtcatctgtaaaccagcagaagcgtgagccatcgctcaatcagacttcagttacctcgccgtctaacctgcttaggtctcctaaagatacttcttttgggtagccaagacatgctacaaaggcaagttttcaggtggcttccctatacaggctcatggtgttggtgaccagtggaaccaacatggcagagagcaattgcagtctcagcatcagcagagacaaccggttgttcaaggcagtgcatatgctccttcaaattctgggcctggctgatcattaattatttcaggattcgtttttcttattcaagtgacagtttgacaaagttcattaagagccagagtcggatgagggactgtatggctgcatggatgcatggaccaggatggcccatgagaccaggccaggcgaagccatattttttagggtcctttgtttcattggggccctagattagcctgatttacccgtttgatctatggatttacctcccgtatcgaggtcgagatgcacattagtttccatgagtgtcttgatcggcttgacatccttcatcccaaacttgatgagtatgtcttgaatgtatttcgtttgactgatgaaagtgcccttttgaagttgctttacttgaaatcctaagaaatacttcaactcctctatcatagacatctcgaatttttg

SEQ ID NO: 19031 - DNA, 3300 bp, Zea Mays
aaccaacatggtatgggagcaaattcagtcagcagtattgaagttgaaaacccttgtgtaattatgagtcaagacaaaagcagagagtttttacattcaggaaatgacaaggataagttcaagttcttttttaaggctactcttcttcagcaagtgaatgacttgcttgctacaataagagacaacctgaacattgcggcctctatagttgaagaactggaagcgtcaattaggccagcgcttagagaacttgatgagatccaggagaagataaagaatatggaacacattgaagaaatagcacatgagatcgaaaatctgaataaaaagttggcttgggtatgggtttatgatgttgacaagaagattgggggacaacaagagtatcttgagaaactcaaagagcgtatccctgcgtgccaagaacgaattgatcgaaatatagccattatagaggaactgaggaaagaatttattgtgaagaaagaaaattttaaatcctttttggagaagacacaagaagcaaggaggatgaaggaaaaaatggatcatgacattcgtgaggctgtgaaactgaagatggatctagagaaagagcatgctcgtggaaggcaaacattgaataaaatgaatgcccgtgtggtacaactagaggagcaagttcatgaatttgagctgcagcatatgcaacaaactcaggctgaagtatctcaagttgaggatagcatacgggaattacagcaggagataaactctgcccatttaaatgctacaaggttaagtgagaaagaaaaaaaatcatctgaagaactacgggccattattaaaaatatcggtgacattggaaaagagatagaagaagatggacgtaggatcaatcaactgagaagtcaaattgatgatatacgacggcgccaacaaaacaaactaacggccttcggaggagatagagttccgagcctctataaatcagtagagagacacatgagtaaattcaaatgccctcctattggtccaataggatatcatctgcaactggcaagcgattcctggtctgttgcaattgaatatgcattagggaggttattagatgctttcattgtctcatgtcataaggattcactcgttttacgagaatgtgcaaaagaagtgaactaccgcaaccttcaaattattatatatgacttcactaaaccacgggttgacattccagatcatttgcttccgtcaacgccacacccaacagtactttcagttattcattcggaaattcctactatattaaatgtgttagtggatcagggccatgcagagagacaggtcctagttcgggatgatgaaacgggaaagtctgttgcatttgatcagaggatacggaatctgaaggaagtatatacttctgatggttgcaaaatgttttgtagaggttctgttcagaccattcttcctgcaaataggaactggagagctggtcgtttgtgcacttctctagaagaaaaaataactgaaatggagcaggaagctactgaaattaagcaaataaactcagagaggttggatcgcaaaaggaaattatttgctgatcgagacagcatcgatttagaattgagacagttaaagagaaaaagagaagatgaggagttgcatgtggagcgtaaaaaggcacagttggttgataccaagaaaatttctattgacaatagtcatgcagctgctgtggatacctctgagctagtagttgaaatgatgcaagtgaaggaagacattgagaaccaagaattagttgtgcagaaaattaatttgaaacttacagatgctttgcaagaagagaataatagaagagcgtcttacaaggacttcattgagtctgtacatgctgaaatggggtctattagcgatgctgagcgtgaattgcagcttgttgaagaaaaaatacatgatgctgagcaggagaaggctcactatgaacgtgttatggaaacaaaggttttaggtcctattacagcgactgaatcagagttgacacgtcttcaacaacttcatcaggagtattttgaaaaggcttcaacaatttgtgccgagagtgaagtggaagctcttgggggtgttgaaggatcaaccctagaacaattaagtgctcgtattaagaaattaaaacagaaatttcagcaagaaagcagaagatatactgaaaccattgatgatctgagagcactgcatgacaagaagggacagaagatcctgagaaaacaacaaatgtattcaggttttagggacaaattaaatgcatgtcaaaaggcactggacttgagatggaagaagtttcagagaaatgcgggtcttttgaagcgtcagcttacgtggctgttcaacgagcacctgggaaagaaaggtatcagtgggcacatcaatgtagattataagaatgaagttctgtctgttgagctgacaatgcctcaagatgcgtctcgtgataccattagagacactagaggactttcaggtggagaacgatctttctcaaccctttgcttcaccttgtctcttcatggaatggccgaagcaccatttagggccatggatgagtttgatgtattcatggatgcggtgagccgcaaaataagcttagacaccctagtagattttgctgtcgcacaagggtctcaatggatatttataacccctcatgatatcagcatggtgaaggctggggataggatcaagaagcagcaaatggctgctcctcgcggttgacagtgttgagacccctgacccttgtaaatgaagcctgagagccttgggcatgggagtgaatctgcttggaactactacttttatattttgtttgtagtttgtacatagcacattttgaggcaatgggcgtgtccctggtcaagagtttgttcctgggcagcatcagcagttctgtagttgcattgctgtttggacagggtcccactgtgctatgttaaagagtggttgatgcatgtcttttgaaataattgggccttgaacatactgcggatgtaaatgaaagaattgcggctgcagatgtcgatgaaggtagccccgacttggactctgctgattgcaggaacctgagttgatgaaggttctgaagttatgctatttttttcatgaaaaaatatgtgggtcccactcaaaactttgacctaactaaatatatccaaacaattgattgggtctgtcttaattgctagtttcttttgtacgagatgcggcagattctatacatgcatggctgatatcatgttctacagtttgacttgtttcccaaat

SEQ ID NO: 19032 - DNA, 6165 bp, Zea Mays
aggttacaacgagagcaaggccatccctgattccctgatgccttcttccttgagaaggcctccgcggaggcgttcatggagcgagtcgagtcggtagtgggcgaggtattcaacatcgtcaggcagtggcaaactcagcagcagaagcaggtccaggagttccaggcactacacgacacacacttggctccagatgagcattcatagtatttcgtcttccatgtcaattaacctataaactctttaataattgacgtctcgatgatgtgttatcatccatgtttaacttaaatgtgttctagttctgaaataccaaagtttataaaacaaaagatatgcaacaaggaatcaacattgaactgtaggtgtatgtgtgatagcctaccaagtgtaaaagtagatatgttcccttggttaggtgtagctaaacatatggtgaaaattggcagaagggaaatggtcctaacattcattttttggaagaactatatggtatagactacagagttcagatgctcaaggtagacagtggctgtttggtttggaggtataacataaataaaatgttccatgttattattgataaatgcattacatacaataaagaataccattgcatactttttttttatttcattctttattttctataaccctggttgtacctcacatgctactgaattctcttatatatatgatacatataagaggaagtatttcaatgagcccaaaaggctaaggagagagctgcaactgaagctagtgaagataaggggacaaggtctctaagggaatcttcagcaactactctaatgactacaccaatgtcatctccccctactattcccacacagacagaatagttctagaattcttggtggtaataaagagttgttgctgaagtaaatgcagttctttctgcagccaaaaaaactttagttggctttcacatgatatgtggcgatgaaaatatgttttcgtatgaatggcatcgtgaggaagaacttttgcatctagagtgtttgggtatatgtaatatgttgtatgccaaatgcaacttcaaaaaccttggtaacaatatagaattagtgtcttgatttatgctatttactaatatttttaacttagaatggggaattaattgcagaagcttcagaggagatttctgaaagaatggtttaatctagaaaataatgaattaatgttctttttgtatcaaatgccatatgcagaggtattgtttcattgaggacttccattcttctagtgacaatatgtatgtgtactggattgtgcaagcaattgctgattactttgatgtgtggattcatgcttacactttgcatcattcatggttctgtcatattgtctcccaagttgattcctatatgtcactatgtaatgcatgatttaatgtagatggccactagttatgtgtgcaaattctagttgatgaagtggcaatgtgttctcacttatcagtccctgataagctaaaatttcaccaaaacctggtcatatagaccaagtgcaggtaaccatatcataaaaaatgcaattatattatttttgttgtcgtgttattgaaatgttggaaatatattttgggctagaaggaggatggccagactatgtactctactactctgcttcttccttttcagtaaactccctttagatacatatttgaaaaaaataagcttagattttattatggcactggcatacatgggcatgagaaaaattacggtgtaaacatttttaacaaatcattgagtaatgtagaaacaaggactttgagaattctgtatttctgtactaggaaaccatatgcttaggcaattcttcagaggccatctctatctgttcatagcccttgataaacttgctataccatttagcagacaattttggtgttcgctttagtgacttgaaattcacatgacaaagaccatactttacggtgtaaccagagatccattcgaagttatccatcaaagaccacacaaaataacctctcacatctgctcctttcctgcacaaaagtagcaaagttttattattacctggctggagagcagtttacatgaaaagataattgaggcatgcaacaaccttattgcaaagctcaatgctaatattggctatttgggcataacctgaaagataaaaaaagggtgatcaagagatccatacagatattttttatggtaccagtgtactacaagtgtaatatatgtaaataagcatggaagtgaatcattgttatgcacaaaggcatatattttgtatctaatttgtagattttagggaacctagtaacccaccgttctctgtgatgtacaaaggtatgcttttatatctctgctttaaatacatgaccaacttctccatggagcttggaacgacataggtgtttgcaacaggtgtctgcaatattagtttagttgtgttagcttgtgcataattaatttgtaactaggattcttgttgaatagaataatgcaatatacaatgccgatttttaccggttttccaatgggtatcccatttcgttctgttgatatagaaactaaagcttcagaagggtaggcgtccatatcacatagagaatatatgcaatccttgacatagaatgtttggtagtgatttaccccgatgaagtcaatttggttcttcagtagtttcttctctccttctgtaaattttggcaagtttggacctaagatttggcgcatctggtgaggatagtcaccaaagaacaagggatccaagatcctgttttagcatatatcatcaagtgagcattcaatcgtgaagatcaaaagttagttccaatcgtaaaatgctagtatgatggaaggttactgaatcaattgataccatggagcatcgaaagacagagctcggcttactgccaagtggtcctctgtgatattccttagtggttcataccatcttagatgtaatgaaattcctacaaagccaccttgcttggactgagaaggatggggaacaaggaaaacaaattatacaactttcatgagtatttaagagcaagcacacgggctcagttgatgaattccctgaatcacatttcccatatggctcggaacaacggttgggtggaaatgccccaatggagtatgcaagctttacaataagatttggctcattgaatgtgacccagtgctttactcggtcaccaaacatcttgaagcaaagctcaacgaagtaggtgaagtcctccctgaatagaaataaagaaacaaccacatatgaacttacggcatcttcgtagataaagctataatataggtgactaactgaatttgacttactgaatctctgggttcaaccaagaattgtatctttcttggagttcttcaggatggcatttgtggagggaggtagctgcccgcataatagcagaacagaaggcgtacctttttctagcagtccgttgatgaggctattgtagaatttaacgcctgcctgattaacacctccgaagcgaccctctggccatggatatttgaaaggtacaagcatataatttaagttaaacaccggcactaaggaaggatcacgtgcgtgttgtcgagctggtagctgtgtcagaagtcattgacagttggtgtaattctgagaatgagctcacttggaagaattctcgaccacgacaatgagaatctgtaggagctgagaccaatcgaatgcatcatttctatgtcgtcctgccggtgctgactttgtgtgagattgttgaccccctcatctttcttgataaagtatctttttgtttctaatgatgcttaccttgtatcgatgataatggtcagcagctacgtcgccattgcttccatcgtcaatatttcctgatttatggttaatagccaagactaagacagcaacaaaatcaagcacgtctgtgattttcacgatttcagcactccacaggggcaaccggcccttcgtgacctcgtcgtgcagtcctcgctccggtagctcgaaggaacgtcgcgatccaacgcgcggtgtcctggcgtcgtgagcttagacgggcctagtgcaagctgagcggctggatgtgctggacagcgctgtcgagcggcgagagccgtcgagtaggccgacttcagacgatctgacgaatccgagccgaagagtcatcctaatcgggccctctatttcctaagcccggccctcccagttctagctagctaaacagaagatgcatcatgcattcactagccaaaaaaaaaaatgttcacttcctcccctgattcaagagcgtgaaatgattttctaactgagacaaaaagagaaagaggaaagcgcagtgcgcaatgaccttctaaatagatacgtctaattaacatgcaaaatgtatgagcgtcgaaattaggttaaaccatttaatttatgacatcaagaagagtgttgaaaaatatttagtacaacataattgaaagtaccaagcaaaaagagaaggagatggtattgccacctgctgatccggtctggctaattccatatatattgtctagaactggttaggatggttcattaaccggccgagccggtttgcttgctgtgtccgaaacttatcgtgcttaaatacgttaagcgacaaacaaacaacacaaattattagttggatatgtaatcatgtctagattataataatatataaacagatcattaagtggttatataatttataagttggattatataatcctgagaggaaacaaacatagcctaagttgatttataaattagtattggatctattttagcgtgtaggtcatattttggacttggtttttactatgatgataccaactctttctatatgtgagagcattatggctgattaaggataccaagctttcaatcgtcagaaaatacatcatctaatttatttaccatactttctctctatcttattgttcatcaggagattttataggtgaccttaacaaccctagagaaatcttcgcgtactattctctgatagatcttttcgagaggtgactaagagtaggggggcctgggtcgggcgcgtatcctctaacatcgactgcactgacgttgggtcactgcacgtggccctaggcccacgcgtcagtgacccaccttgacgtcagaggatctcgacccgtctggaccacccgggccatggcattgggacgtgaccccaaatttgttaactcccacgaaaatattaaaatattatatgattaatatttgttaaatggtttaagtgtttaatatatatatttcattcttgtactagattgtatctctagacttgaaataattgatgaaaaagaacaaaggtattactttacaatgatgttttttgtcatgtaacttttaaactacttgtttttgccatgctttcatcaaaaattggtccatatggctttagtcaatcttggttctgccattgccgagagtttaccgataaacgaaaaacggactcaatatcagcctaaccaagacctcaatctgtttagttgatccattgcatttttgttgcaatcaagattatttacaaccacaggcatactaattttaacaaaagctacgaaaatatcccaagaatccccttaactataagggctagttggagagccataaaaccggagtagattagaggggctaaaattcccttcttagggttgatttggtgacaaggagatcacgaggggattaaggaggaaattagatggactaatttccccctcaataccctccaatccccccgtgattcctggtcaccaatagggctagttggcacctccattttcctatgagatttccaatttttcaagggaaaatgaactaatttccctgaaaaaaaataaaaaactcttgggaaaataaggttcccaaactagcccttatttaaaattgaataaggacgagattttagtttttctaaccctcttcggtttttggactctcaaactagccataatagtagctacttccactaaggtggccaaagtttgcttgtactcattattgagtcgcttagatggattagatcatcgtatgcataactgacacatttggaagcacctggaacatgggagaagacatcccaattgcttaggcccttgctgtcgtctaggtatgcgccttcgacctaaa

SEQ ID NO: 19033 - DNA, 3095 bp, Zea Mays
gtttgatgatggctctgtctgtaaagtcaatagggcagatcctaagtgcttaaagccagcagctggcccaattcatccagatacagcttgtcctttttatccaggacagcgtgtcaaggcatcatcatcatctgttttcaaaacatgcagatggcttaacggattttggagagcaagtcgtcttgaaggtactatcacaaaagtggaaagtgttgctgttttagtctattggattgcatctgcacactttgctacagatcagcaatctgttcctctagaggagcagaacccagaggaccttactcttttgtctcgtttctcatatacaaactggcaattaactgactggtgtctttctcagcgatacacttcatgtactaacgataccatgattgattctgataagcatacatggcagatatgtacatgctcagaaaactcagttccactgtctggtattccagaatctcaagctgatgctcagattgatacagatacaggtcacaggcagacagatgttgattctactgcagatgtattgagtatgtcggatggagataattcatgcatagccaaagaatcagaaacaggaactagtgcatcaagcatctcaaatgagggtccacaggacaatgcaacatctagaaaaaagtttaggaaagatgggacaaaggaatgtggagtagccgcaacagcattgatccctatccacagtccaaatgaacatgaattcttcccggagcagtatgttgtggataaagtcacaaatgatgttggtgttgatgattcttctgaaccaaggcgtgtgggtcttgttagaggtgttaatgctaaggaccgaacagcaactgtgtcatggtttaagcctcctctacatccagaggagccaaaggagatcgcatgtaacgaaattgtgagtgtatatgaactggatgtccatccagattatgattattgctatggagatattgttgtccgcttgccgcctgttaaaccggtaattgagtcaaccaatagcaaggaacaaatggaactggataagacgttagattcctcggaaggatttgctgcttcatattctgcaccccctgatactagtgcagacgaacagctttcacagaaggaatcctgcttgcagtttacaagcctctcttgggctggaaatatagttggctttcaagacggtgagattgaagtcatttggggtgatggatcgatttctaaggttggtcctcatgaaatatatgttgttggtcgtgaagatgatggtgcctcactagatgatggaacagcctctgatggttctagctgggagactgttgatgacaacgaaatggatgtacttcatgattctgcaaagggtgattcgcaaaatgtacctgagaatagcattggaagggaaaatggttcattcagctcccaggatggaagttctgttgcaactggtcccctttcagttgcttttgagtttgtgacccgactggcgagtgatctctttgctcgaggtagaaggcatttagatggatcatcagatgctatggatgaagttgagtctcactggtctaatgagatttcagaaattggtgatgacattgataagtgtaataagaatcatgtggaatcaccagagcatgctgcagtcatagaaaatgattcttctgtcgagaagtctgtagatgtggttatggctgataatcctgtacattctgaatgtttcaaacactttgatgttctgcaatgtcctctagaccaccactaccttgaaaacacaacccagggtacaggtggaaaaaagtgggtcaaaaaggtacaacaggaatggagcatacttgagaagaacctaccagactatatttatgtcagggtatttgaggatcgcatggatctcttgagagccgtgattgttggagcaagtggaacaccctaccaagatggccttttcttctttgatttccaccttccacttgagtatccgctagtccctccgtcagcatactatcattctggtggtttgcgtgtaaatccaaacctgtatgtggacgggaaggtttgcttgagtctcttaaatacctggactggcagagggaacgaagtttgggatccatcatcatcaagtattctccaagtactagtttcacttcagggattggttctcaatgaaaaaccctattttaatgaggctgggtatgagaagcaagttggtactgttgaaggggagaagaatgcagtgccgtataatgagaatacgtacctgctgagcgtgaaatccatgctgtatatattgagacggcctcctttgcattttgaggattttgtgaagagccacttccgcaagcgtggtcactacatccttaaagcttgccacgcctatttgcaaggaaatgttgttggcactctcaccgacgacgcgtgcaccaccgacagaagcaaagagcactcgagctctgttggcttcaagcttgtactagcaaagattttaccacggttgattacagccctgaaggacactggagctgactgcgaccaatacgagcacctcgggagaacagaaaccgttacagaaagctgatcattgagtgatttgtacttgattcttttgctttttctctgttttttggggtttcagaaagatggtgacttcaccaccaggctgttttcctataaatgtacattcaaagtttgttgtttcagtcaaacatttggaaaatttggcccaaatgatttagggggggggggggggggggtttgaagtcactagagataatagttagttagctaaaaattgttagtgttattagctagctaactattaccaaatttgctaaaagtatctaatatctaaactattagttagactgtttggatgtcttggctaattttagcagctaactaatagttttagtgcatttaaacacctcttattcgttacatggaactgaactacactgtacagctgatgtttggttaaacttgtaccagcgaagagttggcaatactggaaccaggcctagagattcctggaacagagatttgatgtccatgtatttacgggtggtattggtttcacgaatatacactcgcgggggataaaaaac

SEQ ID NO: 19034 - DNA, 2121 bp, Zea Mays
gctgttatttattttgtgacttatagcctagatacgagcaaaatctctgcgttgagcagtttatgttagagttgatatctccttaggactaatgactgagtcttaaggggcatggggacccaccacctctatgggtatgtacaaccttgacaccatagtagatggtacgatttttttttaaagtagaagacacaacgaagacacatgtagttacactgggggtgtatctaaaccttatgtcttaattaataaaaattctctaagacatgactctttatgtgtgtttactagtgaagctgtgtcttaggcttagaaaaccgagctagaggtgtgtcttcatttttttacacttaccccataggcacacattaatatgcattgtacatgccctaactaatgcacaccgtgatcggaggtgctgactgcttcctactggctcggtcccatccgatgcgatgccataagaggggttcctggtgaccaaaaacgtgtgcgaggacaccactcagaatgaatgtgctcccctaatctaccaatcgagagggcatggcagtcaggtgaagaccgatgcacatggcactccactgcacatccctgccctaatgatctgctgctaattgagccattgagctccttcgaagaagtggaaactctgttgaactccttgatgtttctagcgagctacctgaattggttcggcgtcctgggcttagcacttggaaggtacaagatcgagaatcttggtttcagagtcacgatgaagttccacacaataggaagaatgtagtatttccaagcatgtttcctgcaagtaatagcaccgaggaaagccataccgtgtgtggtgatgttgaagtgaacataaataatatgaacagcttctcaagaaatatcaacattgaagaaacaagcaaacttaatcaagatatggatggagtttctgttagtcccactaaaattttggaatgcacttctaacattgtgagttcaaagtttccactgcatcggtgcatgaggattgttcctcatgaccagaacagcggggcatttttcatcgcagttcttcacaaattatcgcccttgaatggcagtcagataaaggatactaaaattcagcacagacttgggacagacagaactatacagttccagaaagagcccaagccagaaacacgaccctatgaaactactttgacacgccgtcagcacaatgtttctgaagttgatgatactgaagtgcttggtaggggacagaaattaggcacagacagccaaacttcaaaggataagaactcaagcgaggtcgaaatagttagcattctagcagagtcaggagatagaatggagttgcaaaagcaaagcaggtgggaaggggttgatcctgtcttagttttgaacgatgaagcggtgataaagagtatacaatccttctttggcatcaaggaatcattcccactcgaaggtcatctggtgactagaagtcctgataatgcaaggagaatatattacgtatcaaaatcagttaaagagattttggagctgaattcaaaagttggtgggcagctgaagatagcttcacttggtgttaaaatgaaaggcatagatcaaaggatccctgtccatgtgcatataggttgtcttatgatggattatcgctggtgcttccatccatcagcaagaggatactatatgcatccgcactcgagttccaccgccttgtacagtaccgaagcataagctttgctcattttaccgacaccagattcggggagcaggctgcgtccttgacgcctggttgctgtgttgtagtgttactcgaagggaataggcgtgtagattccatttgtaaggatccctccacaattgccgttgtttgctggagagggaaggggaccattaacgttatggtttctccctcggataggaaggatctccttgaaaggatggcgtatcgatttggatgatggatggtaattttactcttgtcaccttcgtcattgtaattttattgcctggttgttttacctgcccgtggggttccaagtcaaggacagaacagcagcagctggctgcagtagtttaatgggcttgagcgcaatcaaaatcacatcgctttttttt

SEQ ID NO: 19035 - DNA, 3885 bp, Zea Mays
ttccctcccaaacggcaagcgcggccccaaaaatcccctccctagggtttgccccctcctttccgtgagatccaaaccccaatggacgagacgctcgcctcccttcgccgcccgaagcgcggccgcccgccgcggccgcgggaggactacaccgcgtactttgaggatgtggctgaggcgggagggctcgcgccgccccagtccaagcggaagcgcgcggcctccgccgctgccgccgcgtccctggaggacctgccactcatcgatataatcaaacataatggtaggctgatcagccatgctgtcaaaaggctggttgaggattacgaatcaaagaaaaattcagtgacgtttcagattttaacaatgatatttgaggcttgcggcgccaagcatgagatttatcctgactaccttcgcgagtctgatgtggatgacgttgtggtctctcttgtcgacctagctaagaaaggtctggtggaagataattacaactcaaagcataaggatctcaaaaacttcaaagaaaacatggtttctttttgggacagcttagttattgaatgtcagaatggcccactgtttgatgacctcttgttccaaaaaatcaaagactatgtggttgctctgtcatgtgctcctccaagggtatatcgccaagtagcttcaatgattgggctccaacttgtaacatcattcatttctgttgctaagactctcagtggacaacgtgaaaccactcaaaggcagctgaatgcggagaagaagaagcaaagtgatggatcgcttattgaatctctcaacaatagactagcctttacacatgcaaacattacatacttggaggaattgatgcgcaagatattcagcgggttgttcatgcaccgttatcgtgatgttgatcctgagattcggatgtcctgtatcagatccctaggtatttgggttgtctcttatccatcactctttttgcaagatatatatttgaagtatcttgggtggacactaaatgacaagaatgctggagttaggaggacttctgttcttgccttgcaaagtctttatgaagtggatgagaacataccttctcttggtctctttactgagaggttttacaccaggattatccagcttgctgatgatattgatgtttcagtagctgtgtcagctataggtttgatcaagcaattgctgaggcatcaactgttgagtgatgatgatttaggcccactatacgatctgcttattgatgagcctccaatgattaggcgtgcgattggtgagttagtttatgaccacctaatagcacaaaacatcaagacctctcatcccggagctagagatggggaaaatgaatcttctgaggttcatattggtcgaatgctgcaaatccttagggaattttcagacgacccagtcctcagttcatacgtcattgatgatatttgggatgacatgaaggcgatgagagattggaggtgtatgatttctgtgcttcttgatgaaaatcctgcaattgagcttactgacattgatggaacaaatctagttcgcatgctgcgagcctctgcaaggaaggctgttggggaaagaatagttcctgcagtggacaacagaaagttgtattacaataaaggcgaaaaggaaatattggaaaataacaggcgtgaaataacaagtgccttattgacaaggtatccacatcttttaagaaaattcatatctgacaaagctaagatatcgcccatagttgatatgatgactcttttgaaacttgagttgtattcatacaaaaggcaagagaagcatttcatgacagccatagatctcatcgcagatgccttcttcaagcatggtgagaaggacccactgagatcttgcatcaaggcaattattttctgttgcactgagtgccaggctgatcttaaagattatgctgaaaataaacttaagaatcttgaagatgagttggtcttgaaagtcagaactgcaatcaaggaagtagaggcaggtgatgatgaatactccctcttggttaatttgaagcggctttatgaacttcagctgtcaaaacctgttaagaatgatagtttatttgaggatatgtaccgaatactagctcatcttagagatatggataatgaggtgaagagctttctcctcctcaatatgtatcttcaagtagcttggtgccttcatgcaattgatggtgaaaacccatctgaaacatgtattgatgaacttttatcaaagcaaagctcactttttgatcaactctattattatttagtggtactgcccacttatcagaaagaggggaggagcaccactgtactttcatgcagagtctgcatcattactgcagaaatgtggtgcttgtttaagaagtcaaaatattcttcgacaagactagagagtttgggttatttcccacagccagatatggttcagaagttctggaaactatgtgaacaacagctcaacatatcagatgaaacagaagatgaagatgcaaatgaagaacatattgaagacacaaacagggatgctgtcatgattgcagctgcaaagctagtgcttgctgatacagtatcaaaggattatcttggtccagagattgtttctcactatgtatctcatggggcaagtacgacagagataatcaaacatctaattacttctctaaagaaaaatgcaaactttgacatgggaactctattttttgaggccttgaaaagggcatatgaacgttacatggcccatgttcacgacggagaaaaccaaatcttgactggcaagtcttattcagaatgtcaagatcttgctagtcgtcttgcaggatcctatgttggggctgctcgcattaaaaataagtcagatatcctgaagattatccgagatggtgtttcttttgcttttgttgagcttccaaaccaattgttgttcctcgaggctgctcttctgccatttgtttctaaacttcaagcatcagatattccagatatcttggcagatgtagagaagaggattcaacatatcaatacgactggagatcaaagtgtttggcgcccattttttatgttcgtagagcacctacgtgacaaacatgcaaagaatgagaggaagaggaaaaacctgtgaggaaacggggccgtccaagaaaagttagagaggtaccagatgtaccagatctacgcggtgctcggcatgatcacggtgaagatgacgacagcaacggcgatgcagatcagcccttgatcaacacgatcaggtcttccgccgccaagctacggtccttgaagatctctcaacagggaccaagcagccaaaaaggggtccctggcccatccggaagcaatagctgagaggatgcatgcagtgcccctcatcgtcggtgatgatttccagacattgactgaccgattcaagcagcacagggggctggcactaacatcagtttgacgaggacaccattccacgcggagctgcagtcatccgctgtttagctgcttgttctaattgtgtaagcgctgtatatgatttgcacttgggtgctgtgactccctttgtatgcgggccctccccctttccctccctatgttctcagtgtatattaccaaatcatcttcatgtgtaataatatttacaggagtaggttgatggattcatgggactggctatcgtgtgttatcttgacatggctgagggcatcttccaggttatttcgtttttagcactgagttgccgtcctggcgcgtggtatgctgattccatatgctgttggtctacctagttttccatttcgatttcctcttctttgttagccgagttctgtcctaaagatgcccccgctaaagctgttgattaatatagtttccatatgct

SEQ ID NO: 19036 - DNA, 1270 bp, Zea Mays
ctctcccttattaggttaaacacaaaatgtgcatcgccgccgccaccatatagaaccacttatcatgaaccgccgccatcacatccactgcctcaactagtgttaccacctatggttcattgttgtgtctgcttcttgtagcactgttggtctacaaacattcatatttctctcaacatctggcacagcatgccgccttccaaagcacgccgaaagaggtcacttcgtgatatcactgccaccgttgccactgggactgttgccaactcgaaacctggctcatcatcgacgaacgaggggaagcaacaggacaagaaaaaggagggtccacaggaaccggacatcccaccattaccgccggtggtggtgaatatagtcccacgacaaggattaggatgtgaagtagtggaagggctactcgtgcctagtcggaagcgagagtacaagcccaatagcaagtatactgtgggaaatcacccgatctatgccatcgggttcaatttcattgacatgcgctactatgatgtctttgccatcgccagttgcaatagtgtgataatttaccgatgccttgagaatggtggttttggtcttctacaaaattatgttgatgaggataaggatgagtcattctacactctaagctggaccatcgatcaagttgatagctcaccgctgttggtggccgcaggaagcaatcggatcattcgggtcatcaattgtgctaccgaaaagttagataagagcttagttggccatggtggttcaatacatgagataaggactcatgcctcgaagccatcactcatcatttctgccagcaaggacttccaccctaccgaggttgggatttttgcaagttgtggcatggacaatactgtgaaaatttggtcaatgaaagaattttggatatatgttgaaaaatcatattcatggactggccatccatcaaagtttccaacgaggaatatccagtttccggtcttgactgctgcagtacactctgactatgttgattgtacaagatggcttggtgacttcatcctatcaaagagtgtaaagaatgcagttttgctttgggaaccaaaaccagacaagcgtaggcctggggaggggagtgttgatgttcttcagaagtacccggtgccaaagtgttcattatggtttatgaaattttcatgtgatttttactccaaccagatggcaatagattataaggaacaactctctcagagtacgcggttctgaataacaaccatctgctgctgct

SEQ ID NO: 19037 - DNA, 683 bp, Zea Mays
ccactcccacctccagcctccgcaagcatacttcaagtgcgcatatggttgctttgatcggcgccatactcaggaagcgatcagcaactgtgtggagaattgtagtgtgcctgtccttgctgccaacaatatttttgagagtgagatggccaagtttcagggaatgttgaaccggtcattgagggtctgtcaagataagtttgaagctgccaatctccagaagttgaaatcagatgcaactcgggaactggaatcctgtgtcaacagatctattgatgacagcctcagggtccttccgcatgtggtggatcagatcaagtccaccctcaaaatcaattagaggcactattacttttagcaaatgaaccagatatagttgagaatgtttcatattcacattcgctgcataactccacattttcagagctcttaccgatattgatagaacatgatcaccctatcgtagttttttggattctgctcttaccacctagtcctggcatgtcaacagcgtcgacattttgaactctactgagaacacagcttaggcattgaaaggctggatgaacttgttgtgctacatgtacaagaatactcttacgtcttgtgattttttacgttgctgtaaagtacaaattgtatgttgcgacgagacgataaaatgcaaaaaatcatacagacaa

SEQ ID NO: 19038 - DNA, 1482 bp, Zea Mays
tgttctaatcaacaagcagtttagtgcaaatcacaacttgttcttaatattcccctatcataggcttctagcgtggagtatgaaaatatgtgatatatattgtggtggtattgttttctgatgaaatgaatattattaccccataagtggacacaggccagttgaaccaatacgaacccgatcaactacatcgatgcatcaccaacccaagcatcccaatccaaacaacttgtaatttgaaactagaggtacattatagtaccccttttctttttagggaactagactattaaggaacaccttttctctagtggggtacaagactaatataatcagtttgtgtgacccgcctgaaaactatgttctgttatcagtattttgtgccgtcacaattcagttagcagcatgcatgttcaattgttggtgtctttgttaagtttgagtagaaaagctcaatctagcatgctcttcgctctgttttactttccatgattcgttgattatctatgcagtttctgcacgattactatgagtatgtgctttcatatattgtttactcgatgacttgaatagtttacaacgtatgattattgcttaggaccctgcactactaaatcaggggactcgcttgagtcagaaaaacttaggaaccaagttttctctctaagttactgacttcattttctactgtttatagattgcgaactgaatttaaatcaaatacttcagtattggtctctagagaggaagctctgccaaccattactaataactgagaaggatttggcaatcgcttatctttgactcaataccttatgacctcggaaaggtttgaacccgtcagggactaaagatgccaaaggttgaagaagggtcacgagcaaagagggcatttactatcctttgcaatcttcaccgttggaaggattatgataactgcaatttcatttcttcttggatatgagctccacaagaggatgagacccctctcttcgccatatgtatagttctgagatgacccacttgtggtttactgccatgccatgcctcatatggagttttcccttgcacacttcttggcaatattatatatgaggaggtacctagaccatctaatcagattcgtacactaattgatgctattggctatgttattccttggctaattacacatgtgaagcaagctagaagctcatcttgtacccgcaacaagttgatacctgcagcacgtggacaaagctagatggcgtggacaaagctagatgggaagcctagtataattgcaaagtgaatcagttagattctagtagttactaaaatttttaagtgatatttgtatgatattgccactttggctttgcttctttgtgaacacaattggcagttactgaacatgtttgctatcgagttagttagcttcttgatattttgccaaggccaaaagcaatattattgagggtttataatttgattttttaacat

SEQ ID NO: 19039 - DNA, 1152 bp, Zea Mays
cttgcctccattccggctacacagcgtcgtccgccgcagcggttggagagtgcgttgctgtgtggtggaggccgaactttgagactgtgatgtatccttactgtcctccacatatcactaagcccaaggagtgcaagaaacttttcattgttcacctatccgaaagagagtattttgctgttccaaggaatctgaaactgcttgctgttccactgtttgaactctacgacaatgttcagaggtacgggcctgtcatctctaccatcccgcagcagctttctaggttccagttcaacatggttagctcttagggtgatgatacaagaaaaccaatgtggccaaggcagctcttcggttgctgagctagctgatcaacgtaccctgactgattttatttcattgtgctggatttttttatatagactactactatctagacatgcatttctgattgtattgttgttgaattatcctgttatgtcgcatcccatgggcagatccagtctaggatatgtacacctgataacttagttaaaaaaaagaaaagaaaaccgaaggtagtgtgtgtatagatcgtactgtagtatgcatgtaaccggatcagatccgttttcaggtagattgctctaggttgggttatttattgcattaattgcacaagctagatgccatgtgtactattgtcgaaaaggggttgcaggtcaaccttgcgtagatgttaaatgcagtctcaaatattttatccgaaggtgtgttctagtactggcatgccattgattacgtcatccaagcatatgttgttgcatcttatatgtgaatagccacatggtctgaacttaaagtttctagaggaacaagttcttcagatgatgctgcatcttacccgttggagttcttaactgttccagttgcatttgagctcgttattttcatcatcctcttcccatattgccatgtttccccttgagaatgaagtgcgctccgcattttccaagtactccacaagagagctaaagaacattctcaacaaagcatttttacccaaaaaacaaacaaacaaaccagattttggctacaaagggcctgtttatgggctgcgactaacaggtttaactgactttaggtgtgtgtttggttcgtagtcatagttgt

SEQ ID NO: 19040 - DNA, 2988 bp, Zea Mays
ccaatatccgcagacctccctctgcgctggaccacacacctcgcctctcccgcagcccagcctcgcaaagcccctctgccaattctctgcagagtcattgacgctgtctgggctctctctgtttttttttgttccaatcatcatcgtcatcaaggaggagaagagtagattggattggtcagattactctctctcctccactgcagtctctctgaagagaagaggctaatccaatcaagcccagcccagcctttccacagttcctggagaaaatcctcactcgggtgcgcgaagcagcttgattcgcctgcgcagctcatcggaagagagccaggagcttgttcttggctgctggaccgatccttgagcagccgccgctgatcttgccggagggccaagagcctgtgttcttgcaccggagaattctcggccagccgtcccggatagggttgagggtgtgccatgtcagcgtcacagtcctcgatgagcggcgccggggagccgggggcgcgggcggtggtctggttcaggcgggacctgcgcgtggaggacaacccggcgctggcggcggccgctcgggcggccggggaggtcgtgccggcgtacgtgtgggcgcccgaggaggacggggcctactaccccggcagggtgtctcggtggtggctcagccagagcctcaagcacctggacgcctcgctccgccggctcggcgccgcccgcctcgtcacccgccgctccaacgacgccgtcgccgcgctgctcgacctcgtccgctgcaccggcgccacgcacctcttcttcaaccacctctacgacccgctgtcgctggtccgggactaccgcgtcaaggagcagctggcggccgagggcatcgacgtgcagtccttcaatgccgatctgctgtacgagccgtgggaggtcctcgacgaagaccgccgccccttcaccatgttcgcgccattctggaacaggtgcctgtgcatgccggaccccgccgcaccgctgctgccgcccaagaggatcaattcaggtgacctgtccaggtgcccgtgggacgagctggtctttgaggacgagtccgagaggggcagcaacgcgctgctcgcgcgggcgtggtcaccagggtggcagaatgctgacaaggcgctgacggccttcctcaacggcccgctgatggactactccgtgaaccgcaagaaggccgacagcgccagcacgtcgctgctgtccccgtacctgcacttcggcgagctcagcgtccggaaggtcttccaccaggtccggatgaagcagctcatgtggagcaatgacggcaaccacgccggcgaggagagctgcaccctgttcctccgctccatcggcctgcgggagtactcgaggtacctcaccttcaaccacccctgcagccacgagaagcccctcctgtcgcacctcaggttcttcccctgggtcgtcaatgaggtgtacttcaaggtctggaggcaagggaggaccggctaccctctcgtcgacgccggcatgagggagctctgggccaccggctgggtccatgaccgcatacgcgtcgttgtctcgagcttcttcgtcaaggtgctccagctgccatggcgctgggggatgaagtacttctgggacaccttgctggatgctgaccttgagagcgacgcgctaggctggcagtacatttctgggtctctccctgatggccgtgagcttgaccgcatcgacaaccctcagtttgaagggtacaagtttgatccgcacggggagtacgtccggcgatggctaccggagctggcaaggctgccaacggaatggatacaccatccctgggatgcacctgagtctgtgcttcaggctgcaggggttgagctaggatctaactacccacgccccattgtcgagttagatgcagccaattccaggttgcaggatgccctgtcagagatgtgggagcttgaggcagcctctcgtgctgccatggagaacggaatggaagaaggcctcggcgattccacggatgagccgccgatcgacttccctcaagaactacggatggaagtggaccgacagccggttcaacctgctatccacgcaccgggagtgactggtcggagacgagaggatcagatggtgcccagcatgacttcctcgttcattagagctgagaccgaactcactgcagattttggccacaccagtgaggacagtaggccagaagtgccatcaaacatccaccatttgcaggctcgcccggagagggaagagacagttgacggtggcactggcaatgctgtcagggtgcatggcaaccatcaccagcagaaccttcagaacaacatgcaccgcgtgctaggtatcgctccatcgatttcagaggcatcaagcagttggacgggcagggatggtggagtggtaccagtctggtcgcctccggcagcttcgggacactctgattcttatgctgccgatgaggctgacatttccagtaggggttatctggacaggcatccacagtcacatacgatgatgaactggagccagctctctcagtcattgtgagttcagttgcacggacaacagggtgggaagtggataattagcgctgtgtgtccggatttaattgcttaggatttcggcagagagaattatacatatgtaaattatcagattttgttcgtctatatagccttggtgtgcatgcaagtcatcaatcatgcagcttcctggatgcaataatggttatgtgaagctagttgtacagaaccttgtggtataggttgctaggtgtccacaagatatatgtattattcgtcagaagagttttctagcatcaggttcattttgtatctggttactgtcttattatagtctttggtgatgacagaggtgtgttctcagtttggtagacagaacatacctgctatcggtgaggactcaaaagggaacatcttggcagtgagattgggtgccactcttacctgctgc

SEQ ID NO: 19041 - DNA, 4022 bp, Zea Mays
aagcacgccacgcccccgcctgcctctcctcgccccactctgtctcccgcaatcctcgccttctcgccccaaattgtcggggctctcggtcctcgcccacgctctctatggaaggagatcgcctccgctgcaccccagcactcttgccccggatcgtggtcgggagaggaggcgacatccgaaacacggtgagtggagaggatcccgtttggcccctgggtaggtcggcttccttgtgccccgaatctcggtcctcgcccaccctctccatggaaggggattccgtgtatcgcgagcggatcatggtcgggagaggaggtggcatccaaagcgcagcgagtggagaggatctagtttggcccctgagtaggttggcttccatgtgccccggatcccggtcctcgcccaccctgtgccctggatctcgatcctcgcccaccctctccatagaaggggatcccgtgtatcgcaagcagaccgtggtcgggagaggaggcggtatccgaagcatgacgaggactcctgtttctgtcagaggctatggggatttacgcatgaagggtcaaatcaatggtgctcagggggattctggtgcagatcaactaaatactactattgatgacagtgaagaagtaagagaaatttgctttctttgttgggcttcaagagatggctcaattgttgcggtgggctatataacaggtgacacacttctatgggatatgactacaaaatcctccagacaagagaagcaaagtgatgtttcatctaatgttgttaagctacaactagtctcagggagtagtaggctgcctgttattgtcttgcattggtctgctgggtcagcagtacattctaataaaggagggcatctttttgtttatggcggcgatgatatgggatctgaagaagttctcatggttcttagcttggaatcaactgctggattagaatcagtgagatgcatgtcacgaactgatctcaaacttgatggatcatttgctgacatgattcttattcctgatactggggttcttgataaaagcagaattctgcaccttttgttttgacaaatcctggatagctgaatttttatgacggtggctctctattttctgtgcaaaactcaaaagagggaaatcctcttcctgaagcacagaaatttcaagtcgcaattcctacccttgatcccaacataacggtcactggtctttattcgctaaccaaaagtgaatttccaaatatttcactgaagaaattttgtgctaggaaaaatgttgggcatttcatatcagagaacatgaaatgacctttgactggtggggttccaaatgagatgtcactgaacgaagatcatgctgttgaaagaatataaattgcaggctaccaagatggttctgtgagtatatgggatgcaacatttcctgttctaatgccaatgtttgtcttggatggtaatgtcagtctcatttgtatatttgtagtattacttgcattattcctcattggtttataactaacgggttaaccccaatcaagttgtaactattctttactacaggttgctgatgttaatttggatggagctaatgcttctgtatgatctctagccttttgttcattaagcatgactttagctgttgggacaacaagtggtctggttagatcttgtcagtcttacgaattggtcgaagggtggtcatttgtatcattttagaatatgtttttataccattttttgtagttgtgcatctataaactccgagaacacattggggattcaagcttccattttgtgagtgaatttaagcaagaaggtaaatatttcatacggaacctgattatatatgcctaaagcttcacctgctgcctattccccaacaatgttgtcatctttgttaagacagttttatgccaatttcacttcttctcaccagcacgtacaagatgtctgtcgtgactggtcatctaacaagcagaatccataacatgcttctttggtaaagagagacagtaaattggtactgtcacttacgtgaatgtttattattgaaatgaaaatacatttgattatgatcggacacttataaaaacttgacttgcggggctaagacaacctccgagcattgtgtgatagagaagacctctcatacatgccaaaacaaccttgcccacgtgagcgaccgcgacctggtccgggtcatagtcacaaagtttgtggatcgatagggttgaggaacatcgtacgctacgtgtgagagatttttacatggtgggaacaaaaatgaccttgcgtacccgggtcgagggtcgctaccactgtacccatttcttgtgactatggttttggtcttcgacccgtgctttggtgtggtggcaggcgaggggattttttaaccccagtctgaaataatgtgtttgtttttatgtaatctttgtgctctaatatactgctccgattgatatgttggcctgctaaagctattattttcagtttgcttgcatggaactcattatttttactagctctgttttatttaaacttatagtagcacatgtgtccattattgatattgattaatctagctcctatcattatgttcactatattgaattagttttgacaaaaaccctggtaagctggaatcacattgttttgtagatatttttcttcaatataaatgcttaaacttaacctgataaattcatctacatgctctttcaaatggcaagcccactattgttgagttttatgcaaattggtgtgaagtctgcagggaacaagctccatatatctacaaagttgaacaacaatacaaagactgtggaattgtgaggtctgtccatgctgcctgctagaaatgggaaaatatgttagcagtagcaacaagtgtttttggcctttgatcttctggaggtcatgtggttgcagttctaccgatacttgttctacttgggcaaaattaggacaattcagttggagtacactgatgctaaagaaagcctcctgcaagttgctcgtaaggcaccaacaacagcccatggttttcggatccagtgcaacaaatgggttatcatagagaggctgctgcttggttggaacagaacaagacattgtgattttctttgactgttttgtaaggaatcagtgaaggaggctgaattgtggaatactattgtgatgaacatagtgaagcaggctgagttgttgcgtgcttctggttctggtctcagggagttacttggaaggggtttgtctctccgactctgctactgctttttaggcactgcttttttttgaagcacacattgttgtagctgaaacctccataatttcttcaccggttttatttaatctcttgttgcaattataggtgtacacaaaaactaatttttcatttgcttgtattactaaacttaatttcacaatcagccttgtagcactttgagattctgttgtttatttcttgtattagatattcttctgagtactggaataaagtcaatttatcatttttcatcagtaacatcttgagaggctgcttcttacatacaaacctaaagaaccagaggaaattcttgagcctgctcctcttgaagaggaaatggcaccagttgaagatcatgttcttgtaccacctgttaatgaagttgtttcacctcctcccaagactgaggtgtcccgatactggtgacttactggttgggaaaattataatatggtctaaatcttatgtgcttgattctaaaatctgaagttgtgttcctggtgtggaaatagagttgttgggctatttgtgtggggtgtgggttggcatgttcggagctgttcctggttggaaccagtgattttgctactcttttgacggataatttgagtttggagtcgtcgaattttgaaacagaggagtgggtttacatgtaatgttggcaaacgggatctgaattattaataaagcaacactgtttcgctgatatttttagttccaatctctacttctaattatatatatttgtgagat

SEQ ID NO: 19042 - DNA, 843 bp, Zea Mays
ctccacttgcactagcagcaggtacaccaatcgcttcgtccccgcgtctcgccgcgtaggcgccacagaaactcgcacgccgctccccgccgtccggcccgagtcgccgtcgccgccgaatccaatccatggctccgcccgccgcactgcaccaccgcacgcccctcctcctcccccgccgcaccgtcgccttgggtgccaccgccaccgcgcgcgccgccagggccgcttctctcgccgtcagggcccagccggacaccaccgccgcagccgtctccaccaccgcgcctgagccgacgcccgagttcaagcctccgccggggttcaaggcgcccgagcccaagaggttcgaggtcaagtccggccagctgggcagcgtcctcggcgcctcgctcgccatccccctccgcctcggcaccggcgtcttcgtcctcgggtactcgccatctcttgtttctgcatcagagataccatcagaccagtatgcactggaattcggagcttggaaggtgaaagaggaatcaaaaataggacagtgcaaacgaccagaaaagcctatcgagatatatgaatttgaaggttgtccattttgtcggaaggtcagagagatggtaacagtcttggacctagatgtattattttacccctgtcctaaaaaaggcccaacattccgacctaaagtcctcgaaatgggtggaaagaaacaattcccttacatggtggatccaaacacaggggtcgccatgtatgaatccgatgacatcataaaatatctagctgatacatatggcgatggaactgttccaattatgctatcacttggtctgttgacatatgcttcag

SEQ ID NO: 19043 - DNA, 426 bp, Zea Mays
ggtgtccacacacaatttaagttcgaggagaaacaaagagaaaatttgagagcgtttatgctggagggaccatggatactccaaattcaggcaaagtgtttcagtattggcattgctgtgggtcggaagacccatttgatgtgggttgtactgcttctcctcactgttcttatgatgattgaatatctcaggcttgcattatgttcttgtgattgtacttattaattaatattttacatgaaatttctttccaatttgttattatttaaacacttctaaactatagtctcatgtttagatttagcctcctaaagtcctaatcactttttttttggaaatggaaatatcattccggccttttgcatgttcatgcatacagccatacagctcaaataatacatcatctcaacagtttgtgaatcaaac

SEQ ID NO: 19044 - DNA, 1553 bp, Zea Mays
tgagcacactccgcttattgttccatatctctaccagtacaactaaactgagtaaagtttggttgctagaggcagcttggtgccttacaaacatagcggcagggaaacctgaggaaactaaatccttacttcctgctctaccattgctcattgctcaccttggtgagaacagctctacacttgtcgcggaacaatgtgcatgggccattggtaatgttgctggtgaaggagcagagctgagaaacacattacttgctcaaggtgctttgtggcctcttgcccgtttaatgctgtcaaataagggttccacaacaaggactgctgcttgggcattgtcaaatctcatcaaggggcctgattccaaggctgcgaatgaacttattggtatcgacggcatactgaatgcaatcattcggaacttggaaaaggcggatgaagaacttgtaactgaggtggcatgggtggttgtctatctttcagcactttcagaaaaagctaccagcctaatagtaagaagttcgatgccacagttgctgatcgggcgccttctagcatctgaaaacttgcagttgctcattccggtacttcgcggtttaggaaatcttgtagccggtgatggttacatggttgattcagtccttattgttggaaacagtgtaacagatcaagccttatcaagtcttatcaagtgtttgaagagcgaccatagggttctcaagaaggaggcatcatgggccatgtcaaatatagcagcgggcagttttgagcataagaaactgatatttggtagtgaggcgactcctttgctgatgcacctcctcaggactgcacagtttgacatccgcagggaagcagcatacacgctgggcaacctgtgtgttgtcccagcaggcagtggtaaccccccaactataatcgttgagcatttagttgccatcgtagatggtggagcccttccaggatttataaatttggtgaggtcggccgatatagagagtgcgagacttgggcttcagttcctggaactggtgatgagaggataccctgacagccagggcccaaagctcgtggagacagaggacggcattgaggccatggagaggttccagttccatgagaacgagatgatgaggaatatggcgaatggtttggttgataaatactttggcgaagactatggcctgtgagttgtgccgccgatacatctgggtaaacgtggagctatttgtgggtttgaaatgtaacgatcctggaacagaaggatgcgccgttcatcatggtttccatgtaatttagcccctaatatatagctggaaatgtgaatgtgttgaaactgaccgtgagctggagatgttaagtgtggataccttagatagacatagactgacatcttgcacagtgcttcctctatctcaaaatattttttcgtctcgtattttaagtgtggaaatgttggagatgctcttagagtacaaatatatgactgattaatctgatgatgtttataatgtaccataaaaactagtgttttttggtatatatttggtctaaat

SEQ ID NO: 19045 - DNA, 1561 bp, Zea Mays
caaggattcggttccgtactccgtagctatactacaccgctatctctttgggcagtcctccaaggccttattttcttgacgtcgacactgggagccacacaacatgggtccagtgcgacgcgccgccatgcgcgagctgtgcaaagggagctcaccctttatataggcccgcaaggacggcggatgcacttcctgccagcgacccactttgtgaaggagcccagcatgagaacccaaaccagtgcgactatgagatcagctatgccgacggaagctcctccatgggcgtttatgtaagggacagtatgcaattcgtcggcgaagatggtgaaagggagaatgcagacattgtgtttgggtgcgggtacgaccagcagggagttcttttgaacgcactagaaaccaccgacggagttctcggcctgaccaacaaggcactgagccttcctacacagctagccagcagaggtatcatttccaatgcgttcggccactgcatgtcgacagatcccagcggtgctggtggttacttgtttcttggcgacgattacattcccaggtggggaatgacttgggtccctatccgcgatggtccagcagatgatgtacgcagagcccaagtcaagcagataaaccatggggatcaacagctcaatgcgcaagggaagttgactcaagtggtctttgacactgggtccacatacacatatttcccagacgaggcgcttacaagattgatatcttcggtgagtgtcggttcttctatcgattgatggaatcacaaacaccggtcagttcttatgttttctttctaacttaacagctgaaggaggctgcatccccaaggttcgtacaagatgactcggacaaaacacttcctttctgcatgaaatctgattttccagtgaggtctgtggaggatgtgaagcattttttcaagcccttgagtctgcaattcgagaaacggtttttcttctccaggaccttcaacatccgccccgaacattacttggtcatcagtgacaagggcaatgtctgcctcggggtgctcaatgggacaacgatcggttacgattcagtagtaatagtcggagatgtttctcttcgtgggaaattggttgcttacgacaacgataagaatgaggtcgggtgggttgatttcgactgcaccaaccctcgcaaacgaagcaggattccttccttcctgcgacgagcgttgcgcaaccaacttctgtaaatactggctactgtgagactggctatgcttgttcttattacagacgtgctattccgcgtctgaattctgaaactgccatggaaccctcctataatcgtcgctgtaatcgtgtggagggatgtaactacgaggtagtaaaaaagcggttacaggacaggaaatagtggaaaggtagataagcatagatagtatatagtcaaaagaggtcatgtttgctatgttgtagagatctctcactttttaagactaaagtggggaagcataatccatagcagttcatttaaaaaaattggctggagcactgccatgtcatagaggctggga

SEQ ID NO: 19046 - DNA, 2817 bp, Zea Mays
tccacgtccgccatccatggctgccacaggtactcttctcttgtagatatactacaaggttgtgacttcttaactgagcttgttcaaaggatagagttttgccttgattccaccctttctcttgtcctggatcgggcaagcaaaaaactagagataatccgccgagaaaggaggaggaacatcgaaatgttagaatctctactaaaagatacagctgcaaagatttttctagcaggtgggattgataaccctctggtcaccaagcgccgttctaggatgtgtgttggtgtgaaagcttcacacaagcatttgatgcctggtggaatcgttctaagttccagtggctctggcgcaacatactttatggagccacaggatgctgttgagctcaacaacagggaagttaaactctcaggagaggagagagcagaggaactggtagtattgagcttgcttacctcaatgattgcagactcccaactgaagatcagaaatttgatggacaatgttttggaattggaccttgcttgtgctagagggtcgtatgccctatggacaaacagtgtcagaccaaccttcactgatagttataccattagccaatcagaccagtgcaatgactattcaatttatattgagggcattcgccatcctcttctacttgaacagtctcttatggcagaagaatcaactacagaagcatctgaaatgcctgttccattggacatgtgggtaaaaaagaatgcaaggatagttgtgatctctggacctaacactggaggcaaaactgccactatgaagaccttggggctgtcctcgcttatgtcaaaagctggtatattcttcccagccaaaggaaggcctaggattccatggttcgatcaggttcttgcagatattggtgatcaccaggtagtctctgtcctttgatgagaatttcgctagtcacttgtgggacaataagctcattgatgaaaactattttttggattgaagtcgctggagcacagcctctctacattcagtgggcacatatcacgtctgcgcaagattgtagaaatggtatcaaaagattctctagttctaattgatgagattggcagcggcactgatccagctgaaggtgtagctctttcaaccagcattttgaagtatcttgcaagtagagtgaatttagcaattgtgacaactcattatgctgatctaagtcggctccagtcagttgacaaccgattcgagaatgctgcaatggaattttgtgtagaaactctacaaccaacataccgaatcttatggggcagtactggtaattccaatgcacttagcattgcaaagtcaattggttttgatcaaaaagtgcttgatcgcgcacaagaatgggttgagaaactactgcctgataagcaaaaggagcggcaaggtttactttatgattctctcgttgatgaaaaagaacttttggaatcccaggcaaatgaagctgcatctgttctttcacaggttgaggggttgtacaatgagattcgcttggaagctgatgatctcgaaagcagagtagctgcattgagagcaagagagacccaaaaggtacaacaggaattgaaggttgtgaagtatcggatggacaccataatcaagaactttgaagctcagctaaagaattcaaaacttgaacaatacaattcgctaatgaggaaagcagaggctgccactgcttccgtggttgccgctcatcagccaagcgaaatagctttcgatgatgacgatgaaaaccggatctcgttcgtctcacaagttggagacaaagtgtatgttcaagggctgggaggagaaacgatggctaccgttgtcgaaactctcggagaagatgagagttgtatggttcaatacggaaagataaaggttcgagtcaagagaagcaggataaaactggttcaaagaggcacaaataacgaggcaacaacttcctcttctgtaaaagcaaagggccgaacaccgaagcagcgatcggcaacgacgacggacgtctccttcggccccgtggtgcagacgtccaagaacacggtggatctgcgcggtaagcgggtcagcgaggcggccttcgagctccgcatggccgtcgacgcgtgcaggccgtaccaggtgctgttcgtggtccatggcatgggcaccggggcggtgaaggactgcgccattgacgtcctccggaagcaccctcgcgtggccaggttcgaggacgagagccctctcaactacggctgcaccgtcgcctacatccagtgaacgggtgggtacagacagactgtttggaactgaacgcagacatttcagtacagaaatcagtttggttttgccttgcctaccagctcccagcgtgtccttgtcacagactcacagttgcggaatgccagttgggtgagctttttgctagtagctgatctgcgggtggatcggataaatggccttggcagttgtgatcagttcggccggcgtcctatgcattggcatcgcaaaatcaccagcggaagcaaggtgtgcgtgcacatgcgcgcctcttctttccagcaggattttgtgtggcgagggctgatgtggccaggttcgagccacgagagacaaaatacttgtggctcgtcaactcgttctcgacttgttttagttttgtcacaagttaagctagtatcttggctcggtttgttacaagccagctcgagttaagcttgttagctcgaatgatctagcatttgtaagcaaaacaaaaggcattcacagatgaactaataagtgataaactgtattaattagatgttgtattca

SEQ ID NO: 19047 - DNA, 1765 bp, Zea Mays
caacactatgttcttccatatatacaagacgacatgtcagacgatctatctccgtcgccgcaaatagagtacgatcgtcttctgggcggccttctcgtcgagggttttgacgacaaatcatgcagaagcaggtaccgtttcgcacgctaccacagttcaccgagcataccttctccgtacctcatagagaggctaaggaaacaagaagctctgcagaagaagtgcggcccaggcaccagagcatacagggaagcttcgaagcagctgaaatccggtcagagcatgagcatcaacgccacagacgactgcaactacctgttccttatcatccacgccggcttagggaaccggatgctcgagatcacttcggcgttcctctacgcgctgctcacgaaccggatcttgctcctggaccgttacaaggagatcgcggatcttttctgcgagccctttcctggaacgtcgtggctggttccttcggacttccctctgaacgacgacgagttcggccagagcagcgctgagagctacggcaacatgctgcagaacaaggctttcggtggtggtacggaccgatctttggttggcaacagactccctccctatgtgtacctccacctggacggcaactatggtttccacgacaaactcttcttctgcgaggacgaccagcagttcctgcgaggtgttccgtggctggtcatgaggacggacatgtacttcgtgccgtccctgttcctcgttccagctttccaggacgagctcggcaggctgtttcctgagaaagacaccgtcttccatcacttggcgcgctatcttttccatccgacaaatggcgtctggtattcggttacaagatgcttcaggtcctacctggccaaagcggaaaaaagggtgggaattcagatcaggatatatgaaaccaaaggtatcttgcagagaaacggcccgttcccacacattctgaaccagatcctctcgtgtgctcaaaacgagaagctgcttccagaaatcagtatggcagagggagcagccgatgggactcggaataaccgaacagcagccgggagtgggactcggaacaaccggacgatcgctgttctaacgacttctctgagcgcttggtacagcgagcagatccaggagaagtacgacgagcagtcggctgttgatggcgtgtctgtcagagtgttccagccgagccacgaggagtaccagaggtcgaggaacaaggggcacaacatgaaggcgcttgctgagatctacctattgagcatgaccgacgtgctgatcaccagtggcttttccacgttcgggtacgctgctcaggggctcgccggcctgaagccgtggatcatgcttaagtcggagaaccacgtgacgccagacccaccgtgcgtccgcgccatgtccatcgagccgtgcttccatcaagctcccttctacgactgcaaggcgaggaaggacaccgatttgggcaaggtagtgccttacgtgaggcactgcgaggacgtgagctgggggctcaagattgtagatcaaactcatttgtagtgtagctgtaatctggtcaggactcacggcagacttgcttgctaactagggcagaactattgttattcttattcttaatctgcgaaacacaaaggaaccatacaaaatgtattctttccctcctgtatttgatccaagtgtagatagttgatagacagatccattaatctgttcatcctctgatgtcaaaaggaagagaaacatgtttact

SEQ ID NO: 19048 - DNA, 696 bp, Zea Mays
gcccaatctgaaacgcaagccctgcaagcaacaccttgcagatggggccaaggtttgggaggtccagatatggcggatcgatccttccacctcggagagcaaagatctggtgtcaacagcgagggtcaccctattgaccaatctaccaacaccagaaaagatgaagagcttcgaacaaggcctgaagaaattttcatccaagttgtagagctactgacgaaggcatgcctgccgcctacattatcacatacgtacagcgggggagcgccgtctatgagtttactccatcatcagctctaggaggaaggagagctgctcagtggctgctgtctgctgacctgtctgtcattggcatggcacatcgtcaagaactcgccgcaagcccgcctcttcctgcgttggagcagaacgcgagacatttcaaacaccaatttttttcccctttcgtagtctcggtaaaactctggatccagctctcgcgatgcagtgttacctgagcttgtttaactgggtagttagatcactgatctccaggaggagagcttgcttgagtgaagagagtgttcctgctaggcacctcttctgcgaatgatgtagacagtttttctcgctgcggcttccatcttccgcagagcctgttgagaaataacaacaagtgaaaattgcttcgcagaatgtatactgtcttgttcgtgg

SEQ ID NO: 19049 - DNA, 1584 bp, Zea Mays
ccttgctctttataataatgcttgaagaataatgttttggctgggaatttgtttggcataccacttcgtggaacacattctcatgcttttgttagctcatacatgagccttgatgagataccagacaaggccctcaagagcaaagatggctcaagactttgccaggattttgttagtttagtgcaagagtggcttcaaaagattcaggcagcaaattcattaggtggtgtatttggtgatacaaataaaagtgagctggctgcatttgcatcctacgcattggcttttccaagcaacttccttgctcttgtggacacatatgacgttatgcgaagtggtattccgaatttctgtgcagtggctctagcacttcatgacttagggtacaaggcatctggtattagattagattctggtgatctggcctatttgtccattgaagcacgaaaagtgtttagtgcagtagagaaggaatataatgtacctggttttgcaaagatgctcattactgctagcaacgacctgaatgaagaaacaattgatgccctcaacaaacagggtcatgaggttgatgcctttggaattggaacttaccttgtgacgtgttattcccaggctgctcttggctgtgtctttaagctagttgagataaataataaacctcgtattaagctttctgaggatgtggcaaaagtttccattccatgcaaaaagagatgcttcagactgtatgggaaagaaggctacccactggtagatatcatgattcgcgaaagtgaaccatcgcctaaggcaggagaaagaatcctctgccgccatccattcattgaatcaaagagagcatatgttgtcccccagcatgttgaggagcttctacagtgctattggcctgggacatcagataaacctagagcagagctgccctccttggagaagatcagaagccgctgcatgcagcagcttgaaatgctgcgcccggatcacatccggcggctaaatccaacgccctacaaggtgagcgtgagcaccaagctgtacgatttcatccaccgcctatggctgaacgaggcgccagtaggtgaactgcagtagatgatgatcatataaaagaagttttgggtcatctgcgatacagcagcaattcatcgaagaaaattagagctcttctgcacaacatcaacagttgagcccatggcaggattttgctccccaaattttcatctctagtcaccggtatagaggcaggttaatcaggttgtctagtttatacgtcccttaattggtgggatgctatacacatcatcatcagaaaagaaccgaaatcatatggagccaaaaatgttactaggtcgtccggtgtttgtgctcgacggtgtcacatttgtttttctagccgatcgtgcatatggtcatataaaacactgcactgttgattgtactgtttatatagtgaaatttgaaatgatagatgaaataggagatagaatgagtaaacgatccaactgaccaggcacgctgcgctagcgaggcttgaattgctgctctctgcgttgcctgttctccttgaattatgcaaggatcgag

SEQ ID NO: 19050 - DNA, 237 bp, Zea Mays
cgccggtcgagttccctgcgcccctctgactcggattccagtgcccagccatggaactcccctgcaagctgctcgccggccacctagctcccctgtgcgcacctggccggatttcccagccgagccctttccccaaccgttcctccatccctacctcgcctccatggcgttgccatggatttccttgctgcgctctgctcgccatcgcaagccgcggtgttccctgcgtgcctagct

SEQ ID NO: 19051 - DNA, 1353 bp, Zea Mays
aaaaaaactcagacgcccaataaacccaatcgacgcctcgtaacccctccctctcctgcgctccaatgtctgacaagaaggacgtcgaggccggcacctcgccgccggcggcgcccagggttgcggcggcggctccaaagccatccacctacgtgcccatgttcgctctgcgtggcgaggaatgcgctaacctccttgcgctggtctccgccgtctcgcgcccgctcgaggacgccgtcgtggatttcctcgcacgcgtgcccccagagcgccgcttccggtttggctccgccattagcttcgtcctcgaggacaaaatgatgcttcaacctgctgagcgtttagttgcatttgcaattctgcatcaaggttattcctcacagtcggcaaatccatttcttcctctcttaataaatgttgcatgtgatgaaacttctgaggcagcagaccaggcgtttctccaacttctgttaagttcgagtaatggggacaatagtgaggttctgaagcagtctgctgttgattacttgaatggatctgattatgcatctcaggttcttttgccaagagaacatctagagaaacaatgttcttatgatgctgcacgacctctgcccttctctagtaatttcagagatgccactgtcagaagtgttattcctgacccatatgtttttcaaagcttcggtagttcatcggaggtgtcctcaataataccaaatagagatgacatggttgctactttacttcaacaaacatcacttggactgcctcctcaatggatacgaccgtctccaccaagacttgaaatttttgaaggggagttacagtggctgaacatagacaacaaccatgagctactatgggacggtaccatgtgtgcagacactagccgaggtgctgtgattcgagatttgtttgaacaagcttgtaaaggtcccctttcaatggcccagcgagagaaaattatcgaatatctgaggaaggatgggaagctacttaatcattgtggaatgacaccacagaagctccctgaccttgttgaacataatccacttatagctgtcgatgttctttcaaagctaatcaactctccggacgtggatgcatactttgatgctattgtccatatggatatgagcttgcattcaatggaagtagtaaacaggctcactactgcagtagttttaccaccaggatttgttcacgactatatctcaaactgcattcgatcatgtgaagacattaaggacaagtatatgcaaaatagactagtgagactagtatgtgtctttctacagagcctcattcggaacaagataatagatggatgacatttttggttgtgtgcag

SEQ ID NO: 19052 - DNA, 1068 bp, Zea Mays
cactgtgcggatctgtaaccgtggtgcgtttccacttcctccccagctcatccgcgacagagcaattagtccattgcacacctccactcctcacccttcaatctttcgttcccaactgcgtttcctcctccgcgtcttcaaggaggggagacctgaaacgaatccagtccaggctggtggctgccggcgctggacctgaacgctggtgcatactgcgtaggcaagagcaggcaatggcggaggcgaatgcggggaaggagaagaaggaagtggtgcggctggagcgcgagtccgtgatccccatcatgaagcccaagctcaccatgaagctcgcctacctcatcgaacatcagtctgacagagaagaattcttgaagctctgcaggagggttgagtacaccataagggcttggtaccatctccagtttgatgatatgatggaactgttcgctctcttcgatcctgtgcatggtgctaaaaaactcgagcagcagaacttcctacctgaggaaatcgacacgcttgagcagaacttcctgtcctatttctttcgggtgatggaaaagagcaattttaacatagtaaatgacgatgaggttgaacttgctcattctggacaatatctgttgaatcttcccattaaagttgatgaatcaaagttagatgacaaacttctgtcgaagtattttaaggagcaccgtcatgaaaacctgcccgacttctcagacaagtatgttatatttcgtaggggcattggattggaccgcactagcaactttttcttcatggagaaagtggacatgatcatagctcgtgcatggcgaaggttccttgagaagacgagactgcaaaagctgttctcaagaaagaaaaatagtaagccaaagatagattccaagaagaatgatgatttagctagtgaaatagaagacaaggagctttatgttgaacgcatacgtcttgaaacaatggatttaagctttgggaatttatttggcaaggtcacaattcaagagcctacatttgaagaggtgattgtcttgtatagagtgcactgatttgtaatat

SEQ ID NO: 19053 - DNA, 1726 bp, Zea Mays
atgctctgcgcagcgctttcgtagctgcacagcacggccaacaccccaacccgttctgaaaagaaaaacactttattttgcgaggagggggcacaacatctcagacctccagtcttcgagtcctcgttgtgcctctcttgatctcctcgcgtccatggctcctgtgcgaggtgccaagaagaggaagcggccggagaagcccgccccggcgcctactccagggttgccgctgccgccgctgccggacggtagcgattggtggggcgtcttctaccgaagggttgcaggacattccccttttccaagagaacaccagaacatggagtctgtcctgaagatgtcaagaagaaccttcgactacatctgctcacttgttaagaaggacctgacaacaaagacatacggtttcagaaacttcaggtttggtgacaagaaagtccttggggtggaggatcaggtggcggtggctctgatgaggctgactactggtgagtcgctgcagaacataggaatgtggtttggcatgaaccactctgccatctcgaacatcacatggcggttcatcgagtccgtggaggagcgtgccatctgccacctgaaatggccgagccctgaggagatggcgaccatcaagacaaggtttgacaaggtttacgggctccctaactgctgcggcgccattgacaccacacacatcctcatgtgttcctcggctcagcccaacagcaaggtctggctggacaatgagaacaaaaacagcatggtgctgcaggccgttgtggatgcagacttgcggttcagagacgtcgtcagtggctggcctgggagcatggacgacacgtgcatccttcgcacttcaggcctgtacaggttgtgtgagaagggcctcaggcttggggggcagatggagcttcccggaggttccgcggttagggagtacctagtcggagatgcaagctacccgctacttccctggctcatgaccccgtaccgggaacatggcctccaggcggccaaggtggaattcaacaagcggcacacggccgcggcggcggtggtgcagaccgcattggcgacgctcaaagggaggtggcgtgtcattcagggagagctgtggaggcctgacaaacaccggctgccacggatcatctttgtctgctgcttgataaccaacatcatcatcgacatggaagggactccaagcagagacgaactggtttcaggcaaccatgaccttggctacaagcagcagttcagtgacgccgcagatgacaatgcaatcaagcagagagacgacctgtctcgacatgtcgacaatgcaatcaagcggagagacgatctgtctcaccatgtcaccgccggcgagtaaacactcaccgtcaccctttgctttttgcacccattaatataaaaaacatggatacaaaattgtaaggtgaatttttggcagattccaataatgttttggtttcagggagacattaccatcttaaacaaagtgtagccctaatttgttaagttacaacatgccatcaagcatgctattttaccgtttacaacaggaagagattaaacaaaacgaccgataacgaaaccagtcaaaattagaagaaaaaaacatgctacacaactttgaaggcttacaaatgaaaattttggacacaacatgccattctacacattcaaagatttcagaccttttttttttttgagaaaaaaagggaca

SEQ ID NO: 19054 - DNA, 1409 bp, Zea Mays
cctgcgctgcttcctttgtcaggttcagtcgctcaccaatctgccgttcacacctctctcgctgcctttatttcctgttggcgacgctctcgccaggtcttcggcggcccgttcgtcggcgactagcgcctccgtttgccaggtcttcgtcgtccgttcgccgtcgactggtgcccagcaggtacatctggaagaatggtgatttaccttagcacaccaaaaaccgacaaggtatccgaagatggggaaaacgataaacttaaattcggactttcatctatgcaagggtggcgtgcaactatggaagacgctcactcggctttgctagatcttgacaatgacactgcatcctttggtgtttttgatggacatggaggaaaagtagttgccaaattctgtgcaaaatatctacacatagaagttctccataccgaagcctatgctgctggtgacctgggtgctgctgtccacagagcttacttaagaatggatgaaatgatgcggggtcaaagaggatggcaggaactccaagcacttggagataagataaatcagttcactggcataacagaaggcttgatttggtcccctaaagcaagtgattcaaatgatagacatgatgattgggctttcgaggagggaccacactctgactttactgggccaaattgtgggagtacagcatgtgtagcattagtgagaaataggcaactcgttgtggcaaatgctggtgactcccgctgcgtcatctcaaggaatggccaggcatacaatttgtcaagagaccataaaccagagcttgaggcagagagagaaaggatacaaagtgctgggggttacattaaaatggggcatgtaaatggaagtttaaacttgtcaagagctattggagacatggagcttaaacaaaacaagttcttgtcccctgataagcaaattttgaccgcaaaccctgacataaacattgtcgagctatgtgacgacgacgaattcattgttttagcatgtgatggcatttgggactgcatgtcaagccagcagttggttgatttcatccgtgaacatataaacacagaggaaagcctttctgcagtatgtgaaggagtgcttgatagatgcctggctccatcgaccatgggtggcgagggatgcgataacatgacgatgatcttggtgcagttcaagaagccatttgctcaggtaaaggatgccagtgatgcggaacaactaactggagatgcgggatgctctgagacccatggggccgaggagaatgactctgacaagcagatatagcgaagacaggactcttttggagtcttggtacatggcctgacgctgaacctgggtaaaacaggagtacgatgttgcaatgtacatggcctgacgctgaacctgggtaaaacagg

SEQ ID NO: 19055 - DNA, 913 bp, Zea Mays
tggcttcgctgttcacaaagatggcagcgtgagcagcgcctctgatctctggaaaggctgtagaggccataaagcgttctgcagcagcgagtgccggtaccaggagacgcttttggacgaagcggtggacggagaatttgcgctaggcgatggaggaaaaggaggagggcgttgttagtggaggagaagagaagccatgaggacgatcctgaacaaccaaccaccggcaccgagacgagatttctttctttctttctttcttcttcttcttcttttctttccttttcgttctgtctcctttgcgggatctgcgtgctgttttcggtcgtcgactcgatgaggagagtggtggtgatcttattagtcttttgcggattaaagaccttttttttttggcgcccgctttcgtaagaggctgaagattggtgacctgggcctgatcttgttcatgcaacttattttcccagctggttccgatgttatgatgcgcttcgatgcttgtccatgtgactcgctcatccagtgtggaccctagcctgaagtaaattgaaagaggggaaaaaatacttgtctctcctttgccctgtttctgtttgtcaatcatcacattatttccagtgattcatcagggtgctaaagaaggggtagggtctagtagtacagtatttccactatgatgattaggggttgttgattgagatgttagtatacttgtgtactggtggcctggtggggtggcttggagtttattaggagtgattggctggtttcctgtaactggatgtctggttgcagccctgggagtgtgcagctggaccgatgctattctgattgcgatttctcctggcgttgtctgtgatgagttcatctccacgcttcgctcccccccgtgggcggtttgatccgtccttcg

SEQ ID NO: 19056 - DNA, 2093 bp, Zea Mays
gcgctctctgtggcggacatcaaatcctctcggagaacagccaaacgagccaccaaaatgattcacttcccacatttccggatgaagaggcatttgcatgtattgagagagagcttggcttcacgcttgattcaatctactcgacaatttcaccttcccccattgcagcggctagtttaggtcaagtttataaagcacggttgaaatactctgggaagctggtagctgtgaaggtgcagagacccagtattgagaaagccattgggcttgatttttatctacttagaggacttggctttcttataaataagtatgttgacattgtaaccagcgatgttgttgccctcatcgatgaatttgctcgaagagtttttcaagagcttaattatgttcaggaaggccaaaatgcaagaaggtttaagaaattatatgccgataagcaagatgtattagtgcctgatatattttgggattacacaagtgcaaaggttctaacaatggagtggattgagggtgtaaaattaaaccaacaagcagttattgaaagtcaaggattgaaggttctggatttggtcaacattggtatccagtgtagcttgagacagcttctggagtatggttactttcatgcagaccctcatcctggtaatatattagcaacacctgaggggaaactggcttttcttgattttggcatgatgagtgaaacaccagaggatgcgagggtagccattataggacatgttgtccacttagtcaacagggactacgaagcaatggctcgtgattattatgcactagatttcttggaacccgatgtagatgtttccccgattgtgcctgctctcaagaattttttcgatgatgcactaaatgcaacagtgagtgagttgaacttcaagacaatagttgatggcctaggtgctgttctctatcagtacccattcaatgtaccagcatactatgcattgatactgcgatcgctcaccgtactggaaggtttagcactctatgctgaccctgattttaaggtgcttgctgcatcatacccttactttgcgaaaaggctactgactgatcccaacccatatctcagagatgctttaattgagcttgtattcaaggatggaaaattcagatggaataggcttgaaaatcttcttgttcaagggcgccaagatagggagtttgcagccaaagatgcactgcagcctgttctaaagcttctccttggtcctggtggggaggaattgcgtgcgttagttgtgaaagaggcagttcgtgtgacagaagccatcgccattggaacactggtcgattcatacaatgcagctccatcatttttgaagccattaatttccagcggcaatctagctgaaccctttaagtttagtgagactgaacaagaacagatgatggagctccgagaccaggttttcagagtatggggtcttttgagatcctcaaataactttgatccgagccttttgcagccaatcgttcaggtagactgttcctaaactttcttactgtactcttcaactgctactgtgaattgtgtgactaatacagaagagtgattgtcataatcaggttctacaagaaccagaggcccgtgtcttgggttctcgtgtcgcaggtggtgtaacacagcgccttgcggcacgtctgctgcaacagcttctcaggacccctcctgctcctggatcttcttagcagatatatagatataggctcgtatgattgtatgaagcatgtaaattgacacgatatttttcacaggaaatgagaaggaagcacaacccagaattcgagtatatagctagtttcttggttctaagtggataaagacattgtgcatcgagctttgtccagcagaccgtgtatatagttgtgtaaaaaacattgttttgtgctgtagattacactgtttacggagtgaagattgaaatgataagacatggacgagtgagctgctaagatgtcacgcagcttagatccaccgctgttcaccctgtaaatcatgatacgcggaccaattatgcatttacgcgtatgtgtagccctaaaacttctacgtgtcaaaataaaag

SEQ ID NO: 19057 - DNA, 1435 bp, Zea Mays
ctccattcccatctcccccctccctgcgcgcagccgcacaccaccaacacctttcaccagacgccgccgccgccaccccccatccctgtcccgtcccgcgcgcggccgccacatccgtccgggcatcctcgtctccccagccccgctgccgcagggttcatcagcagaagctgcttgcaccgccgccgccgccctcttcctgttctactgcttaatcttagattttgcttcgggttcggctaaatttcgtcggatggatatcgatgccagcgccagcgtcatgtgccagctgctgagccccgagggagaccctctaggctctgcgctctatctgccccagaacgtcgggcccccgcagctccaggagattgtcaatcagctcctccacaatgaggagaagttgccctatgcattctacgttggagacgaggagctctctgtctacctgggtgcttacatgcggcagaagaacgccaatgttgaggttactctgcgcatagtatgccaaccacaagcacttttccggatcaggccggtcaaccgatgctctgccacgattgctggccacacggaagctgtaattgctgtttcttttagccctgatggaaagagtttggcgagcggttcaggtgacaccactgttcgcttttgggacctgagtacacagactccactgttcacatgcaaaggacacaaaaattgggttctctgtattgcatggtcacctgatggaaaacatcttgttagtggtagcaagtcgggagaacttatattatgggacccaaaaactgggaaccaattgggcactccacttatgggacacaggaaatggattactgctgtatcatgggagccagttcatttgcagtctccgtgccgccgctttgtaagtgcaagcaaggacggtgatgctcgcatttgggacatcaccacaaggaaatgtgttatttcccttacaggtcacactagttcagtgacctgtgtcaagtggggtggagatggtttgatttatactggatgaaggctgcccgagtgcgaattcttgatgtttttcttttgaggattgtggaaaaagaatatgattctgagtcaacaaaatcaagttcccaagattgtttaatcaaagtatgggaaacttctcagggaaagttggtcaaaacattgaagggtcatgggcactgggtgaattcgcttgctttgagcacggaatatgttctccgtactggagcatatgaccacactggcaagacattttcgactgcagaggaaatgaaagaggctgctcttgcgagatacaagaagatgaggggtaatgctccggagagactagtttctggttctgatgattttacaatgtttctttgggaaccaacaattagtaaacaacctaaagctcgcatgactggtcatcagaaggtgatgatttgtttgtttc

SEQ ID NO: 19058 - DNA, 3234 bp, Zea Mays
gccaactacacgacacaacctgccttccttggttcctccaccccgtcctcccctgtcccgtcgcgtcagccactcgccgcggccaactaccgccgccgctgttgcagccgcccatctgcttccatcgcgtcgcggaggccgctcgcttcgccgccgcacgctccgctcttccggtgccctcctccgggaccctcggccacgccgcgtcgccttaaaccctagatctgcgctccccgcccccgcgctggccgcggccgcgtactgacgccggcacgctgccgatctccatacgtcgctcgatcccaggtttagctgcttcgaatttagataagtttcttccatgcatcgtgttggaagtgctggtaacacggctggctcgactcgaccgagaaaggagaagcgcttcacatatgtgctcaatgatgctgatgataaaaagcattgtgcaggaatcaattgcatggcttatctaaatggttctacatttagtacaagtgattacctttttagcgggagtcgtgatggtaccttgaaaagatgggaattaaataatggggatgcaagtttctcagcaacttttgagtctcatgttgattgggttaatgatgccattatagttggagaaaagcttgtttcctgttcctcagacaccacaataaaggtctggaattgcttctccgatggtgcttgtaccaggactttccgccagcattctgattatgtgatttgtcttgctgctgctgagaagaatagcaatattgtagcctctggtggtcttggtggtgaggtttttgtttgggaccttgatgctgctcttgctcctgtagccaaatctgtggacgcaaaagaagacgaggttcctaatggaaactcagggcctcctttgacaacattgtgcagtgtaaattctagtagcaatattgcttcctctaatagtcaatcacatgggtacagtccaattgctgccaaaggtcacaaagattcagtttacgcattggctatgaatgatacaggaactcttcttctctctggtggcactgaaaaggttgtccgggtgtgggatccgaggacaggttcaaaaaacatgaaattgagggggcacactgacaatatcagggccttacttgttgattctacagggaggtattgcctatcaggatcatctgattcgatgataagactatgggatctaggacaacagcgttgtgttcattcttatgctgtgcatactgattcagtttgggcgcttgcaaccactcattcgtttggtcatgtctacagtggtggaagagaccaatctgtatacctaacagacttatccacaagagagagtgttttactttgcacaaatgaatgccctattctacagttgtctctgcaagatgacacaatatgggtggcaacaactgattcttctgtatatggatggccagctgaagggctcacaccccaaaaggttttccaaaagggtggctcattcttagctgggaatttgtcattctcaagggcaagagcttctttagaaggatcagcacctgtccctgtatacaaagagccatcttttgtcgtcccaggggttccagcaatagttcaacatgaaataatgaataatagaaggcatgtactgacaaaggataccactggttcagtcaaattgtgggagatcacccggggtgctgttattgaagactttggcaaggtttcatttgaggataagaaaaaggagttgtttgagatggtaagcatacctgcttggttcaccatggatgctcgattaggatgcttgtctgtccacctggatactccacaatgcttttctgcagaaatatatgcagttgatctaaatgtttctggagcacaagaagatctcaagattaatttggctcatgataccctttgtggcttgctagttcattggagtaaaagaaagcagaaatctagttcgcatggcttgcctaatggtgatagttcaatagggaaagatgttccgtcaaaagactcgcaccgatcaagaactgaggtggatgacacaactgaaaaccacacaactcatgtgctcccatcatttgagttttctacagtttcacctccatcaattatcacagaaggttctagtggagggccttggagaaagagaattactgatttggatggaaccgaaggtgatctaccttggtggtgtgtggactgtgttactcacaatcgatatccaaaggaaaatacaaagtgtggcttttatttacatcctgctgaaggttcgcctgcgccaaacataactcaagggaagcttagtgctccacggatattacgaattcacaaggttgctaactatgtggttgagaaactcgttcttgacaaaccattggatggaggctctgatagtacgtttgttatgggattgagttctgctcaatcacagctctcacagctagatagttcttcgcggcttggactaaagccatggcaaaaaacaaagccatgtattgaggttctatcaccagatatgagtttggctacagtgcgaacatatatatggaagaagccggaagatttgattcttcattatagagtggtccaatcgagatgatcacggcttcagatgtacatgctcacatggttctccagatatgtcccagcatgtccgcacctttagatggtgtggttgaagatgcctttggcttagagaggaagcatcatcttcacagaggaaatattttgctcttgctccgccctccccccggtagctgttcccagaatcgacttgttcgcttctctgtaaagttcctgaccttgccctggtagtaagatgtatcatagcacaggtataaggctctctgctggctgccgagcttgtaaatgtagaagattaggtgcttaataaaagatcgaaaggatatgttttttctttcgtttttctttgacagcatttgtaagaaaaaaaaagaggctgacgctcggcccagatcgtggcgctccgacgtcgattattggatttaaccccgccgatccccttggaggtgtttggttgagaccagggtaagaggtggacgggaacccgggaacaataaagctgtttttgggacatgttgatgtcgggagctactttacctctcatccttcaacaattgttctatatactctatagggctattttagttttttttgttttttgctagcgagaaatcagaaataaatgattgctttgttttgataatcaaagctgttggatcatgg

SEQ ID NO: 19059 - DNA, 1802 bp, Zea Mays
aaaccggagaacgggaagcgaccagagggcggccgcggcacgcgggtcgtccccattccagtcttttcagaacgagattgcatcgaggaaactacagaaaagggaccaaatcgaatccgtggtgcactgcccctccccctccctcacaagccgccgccgccgtgaggactccggcgaatggcgtcccgcgtcgcctcgggcctcctccgccgccgcgccgtcgccactctagggctactaaggagtcatacacatgtcagaaactacagcagtcaactttcagctttgattccagctacttctcaatgctcaaatctgacaagacgctattacttacctaatccatctctgtaccaagtttggagtaggtcatttgcctcagacagcggagacaagttcgaggctgttgtgcccttcatgggtgaatctgtaactgatggaactcttgctaacttcttaaagaagcctggagacagagtcgaggccgatgaacccatagcgcagattgaaactgataaggtcactatagatgtcgcaagtcctgaagctggtgttattgaaaagctcattgctagtgaaggcgacacagttactccaggcactaaagttgcaatcatatccaagtctgctcaacctgctgaaacacatgttgctccatctgaggaagcaacttcaaaagggtcttctccgccgaaagttgaagagaaatcaagggtagaggaaaaagccccgaaagtagaacctcccaagatgcaagcaccgaagccaactgcaccattaaaaacgtccccttcagaaccacaactccctccaaaagaacgggagcggcgggtgccgatgccaaggctcaggaagcgtattgcaaaccgtcttaaggattctcagaacacctttgcaatgctatctacatttaatgaagttgacatgaccaatttgatgaagcttcgttctgattataaagatgaatttgtcacaaagcatggtgtcaaattgggtcttatgtcttgctttgtcaaggctgctgtttctgcacttcaaaaccagccaattgttaatgctgtcattgatggcgatgacatcatatacagagactacgtagacgtcagtgttgctgttggcacttccaagggccttgtggtgcctgttatccgagatgctgataccatgaactttgctgacattgagaaagggataaacaaccttgcaaagaaggcaaatgagggggcgctctcgattgatgacatggcaggaggaacattcactatctccaatggtggtgtctatggaagcctcctcagcacacctatcatcaaccccccacagtcgtcaattctggggatgcattccattgtgcaacgccctgtggttgtgaatggtgacattctcgcaaggccaatgatgttccttgcgctgacatatgaccacaggctgatcgatggcagagaggctgtattcttcctccgtcgcatcaaggatgtcgttgaggaccccaggaggttgctgcttgacatataaagttacttaccagtgctttcccgccgactgttttgtgctttctggaaataataccatgcaaatttttgactgatgaaaaagaattgcttcctcggaaagacgaattctgagctgaggatacagtgaggtttttctctataatcgtagaagagagcagcaaactcaactcaatgtgaggtcatgtttcattttcgggtataagatgctccatttcgggatgcagttcccagtaattttatttgccatgcaagagcaatagaagctgctgcatttttgtttgttggttc

SEQ ID NO: 19060 - DNA, 1487 bp, Zea Mays
ctcccttcccttcccataatattagctagggtgcggcggcatctccgtcgactacctggccgcggtggcatccttccccaaccccgacgataagatccgcagcctcgccctcaaggtgcaggggggcggcaacactggcaacgcgctcactgcagctgcacgcctcggcctccgtcccaggatcatttccaaggtagccaacgatgctcaaggaagaagcatcctcagcgaactccaaactgatggcgtggacacatcctacatcctggtcgcagagaacgggaactcacccttcacctacataatagttgatgaacagacgaaaactcgtacatgtatacacactcctggttctcctcccatggtgccagaagagctcacaaaggcaaacttgtcgtccgctttagatggcgtggacatcgtctacttcgatgtacgattgcatgacattgctttgcttgttgctgaagaggcaagtcaaagaaaaatccctattttgattgatgccgaaagaaagagggagggactggacgagcttctcaactttgcatcttacgttgtatgctctgcaaagtttcctcaggcttggacaggagcctcatcaatacctgttgctttagtatccatgctttcaaggttaccaaacatcaaatttgttattgtaactctgggggagaaaggttgcttgatgcttgagagaagcagtacagatgcttctgaggcaggggaaatagatgcagaggctttattcgaatcactagagaagagcattgatcagagttctactataccaaaatgtgttgcttccaagtcaaacttgagaataagcgcggatggagtaagctcgataagtggcaggttacttctaggtacggccgaagttataccacctggtgaactcgtagatacaactggcgctggagatgcattcattggagcagttctatatggtttatgcaccagcatgccaccggagaggatgctaccttttgctgcacgagtggctggttgtggttgcagaggtctgggggctcgaaccagccttccccatcgcgcagacccacgcctggctggctattgatccgaattcagaagggctgcatcctccatgaccacctgcctgcaccccgtccaatggttgtgaatattccagtcccgatcagatcaaataagtcatcaactattagcagcacatgaagactatcattgtgatagctattattttgcgatgattatgcaactatatggttccaacttgctagctccaggcataccaggcctgtgcaccttttacgggtgtagaaagttatacaaattccgattgtcacgaggtgtggtgtgccctaatcaaagctaaaggtgaaattatcaaaacgatacaaaatcgattgtaaagaggtcttgaagtttaagacccattaaattttctatcaataaatgtagtctaatgtatctatcattcacacaaatcttcttttgcgacccat

SEQ ID NO: 19061 - DNA, 3074 bp, Zea Mays
actggtaatccttgtcaagtgtcaacccaaccgtccacggtccgccctcctccttcgttcacgtcttcctcctcgcgttcctctcgtcagtacggcgacgccgcaaggctcgcaccgctgacagtcccccttcccggatcgagcctctcttttcccagatcggattctaatttggctatcgccgccgccctacgccaggtgccgagtccttagctgatcttcgccggcgaggagcgcccaccaggagttacagattgaatgacaagaatgttctctatatcatcctcagtatgtgtgaagaaatagtctgtaactacacatacctttcattgcaattaccaagaactggaaatggacgatgataatgggcttgagcttagtttgggcctatctttgggcgggtcatcagggaaggccaaggctagagatgcacctctagaaccaaaagcagaaccccaagtggaagaaagcagtagcaaaggtggtttacaaactcctgatgctccttctgggaaattttatcaaaagagcgctgataaccatgaacaaaatagtaaacagaggcacagccctgttgcaccacaatttgggaacttctggggacaaccagggaattcctccggtccagtggtagatggttctgttgaaccggtgagtcatcagcctcagctttccagttatcaagatggaaggatgccaattaacagtggaaataattctgaggagcagaagccagtttctggtaaccacaagttgccttctgaagagatgaactttcagaagaaacatcagacagctagtgaccagcctgatgcattcagtaagagctctgacggaggtgcaaagaatgcacctatctcgattagtacggatgatggttcaactggtgaaaatgaggatgttgcagagtcagaagcagaaggctcaaattcttggttggttgcacagcgtgaagacagtgctaagggctctgttgttaacaaaggaactgataggaaaaggtccgccgatgctgctgcagatggttttaaaggaaagagacaaccaagtttctcaggaagcgagtccagctctggaaagttgacacctggaaatcttatatcgatgcaggcatcaaatgtagtggctttgccatatcaagtcccaggtcaagtttctggacctcctgtcttaactaatgcaccaaattttcacccggtatgtactgtgcagttgaggccgcccacaaatggtggactagctgtccagacaatgggtagtgcctctcaagttgcttttggttacccagcagtccagctaccaacacttgaaacgggctcttcatgggcatttggtgctccacctcaggctctgtcttcttttactgcaaaagacaaagctgatcaaacaggaaccaagcaagttgacgatggcaagaagccccaggaggcaggtgcttcctcgtctgctcatgctgaagatgagaaaaaggctgatagaggactctctcttatgggttctgccataaggccaggcatcgcaccaaatgtcaaatttggagggtctggatcatatccggatcttccctgggtttctaccatcggcgccggaccaaatggcagaaccatatcaggtgtgacatacaagtttggtagaaatgaggtaaagatagtatgtgcttgccatggcactcacatgtctccggaggagttcatgcggcatgcaagtgcagatgctccggcccaagataatagtgcaaccctgccagcattccctgctggtaaccaagccacgtctgcagaaaattaggttagcggttcagagaatgcttgactaataatccttgcccctcttgtgtctatatcagccattcactgtaatactcagtgttcatctcgtgttaactttttatcatgcaagtttagattcttgtattttgagctttgtttgaggataaaatctgtgtatttttagcgctatgtaacacatggactgccaattgctgtggttggattttgatctatagacgatgtgttcattgctattagaaacagggacttggtcttcttcgtaagttcctcgcgaagggtgagagcatctcatgagagtgtatttctataactcgttctctctaaattatatttgaagagtcattaaaataaaaaaaacgttttaatatcttattagtctaatagtttttatatcttttttttactctaatagttttgcttagccttgtccggacacggcgtcgttcggggccacgcctgaccttgctcctctggttctgaggctggctctatcttcttgaccatatcgacctgagcagtgccaatctcgccgcgggcttccactgctttgccctatgcactttacgccgccccccggactggaaaattgcttccccgcggacctccactccaacggtgcccgtatctcctttgtcctggctggatccgtataatctcctttgtcctccccctcccctcgttcccgtctccctcgcgttcctctcgaccgtacgccgccgcctggctcgcaccgtcgacagtacctcagtccagatcgaccctccctctacccagatcgggttccagttggcctaccgcccccgccgccctactacaggtgccgaggccttcaccggcgaagagcgcccgccagacaaatggaactgggtgataaggcggtcggttttctgctgactctgacaagcttaaccttatttacatactacacattctgggtcatcattttgccatttgtcgacagcgaccactttgtgcacaagtacttcctgcctcaagagtatgcgattttgataccggtactggccggcgtggttctcctttcgttcttgagcgtgtttgtgggccttgtgatgctcaaatcgaagaagaagaagacggcttaatcgggtttgccatgtacactgctgtgtcattcacttagtgtgatgaaatgcatgagttcgcagtatctaattgctagaagctcggttctgtaatcagttccgtcatactttaaagcacctgttccagaacgatagtcaacaacccagaagttccaacgtgtcaatggcaggtcctaagtcc

SEQ ID NO: 19062 - DNA, 7684 bp, Zea Mays
ctcccagtcaaattccatctctctcctcaccacactcctgtcctgttgttgccacatgccagtctcctcctcatcacgccttccgccttctctctctacccggcagctctctggtccaccgctgcgggcagttaaaagccccccgctggcgcggcagctgctgcaggcagcacaagcggcgtcgccacggcccggggcgtaccaccacctccttctgtcgcgcccccctctcccttcccgcggtggctgggagggagcacgcgctgctgtagctcaacggcacgcatttaaggcgccccttggatcgcactgctgcccatatcctactcctccttcctctcctcctcctcctccccctcggcggcgatcggccgaacgcaagccacgcctctgcaactgcgtgcgtggtctgaacttcacagggtgaaataatggcggagccctaccaactgaacggcatactgaacgggatgcctaatttgagtcatccatcctctccatcagaggtcgatgaattctgtaaggcacttggtggtaactcgccaatacacagcgtgctagtcgctaacaatgggatggccgcggtcaagttcatgcgcagcatccggatatgggccctggagacctttgggacagagaaggccattcttttggttgctatggcaactccagaggacttgaagataaacgctgagcacataagaatcgctgatcagttcatagaagttcctggaggaacaaacaataacaactatgcgaatgtacagcttatagtggagattgcagagagaactcgcgtatctgcagtttggcctggctggggtcatgcgtctgagaacccagaacttccagatgctctagatgagaaaggaatcatttttctcggaccaccatcagctgcaatggctgcactgggtgataagattggttcttctcttattgcacaagcagctggagttccaactcttccatggagtggatcacatgtaaaagttccaccagaaagctgccattcaattcccgaggagttatataggaatgcttgtgtttccaccacagaggaagcagtggctagttgtcaggtggttgggtaccctgccatgatcaaggcatcatggggaggcggtggtaaaggaataaggaaggttcataacgatgatgaggtgagggcgctgttcaagcaagttcaaggagaagtccctggctcacctatatttattatgaaagtggcatctcagagccgacatctggaggttcaattgctctgtgataaacatggcaatgtggcagcactgcacagtcgagattgcagtgttcaaagaagacaccaaaagattattgaagaggggccaatcacaattgctgctccagacactgttaaagagcttgagcaggcagcaaggcagcttgctaagtgtgttcaatacgttggtgctgctactgtagaatatctgtacagcatggaaacgggcgagtactattttctggagcttaatccacggttgcaggtagaacatcctgtgactgaatggatagctgaaataaacttgccagcagcccaagttgcagtcggaatgggcatacccctttataacattccagagattagacgcttttatggaatggatcatgggggcggctaccataattggaggacaatatctgctgttgcaactaagtttgatttggataaagcacagtcagtgaggccaaagggccattgtgttgcagttagagttacaagtgaggatcctgatgatgggtttaagcctacaagtggaagagtggaggagttaaactttaaaagcaaaccaaatgtttgggcctatttctctgttaagtctggaggagcaattcatgaattttctgattcacagtttggtcatgtttttgcatttggggaatctagatctttggccatagccaatatggtacttgggctgaaagagattcagatccgtggagagatacgcacaaatgttgattacacagtggatctcttgaatgcaacagaataccgcgaaaataagatccatactggttggcttgacagcagaatagctatgcgtgttagagccgagaggcccccatggtacctctcagttgttggaggagctctatatgaagcatcaagcaggagctcaagcgttattactgattatgttggttatctcagcaaaggtcagataccaccaaagcacatatcgcttgtcaatttaactgtaactctgaacatagaggggagcaaatacacgattgagacagtaaggggtggaccccgcagctacaaattaagaatgaatggatcagaaattgaaacagagatacattcactgcgagatggtggacttttaatgcagttggatggaaacagtcatgtaatttatgcagagacagaggctgctggtacacgccttctcattaatggtagaacatgcttactacagaaagaacacgatccttcaaagctattggctgatacaccttgcaaacttttgcggttcttggttgcggatggctctcatgtggatgctgatacaccatatgctgaggtggaagtcatgaaaatgtgcatgccactgttgctgcctgcctctggtgtcattcactttgttatgcctgagggtcaggccatgaaggcgaatgacctgatagcaagattggaccttgatgacccatcttctgtgaggagagccgaaccatttcatggttcctttcccaaactgggacctcctactgctatctctggcaaagttcatcaaaaatttgctgcaagtgtgaattctgcacacatgatccttgcaggatatgaacataatatcaatgaagttgtacaagacctgctaaactgcctagacaaccctgagctcccttttctacaatggcaagaacttatgtctgttttagcaacacgacttccaaaagatcttaggaatgagttggatggtaagtacaaggagtatgaattgaatcctgacttctgcaagagcaaggatttccctgcaaggttgctgaggggggttattgaggcaaatcttgcatactgttcggagaaagatagggttacaaatgagaggcttgtggaaccacttatgagcctggtcaagtcatacgagggtggaagagaaagccatgctcgtgttgttgttaaatctctatttgaggagtatctgtcggttgaagagctcttcaatgataaccttcagtctgatgttatagagcgtctacgccttcaacatgcaaaagaccttgagaaggttgtatacattgtgttctcacatcagggtgtgagaagcaaaaataaattaatactgcggcttatggaagcattggtatatccaaacccatctgcttacagggatcagttgattcgcttctctgccttgaaccatacatcatattctgaactggcacttaaagcaagccaacttcttgagcacactaaattgagtgaacttcgcaccagcatagcaagaagcctttcagagctggagatgtttactgaggaaggagagcgtctgtcaacacctaggagaaagatggcgataaatgagagaatggaagatttagtttgtgctccactggcagctgaagatgcccttgtagctttgttcgatcacagcgatcctactcttcaacggagagtagttgagacatacatacgcagattgtatcagccatatcttgtaagtggaagtatccggatgcaatggcaccgagctggcctaattgccttatgggagttctctgaagagcatcttaagcaaagaagtgggcaagatgtgcccctacagcaagtagaaaatcccattgagaagagttggggcgtcatggttgtaatcaagtctctccagtttgtagcaactgcaattgatgttgcactgaaggagacttcacagtacggaattggtgtcagaagtgtctctaacagtaaccatgtacattctaatcaaagcaatatgcttcatattgctttggttggtatcaataatcagatgagtactctgcaagacagtggtgatgaggatcaaacacaagaaagggtcaacaaactattcaagattttgaaggataatactattacatcacatcttaatggcgctagtgttaaggttgtcagctgtattatccaaagggatgaagggcgtccaccaatgcgacactccttccaatggtctgttgacaaactttattatgaggaggatccaatgcttcgccatgtggaacccccgttgtctacattccttgagctggaaaaagtaaacttagaaggttacaatgaagtaaaatacactccatcacgtgatcgtcagtggcatatttatacgcttatcaagaacaagaaagatcagagattaaatgaccagaggatgttccttcgtaccatagtcagacaaccaagtgcaacaaatagtttcctgacaggtaatattgacaatgaagtagggcacacacaagcttcgtcatcgttcacatcaaacagcattctcagatcattgatgggagcactagaagaaatagagctacatgctcatagtgagactgtgagatcaggccactcacacatgtatctgtgcttactgagagaacaacaattgcatgaactaatcccgttttcaaggatgactggtaaaattgataaggatgaaggaactgtgtgcacacttttgaagcatatggtattgaatttatatgaacatgttggggtcaggatgcatcgtctttctgtgtgccagtgggaagtcaagctctggttggtttgtgatgggcaagctagtggtgcttggagagttgttgttaccaatgttactggccacacatgcaccattgatatttaccgagaagtggaagaccccaccacacatcagcttctctaccactctgccacaacctcggctggtcctttgcatggtgttgcattgaatgaaccatacaagcctttggatgctattgacctcaaacgttatgctgctaggaaaaatgaaaccacatactgctatgattttcccctggcatttgaaacagcgctgaagagatcatggaaatcaagtagctatggtgttagcgaagctaatgagcacaatcgattctatgctgaagtgaaagagcttatatttgctgattcggttggagcatggggcactccattggtttcagttgaacgtcctccaggcatcaatgatattggcatcgttgcttggaacatgaagctgtccacgccagaattcccacgtggccgggagattatagttgttgccaatgatgtgacatttaaagctgggtcctttggtccaagagaagatgcattttttgatgctgttaccaatcttgcctgtgagaggaaacttcctcttatctatctggcagcaactgctggtgccaggcttggtgtagcagaggaaataaagtcatgcttccatgtcggctggtctgattatgagagccctgaacgtgggtttcagtacatttacctcactacacaagattactcacgtctaagctcttcagtaatagctcacgagctgcaactaaaaaatggagaaaccagatgggtggttgataccattgttggtaaagaggatggacttggttgtgagaatctccacggcagtggggcgattgccagcgcatattctaaggcatacaaagagacctttactctgacatttgtgactggaagagctgttggcattggggcttatctggctcgtttaggcatgaggtgtatacaacgtcttgatcaaccaattattttgactgggttttcggcactaaacaagctcctggggcgggaggtgtacagttctcatatgcaattgggtggccccaaaatcatggctacaaatggcgttgtccaccaaactgtgtcagatgaccttgaaggtgtttctgctatcctgaaatggctcagttatgttcctccatatgttggtggtcctcttcccattatgaaacccctggacccacccgaaagaccagtaacatacctccctgagaatgcttgtgatgctcttgcagccatctgtggcattcaggatggtgaagggaggtggttgggtggtatgtttgatagggaaagctttgtggaaacattggaaggttgggcaaaaacagttatcaccggaagagcaaagcttggtggaataccagttggtgtcatagctgtagaaacccagactgtgatgcaagtcatcccagctgatccaggtcagcttgattccgctgagcgcgtagtccctcaagcaggtcaggtttggttcccagattctgcaaccaaaacagctcaggcattactggatttcaaccgtgaggagcttccgctgttcatcctagcaaactggagaggtttctctggtgggcaaagggatttatttgaaggaatccttcaggctggttcaacaattgttgagaatctgaggacatacaagcagcctgcttttgtatatatcccaatgggtggagagctacggggaggggcctgggttgtggtggacagcaagatcaatccagaccacatcgagatgtatgccgagaggactgcgaaagggaatgtccttgagcccgaaggattggtggagatcaaattcaggccaaaggaactggaagattgcatgctaaggcttgacccagaattgattggtctgaatactaggctgaaagagatgaagaaacaaaatgccagcatctcggaaatggagaccatacggaggagtatgactattcggatgaagcagttgatgcctatttatactcaggttgccacacgatttgccgaattgcatgacacctctgctagaatggccgccaaaggtgtgatcggtaaggttgttgattggaaagagtctcgggccttcttctacaggagattgcgaaggagagttgctgaggatgccctggccaaggaagttaaagaagctgctggcgagcagctttcccacagatcagcattagactgtatcaagaaatggtatctagcgtccaaaggaactgaaggtgatggtgaaatgtggaatgatgatgaatctttctttgcttggaaggatgatcccaaaaactatgagaattatcttgaggagttgaaggctgaaagagtatcgaactggttctcgcatcttgctgaaagttcagacgtgaaagctctaccaaacggtctttcgctgctccttaacaagatgaatcctttgaagagggagcaggtcattgatggcctcaggcagcttcttggttgatcgatggtggcaaagtggagcatgaagccctgtttagttgggaacggattgttctggttgtagtcatgtatttagctgtttaacatgtatttaattgggtggcgttactccacgtcatacggtacaacagcaatcctgatcaagtgattatttattcttcaatcgaagtagtacatgattttcatcagtaagctttgtgcttgcaattagggataaaatcggatggaaatgaactgaaaaacactcattttcgtttctatattttttttataaaaatggattctaattcagaaaaaccgtgagcaaaaacataaggttctcggtaaagaagggatttggacagcgcatatattgaaagaccggtaggagatgcaatagagacccgattctcgatttcttgtggaggatttctctattaggaataaaaaacggggaagtttctttctccacatgaa

SEQ ID NO: 19063 - DNA, 1361 bp, Zea Mays
ggcaatattttgatcatctgtgaaatgtaactacaaaggaggactacctttccagcttttggacaaaattggaggaatcacgaatagctcgcattggatcatctggagattctgctgttgcttctaaattatggaattatggttccaattccagattatttgagaatgacacttccatattctcattgggcaccgatgagaaagttggagatcctaccaaaactcataatggctctgagaaagttgcagcaacagaaccactcggtagatgctccttacttattacaccaactgaagatagaactgatggtattactgagcctgtggaccttgcaaagaataatgagaatgcaccccaagaataccaagctgcatctgaaattatccctgataaagttgcagagggtaatgatgtgtcttccacaggaattactaaggatactactggccatagtgcagatggtaaagctctcacttcagaaccgcatataggggaaacacatgtcaactcagcttcagaatccataccaaatgacgcagctcccccaacccagagcaaaatgaatgggtcgaccaagaaatcattagtcaacggtgttttggatcaaccaaatgccaactcagggctagaatcttcgggaaatgattatcctagctacactaactcgagcagtgctatgccacccgcgagtaccgagttaattgggtctgcagctgctgttatagatgttgattctgctgagaatggcccaggtacgaaaccagaacaaccggctaagggagcctcgagagcatcgaaatccaaggttgttccacgaggacagaagagggtgttgcgaagcgcaacaagaggaagagcgacgtaggggcattgctgcgctacattgttgtgtactaatatatgttgacggcccagaagggcaacatgatccctaggttaactagagctagcgccgactggtcgtttccacgtacgatgcactgcgcatcagcctgtatccatgttgtattatcgtagggcttgtaatgaccacatgccctggttagagttgatcattaggaccagtagctgcttgatttgtgtctcggtgatctagctttgggtagtttgtgcagttggaaggagacagtttgttggttgtattgtattgcagcgcacagctagcaagtgttgttgtagccatcaggtacgtgttgtgtagtgaatccaggtccagggacagagctgttcctctgtatggtggaccctgaccctttgttttgtgccatggggcctttctgtgttgtgcttacatgagctggagctgctttatttttctttttttatacgattaatacgctgctgatgagtcttttttttt

SEQ ID NO: 19064 - DNA, 1007 bp, Zea Mays
aaatgattggagcagggagaagcattaaggtatctttataggtggcttcagaatcatccaaaatatggtggccttgtccctccgcagtcaactgattcaccttatggtcctgatgttgttagattgtttaatgacgctgctcagatgtcacctgaagatgcagatgttcatgtagttctgggagtcttatacaacctatcaagagagtatgataaagctataacttcatttaagacagcagtacagctcaaaccacaggactactcactctggaacaagcttggtgcaacccaagcaaacagcatccagagtgctgatgcaatattggcgtatcagcaggcactagacttgaaacccaactacgtgcgtgcatgggcgaacatgggaatcagctatgccaaccagggtctgtatgaggattccattcgatactatgtaagggcagttacaatgaacccaaaagctgacaacgcttggcagtacttgaggatttctcttggcaacgcttcaagagctgacatgattgccgcatgcgacgcccgcaacctcgacgctcttcagaaagagtttcctctctgagtcctccctagctttctccagcagcgatctccatggaaatggaattggaggccagtaacatttttgtatttgcctgttgattcttctgtttttattttgcttaagtgttgttgggtaaatgtataggaactaggaagtgagggggaacaacatcccgtcgatgtgtgaagtatcattgcaagaaggcaatagtggcaaagggggaattatacatctgtaagtacacaggaataaaggaatggttgagtaataaattgtttttagggcgaaccactgcttgttttataaagttaatataaaaaatgcaatgcgggtgcttcttggtggtggtgccagatcgagtttaactgagacgatccaaattaaattccatggtccacgccacgggtcctgctgggccgttaatatacgggacaacctccgctggt

SEQ ID NO: 19065 - DNA, 482 bp, Zea Mays
cagaatttcactgaacttttgggacctgatgacatgccagcacatattaaatcttctatgtttggttgttccctaacgattcctataactgatggacgtctcaatacgggcacttggcagggcatatggctgtgcgaacatcgagaccatgccagccctcgcaaaattgtgattactctcaacggtgtttaacttgaagatcttatatgctgccaggaaatagggccaatgcattttggacctgaatgtgtttcagttaccatgtactatgttgagttgtaatgtatgctataaattccaataaattcatcgttactatttcgtatgtgattattggcttagccccttaggtgaccgttgaacttatcttttgaacactacgctttgcagtatttcatagaaattggtgaatgtacaaacaggaaaattgtcatatgctttctataataagagggcagttataaaataagtcttaacaaatg

SEQ ID NO: 19066 - DNA, 166 bp, Zea Mays
acaggatgaggtgcatggaggatgccgtgatgtgttcgtgagatgtctaggccgtcgtcgcccagtaaactttgggttgttggatcgttgtctcctcacgatgtaattatttatttattttgtacagaactcctattatataataaagttgtgacattcgtttctg

SEQ ID NO: 19067 - DNA, 2621 bp, Zea Mays
tcggttggatctcaataccacaattagtcaaaggctcagctcgttctacggttctaggaagtgtctaacagccgggtgtgatggaaacattctgttcctgcatcatcttcggaggcgcaaaatttgaccagttttcgttaggtgaatacttggagaaaaaggtcccccacaccccccacgcaggtgaatactacaagtagcagtacaaggaagagagccaatctgcccgtgactgccagtgagttgctcgggtgtggtggttagttgaggtcacgatgatgggaggcgggctgatgatggatcagagcgtggtgttccctggcgtccacaacttcgtggatctcctgcagcagaacggcgacaagaacctgggcttcgcctcactcatgccgcagacgtcctccggcgaccagtgcgtgatgggggagggtgatctcgtggacccaccgccagacagcttcccggacgccgtggaggacgacagcgatgacgacgttgaggacatcgaggagctggagcgccgcatgtggcgcgaccgcatgaagctgaagcggctcagggagctgcagcagagccgcggcaaggatcccatggctagcggtgggggcctggccgacggctcatccaagccaaggcagtcgcaggagcaggcccggcgcaagaagatgtcgcgcgcgcaggacggcatcctcaagtacatgctcaagatgatggaggtgtgccgcgcgcaggggtttgtgtacgggatcattccggagaagggcaagccggtgagcggcgcctccgacaacctccgtgcctggtggaaggagaaggtccgcttcgaccgcaacggcccggccgccatcgccaagtatcaggccgacaacgccgtcccgggcgccgagaatgagctcgcctcgggcgctgccagccctcattccttgcaggagctgcaggacaccacactcggctcgctgctctcagcactcatgcagcactgcgaccccccacagcggcgctacccgctggagaagggcgttcctccaccgtggtggcctaccggcgacgaggagtggtggccggagcttggcattcccaaggaccagggcccacctccctacaagaagccccatgaccttaagaaggcctggaaggtgagcgtgctcaccgctgtcatcaagcacatgtcaccagacatagagaagatccgacgcctcgttcgccagtccaagtgcctccaggacaagatgactgccaaggagatctcgacctggctggcggtcgtcaagcaggaagaggagctgtacctgaagatgcaccctggcgcacgcccgccggcatccactggtggcatcgccagtgccatatctttcaacaccacctcaagcgagtacgacgtggacatcgttgatgagtgcaagggggatgaggctggcaaccagaagacagcagtcactgacccaacctccttcaaccttggtgcggctatcctaagtgacaagttcctcatgccgacgccgatgaaggaggagaccgctgacgtcgagttcatccagaagaggaacgcccccgctcctgctgagccagagctaatgctaaacaaccgggtgtacacctgcaacaacgtccagtgcccgcacagtgactacagctatggattccttgaccggaatgcccgcaacagccaccagtacacctgtaagtacaacgatccgatcactcagagcgccgagaacaagcctctgccagcaccgccgcaaccacaagccttccagccggccttcagccaagccaatcaggcagcgaacaatctggacttcagcctgcctatggacgggcagaggtccatcgccgagctgatgaacatgtacgacaccaacttcatgacgagcaagaccatgagcagtagtgacagcgtcaccatcatggagaggccgaacgcgatgccccagaggatccagatggacgagggcttcttcggacagggcaacggagtcttcgacgacgtcaatagcatgatgcagcaacaacagcagcaggcaccacccgtggtgcagcagcagcagcagcagcagttcttcatccgcgacgacacgccattcatgagccagatgggcgacatcaccagcacggcggagttcaggttcggctctggtttcaacatgtctagcaccgccgccgccgctgattacccaggcgcggcgcagaagaacgacgggaccaattggttctactgaagaataaaacttgtagggctcctcgttataagcttcggattcctccatggatctcccaagttgtcaagtcttataggtcttcgttatataggttttgcagtagctgcaagacggctggaacctggaactggtttatacttgtatgtccggccagccataaacctctcttatttgcaaacttaatgttattcctagctttaagttgttagtctcagtctgctgtccatgtatatggctgttaaaatgcttgtgcttgtttctgtactacctgctgtttggtgtctgaatgaagtgttttcttcagtggttctgctcgacgtgtctgctcactgttgatgaggcacatcatcgctgctgctcttcacacaaacaacatgactgacatattcaaatattttgagc

SEQ ID NO: 19068 - DNA, 146 bp, Zea Mays
gggtaaaaagttgacgcgaatgaaggctagccacgcccacaccacaggcggaaacgaaattatgcggcgcggtgtactttcggtatatccactccactactagctagctgaccccggccggtcgagatcgattccttcttcttgac

SEQ ID NO: 19069 - DNA, 544 bp, Zea Mays
ttaagtcaagcaaatggtggtcgcaacacttgctgaatcaggaatgaatctttcagatgatattattgaaggcattattgataaaacatttgaggaagcagatacaaagcacgacggcaaaattgataaggaggaatggcgcagccttgtcttgaggcatccatctctgttaaaaaatatgaccctcccatatctccgggatatcaccacaacatttccaagctttgtgttcaactctcaagtagaggatgcgtgaggtcccagcgtctacggcaccattgaagcccctggggcacagcagatcaggttctgtgggggcacttagttgtttttgtttccttgaaaatgtaaattttatgtggtggcatgtcctcctgtatagtgagtattgctattgtgcacagaattggggcatgaagcgtttcttgtcgctgtttataaaatattcttcaaacatattgctcataaaaaactactcaaagtaagaatcaaattgagtacaaaactactcaaagtaagaattgaattgagtacatgtgatgcc

SEQ ID NO: 19070 - DNA, 4341 bp, Zea Mays
ggctccccaacccaatcctccagctgcggaatggcggcggcggagccgtgctgcatctcgcacgcgttcgagcgcgccactcgccaggaacccggccgcctcgccgtcatccacgcagcggcctcgggcgccgacagcgaggagcgccgcttcacttgcggcgacctcctcgccgccgtcggctccctctcccgccgcatcgccgccgcgctcggcagcaccgccaccgatacccgccgcgaccgcgagcaaggctcagggtttcgggccgccggcgccgtagtgccgagggttgtcggggtatacgcctcgccatcgttggagtacgtcgccgccgtcctcgcggtgctcaggtgcggcgcggcgttcctcccgctcgacccgtcgtggccggaggagagggtctcgtgggctatctcggcgtccaacgcggcgctcgtcgtgtcttcagttgggtcgcgaggagccacgctgtttgagagcagcgcctgccctgttctgcgcttttatggtggcatccggcggcgatttcgggatggaaatggcggggatgacggggaggagcttgtctggccgtgcgagcacgagtggcaccgcaagttctgctacgtgatgttcacctctggttctaccggaaaaccgaagggtgtttgcggcactgagaaaggagttcctttctgcggtcttgacttgctcaacacttgtcattcctcccagtgagtggagagctaatccagcatccttggccaacttaattaaggtttatcggatatcaaggatgacattggttccatcacttatggagataatactacctaccctggcggaaaaactttctgatggctgtaacccacttaagatcctaatatttagtggggaagttctgtctgtatcgctgtggaagagagtctatgaatttctgccagaggctactatcataaatctgtatggaacaacagaggtttccggtgactgtgcattctttgattgcaaaaaattgcctacaattttggagcaagaagaactaaacagtgtaccaattgggtttcctatttcaaattgtgaggtttctcttgtcaccaatgatggactatcagatgaaggtgaaatctctgtcagtggagcatgcttgtttactggatatttagctgatcccatgacaagtaactgccctgaaggcagtgaagttttagcatactacagaacaggtgactttgcccggcgcctaaagacaggcgaacttattttccttggaagaaaggaccgaattgttaaaatttatgggcaccgtttctcacttgaggaggtagaatccacattgagggatcatcctgatgtcagtgacgctgctgttacttttcaaagtaatggatctctggattttaaggcatacttggtgctgaggagtaataataaatttcttaaatgtactcagggttatagtggattacattcttcccgagatatcattgcaccacttcgaaactggctcatcatgaagtttccactagctatggtcccaaggctttttatccccatgaaatcattacctttgactttgtcaggaaagattgactatgtcaagttatctagcttggtttgtgcatttgagccttgtgaaattcatccagaaagcagtccagctgatcctcatatgcaagttatcaaaaaggcattttctgatgccctactggttcatgaagtgtctgagtatgatgatttcttctccttgggtggtaactcaattactgcagcacatgtggcccacaaattggagattgacatgagattactttatatttataccaccccttctaaactttttcatggtttacttggggaacacagtcatgtaattcctccaactcctgaatttcacaacagaaagaagttgagaaaatatgcaagcatatcagattcctttggcccagtttctgaatatttggacagtaactttcatgaccaagggcagataagtaaagagggtgcatacgatcactttgcagggaatcatgtaagtgatatagatggccagcttagcaaaagtaggacttacaatacataccaagcaaaaaacctgtgccctgatacatgctcaaatgatgaaattttcagtggcagaccatggatactaaattttcacttacaaaaggtgtggtctattggccgttgcaatagatttatgcatggttctgaagggatggtacaccttgaagatatttgttcatatgttccatataacaaaaagggttacctcgtgaaaatttggagcattcttctagattcatgtgttgatgcctcacctttgcttgtcataaacaatggaatgatgtccatctttattggttctcattcatatttgtttctttgcattgatggttatagtggttcagtgaggtggagtgtcaaattggaaggccgtatcgagtgttctgccgctataactggtgatttctcagaggttgttgttggatgctataaagggaaaatttacttccttgatatgtctacgggaaaattatcctggacctttcaaactgatggggaggtaaaaatgcaaccagttgtggacaagatgaggaatttaatatggtgtggctcgtatgaccattacttgtatgcgttaaattacaaagatcgctgctgcacatacaaagttttttgtggtggaagcatttatggatctcctgctattgacatggcacaaaatgtaatctatgtcgcatctacgagtggccttgtgactgcagtatcatttaaggaaccatccttcagagttctttggcaatatgaagctggtgcgccaatttttggttctctcgccatagatcatcaaagtggaacagttatttgttgtttagtgaatggcctagttatgacattgaactcacaaggttctgttgtttggaaggcaactgttggtggtcctatttttgctggtgcatgtttgtcacccaccctccctcatcaggtgcttataccttcccgtgatggcaacttgtactcttttgatactgtgtctggtgcccttctttgggtatacaaggctggggatccaattactgcatccacttttgttgatgagctgttaacatcagtgtcatttggaccatctgagagatttgcttgtatctgcacgagttccgggaaggtccatgtcatcagaattagagtagacatcagaactagagtagatgctaagtacaatcaggagcaaggtggtgacggtgttaaatctgaggagttagttcaaggactggatgctaagtacaatcaggagcaagctggtgaaggtgctaaatctgaggagttagttcaaggactggcatccattgatcttccgggggacatattttcgtctcccttgatggttggtggacgcatctttgttggatgccgagatgatcgattacattgtctcaccgtcaccacatagtttcaagtgattttgctggaggtgatatagttttgcccatgcctgctgcccgacaacctctcttccgcgacaagggcctttggcctttcctattggtaaggtgcgtggcaggctggcagcacaacacaggccacgaatgagtttggttgaagctcctgattgcatttggtgatttgggtctccaatgattgctttccatgtctacacaagaagctttccacagcctgctctcgcctaagcaagtgctacttgatgtcttgatcaaagtgagtggaaacctctcaacctcacattctccttgcagcatctgtattcagcccatgtggaacctttgccactgtcctgcaaggctggtcagtcatgccgctgttcccttcagtggaaattaactgataggaagaccagtgatttgcggagactgtaaaaattgttccacatagatctatactatttcctaaaaggagtttatgacagggacaatattctccaagaaatggttcgagtcgatccagcttcctgcaccagaaatgtactagtctctaggagtagaagttttttctttgcattaggtttcatgtttttttacttaccttgcatgcttccagaactctcgctgggaatgcacacatttttcatttcctttggctattagtagggatgccaatggagaattccccgtcgggttttggctccactatagaaaacgatccccgcggggatccctacgaactcttcctaattccccgttctctcgcggggataaattcccgtcggggatctctgtccccgtttaaattataatcatgatatacttttttttgttatgaatacaaaatattgtcacttgtatatattgtcagatgttagaaatcattatgtatacatcaaaataaatatatttgtat

SEQ ID NO: 19071 - DNA, 1957 bp, Zea Mays
cgtggcagattggcggcaccacagaattagctatcacacgcctccaccccacacgctctatcatcaagtccgcagcatcccgacgaactcctggtgtcctggcctgcacccaaaatatccatatccttccgccggctgccaaataatctctttcttgccgagatcggcgcgtatatcttttccggtgtccgatgattcatgcattagcaatttttgactcgtgcgtgcgtgactacagttgcatgctatggccatggtcaccacttcgccggcaactgtgcagccatcatcatgcaagcacacgagccgcggcgcggcgcggtgctgccctcctcctctgctgtcctggaagacacgaagctttgggcagcaggtgacgacaagggccacggcggcgagctcccgtgggcagcccgcgggcgtggcacaggcagggggagaagagggcgacagtatcaggcggctgcagaacgggtcggacgtgcggggcgtcgcgctggagggcgagaaaggccgggccgtggacctcacgccgctggcggtcgaggccatcgccgagagcttcggggagtggctgcgagaggaggagctccggctccggggccaggagcccgagcagctgcgtgtgtccgtcggccgcgacccgaggctgtcggggccgcggctcagcgcggcgctcttcgcggggctcgccagggcgggctgctccgtcttcgacatggggctcgccaccacgccggcctgcttcatgagcaccatactgccacgcttcaactatgacggctctattatggtagtgaagtaatgatacgtattttacgtttgcgtcgtgttggtgtgcgtgcatgccatgcaatgcatgtgtttcacttgtcaattactacgttcggatcggagttgcatgcatgcagatgacggcgtcacacctcccctacacccgcaacggcctcaagttcttcaccaagcgcggcgggctcacctccggcgacgtcgagaacatctgcgaccgcgcagcgcacaagtacgtggcgcggaagacgggagtcggcggcggcggcaggggcacgccgccggtggtgatgcgcgtggacctgatgagcgcctacgcgcagcacctccgcgacatcatcaagcagcgcgtggcgcacccgacgcactacgacaccccactgaggggcttcaaggtggtggtgaacgcgggcaacggctgcggcgggttcttcacctgggacgtgctggagaagctgggggccgacaccacgggcagcctccacctggagcccgacggcaggggtggagggaggggtagggagccttatcagggatctgcaggagcccgccgagtccgtgctcctccggatggacgtcatgggtgagcccaaggatgccaaggaaagggccacacatgcagttgaggcttttaagaactacatccaggaggacaaacttttcggttgggtgctggacgactgcggggattgctcagttgccgagggatgccttatggacacaaacaatgatcccatcgatgttgatgcacacatgtacagagcaaaactatacgacgagaatcagagagcagtaggcatggtccacattcgtcaaagcgtgcataatcccaacatagcactaaacatgcagtcctatgctcctggtggctgcaaatccatggcaaaggatcttcttgagaggttcttgctggcaagcggactgaatgggtttcttgacataagccaagtagagaagtttgtccagtagttcttatgcttattataggatcttagatttacctactctgtatatgtaacagctcagaacctagctaggagttcactactgttgcgagtgtacatctattacattattctcctatcccatccatggtaaaccttgtatgtgtttagcaaatatacatagcattaccttttttgattttagcgtttttctaaaagtattc

SEQ ID NO: 19072 - DNA, 2815 bp, Zea Mays
atccttcggttttgtattcttcgcttcctttcgccttcctcttcgcctctctctcgtgttctggcgtcgccgtcgccgctggcgcgagatggtggagacgcggcgaagcgccgcggcgaagcgctcggcggcggtggtggaggaggagaagggctcgctggcatcgccagcgctggagcccgcggaggacgcgccggcgggtcttggagcgggtgacgatgtcgcgtcgtcgcagcccccgaagcgcgcgaaggttgggtgcacggagtcggataccgcgaagccgtcggtggcgccggctgccggcgctgttgcgggtccactgcccaacacggctgggctgcaggccaggaccggcgccatggacaagctggaggccttcttgaagtccaaggaggctcagtccaatccggccggtcataagcaggggactaatgataaagatttatcggcgaagatgaagagagtcatggatttgtcggaggatatatcggagaagataaagagaagcaaggataggttggctgtgttattgaataagccggctgcaggcaccagcaggcgtcaggagccctggtgcagactaatttcacaacattccatgcaccctaccctttctatttacggtgcgattttcacaattggtcatggagcgcatcatgatttcagactggatgaatcatccactgcctcatctgtttgtagactgaagcaagctaagcgaggtgcactccttgaaatctttgaatccaaagttgttcgtgtaaacgggaaatctttggacaaggctgccaaggttaccttaaatggaggagatgaaattatcttctgttcaccagtgaggcatgcttatatatttgagcaacttcatgaggagaaatcaagcacttcagtgttatcttccacttgcacttgcagtagtatccagctggggcaacactcacatttcaatgatattcaggatcatgtgtcatctaaagggcgcaaagcctcatcctttctctttggaagaggtcggtgttcattgttgtcttgtggtctatcagcagacccacttaatatatgtaaaacgacggagggccggagccagtttatctctgaagataatatatcatctggtcggtgtcagctactaaaggaggatttgattaatgcaacggttgatgtgagtgacatctctgagtcatttgatagttgcccatattatctaagtgagcataccaaacatgctctaatgtcagcagcatttgtacatttacattgcaagaactacttcaagtttacaaaagatatatcttctcttagtcaacgagtgctgctatctggcccaacaggaactgatatgtatcaagaatatctggtgaaggcccttgcaaagtattttggtgctagattgctcactatagattcttccatgctgtttggtgggcaaacttccaaggaatcagaatcatacaaaaagggtgatagagtgaggtatattggctcaggcattatccttgatggacagagccctccagattttggttcacagggtgaaatatttcttccttttgaagaaaacagatcatcaaaggttggtgtaaggtttgataaaaaaattctgggaggaaacaatcttggaggcaattgtgaagttgatcatggtttgttctgttctgttgattctttatgccccgacattccaggatgggaggttacgttcaaacatccatttgatgtgatagttgagtttatctctgaagaaattcggcatggccctttaatcctttttctgaaggacacagagaaaatttgtgggaataatgattcctatcatggtctgaagagcaagctaaaacattttccagctggcgcttttataattggatctcaaatccagcctgacaatcgcaaagagaaggcaaatgttagttctccttttctttcgaagttccggtacagccaagctatacttggcctcacattacaggacattgatgggggaaatgataataataaagaaacatcaaaggcaataatgaagcatttgatcaaacttttcccgaataaagtgacacttgaggcaccacaagctgaaatggagctttcacggtggaaccagatgttaaaccgagatattgaagtccttaaaggaaatgcaaacatttcaaaaatacgctcttttctaacaaggcttggattggaatgcactgaccctgaagcgatattggtcacggatcgcattcttacaaatgagtgtattgataaaataattggttttgctttgagccatcaacttaagaactgtacaaatccagacccccctttgggtagtgtgcagtttgctctatccagcggaagtcttaagcatggcgttgacatgttgaaaagtatccagtctggctcgaagagcagcaccaaaaggaaatcacttaaggatattgctactgaaaacgaatttgaaaagagccttcttgctgatgtcacccctccacatgaaattggtgttacctttgaggacattggagctttagaaagtgtcaaagatactctgaaggagttggtgatgcttcctttgcaaagacccgaacttttcaaccgaggacaacttatgaagccatgtaaaggaattttactttttggcccacctggtacggggaagacaaatgctggctaaggctgtggcaactgaggctggtgctaatttcataaacatatcgatgtcaagcatctcttcaaagtggcttggtgaaggagaaaaatttgtgaaagctgtgttttcactggcaagtaaaattgctccaagtgtaatttttgtggacgaggatagttc

SEQ ID NO: 19073 - DNA, 2893 bp, Zea Mays
tttccattcatcttcttttttccccgaagtgtgaggtggaagacgtacaatcggcagtagttggttgtctgtcagtcaaggtattgcagaagatacctccgatctggtatctggttttgcaacacttgctgacgattcacttgaatatccaattggtgaatactgggattctgatgagtatgacgacgacgacgatgttggctacacccggcaaccaattgaggatgaaacctggtttttagcacatgagattgattatcctagcgacaatgagaaggcgactggccacacaagagggaacgatcgtcatgatcgccctacaaaggatgaagatgatgaccagtcatttgttgaggaagattcctacatatctggtgagcaatattttcatggaaagaatattgcacaaataggtacttctgagggcccaatggtccatgggattcctgataatgatatgatagctcagtatgatggccaacttttagattctgaagagcttaatttgatgcattctgaaccagcctggcagggctttgtatcacagaacagtgagctaggtatgctaggcaatgggaaattccttaatgattccgaacgacctcatcctgatgacctttttgtggaggatgatcagcatggctctgttaggtcaattggtgttgggataagcagtgatgctgctgacattggcagtgaggtgcgagaaagtctgattggaggtagcagtgaaggggatattgaatacttcaatgagagcagcttgagcgttagtggaaaaagacatcctcatcaggatactgaaaagaagagagtaggtgctaaaggagtaaaacatgaccaaatcatttacgctgctgatatccagaagggcaatctaccaccaggagcggctgatgtaggattttcttttcctccacctttgcattctgggaaaaatcatgagtctgatgctaaatctttgtggtcaaagaaggatgaaatgtattgcattaatgatcctgatgactgtcaaaatggcatggtatcagatgatatgcttgccacatggaggaaaaagaacagtgagtcttctctaaggagctctagagatgaaatgacgtctgatgttgttagatcaagaaattcaagtgcatcctatgacgaaacagaggacacatcgaatgctcggcaccacaaactagatgacgcacaagaagaagacactggaaccaacttggatgatgaggaagcagcagcgttgcaagagcaagtcaggcagataaaggcgcaggaggaagagtttgaaacgttcaatcttaagattgtgcatagaaaaaacagaactggctttgaagaagacaaaaacttccatgttgttctcaattctgtcattgctgggcgttatcatgtatcagagtatttgggttcagctgcattcagcaaagccatccaagcacatgatttacatacaggaatggatgtatgcgttaaaattataaaaaataacaaagattttttcgatcaaagtcttgatgagatcaagcttctgaagtatgttaacaagcatgatccagctgacaaataccaccttttgcgtctgtatgattacttctactatcgggaacatttgctgatagtctgtgaacttctgaaggcaaatctgtatgagtttcagaaattcaacagagaatcagggggtgaggtttacttcacaatgccaagactccagtcaatagctattcagtgtctggaggcgctgcagtttctgcatggtctcggtctaatccactgtgatttaaagccagaaaacatattggtaaagagctacagcagatgtgaaataaaagtaattgatcttgggagcagctgctttgagacagatcatctatgttcatatgtgcaatcacgatcttaccgtgcacctgaggttatactgggcttgccttatgacaaaaagatagatgtatggtcacttggttgtatattagcagagctttgcaccggaaatgtccttttccaaaatgattctcctgcaacattacttgctcgcgtgatgggcatcattggctccatagaacaagctatgcttgcacagggacgcgacacctacaaatatttcacaaagaaccacatgttgtacgaaagaaatcaggaaagtaacaggcttgagtacttgattccgaaaaagacatccttgcggcaccgattgcccatggctgatcaagggtttatcgagtttgttgcgtaccttctggaggtgaacccaaagaagcgcccaagcgcctcagaagcattgaaacatccatggctttcttttccttacgagccaatatcttcatgaggctaactgctattggatcctgtgtggctttagcatttgtctcaacacctaagcaccatgaaattttgatagatcaagacggaagattttctaccacgactgagccatggcatcagccgaaatcccaaacgcaaatgcagattcggttcgatcatgtcttggtgccacaatcagctggtcttaggcgccatgtaaaatcaatgcatgccatgtgttgtgcttgtaatataacttgttttttttacccttcatttccagccccgatgtaacaggccattttggttttctaggtacttggtgactcatttctagcaatagggctgtcatgttgtacatggtgtgatcattgttgagcggccccgtgccatgctgtgcacctgttacgcttctaacccaagtcatgaatgccgttcgtcgtgcttgtctttgaaggagcttaatggtcttgcatgccttttaggactgccaacgagtcgtatagagactgtatatgatgatgtataatcatgtatctagggaattctcaaaaaaaactagaaaaggtcgctaggtggtgtacacgttccggat

SEQ ID NO: 19074 - DNA, 2108 bp, Zea Mays
acttttattggaccgagtcaccgagggagtactcggaatgaagagaaatccacggtatcttgatcttccgccgccgcgcttcacgccagggctccttccaccggcgtcctccttaccgtcgtcctctactggtgctggactgctgcgggggtggagatcggcttagatcaactcttaattttgccgggactctttagagggcgcgtgcgctggtacagcaaaaaatgagtgataacctgatggaaaaggttagcgcctttggtgagcgcctgaagatcaccgggacggaggtcagcaagaagatgacggccggaatgagctccatgagcttcaagatgaaggagttgttccaggggcagactcccgctgataagattgttgaggacgccacctcggagaatctggacgggcctgattggaactcaaacttggagatttgcgacttgatcaacacagagaaagttaacagtgtggaacttatacatgggatcaagaagaggatcatgatgaaggatgcgagagttcagtacctctcattggtcctgcttgagactattgttaagaactgtgagaaggccttctcagaagttgcggccgaacgggttcttgatgagatggtcaggttgattgatgatcctcagaccgtggtgaataacaggaacaaggcccttatgctgattgaagcatggggagagtccggtgatgaactccgctatctgccagtctatgaggaaacgtacaagagcttgaaatcaagagtgcggtttcctggacgtgacaatgagagcttggctcccatatttactcccccacgatcagttgctgaagctgatgttgaaaccagcttgccccagcaggcgttcgaagacgtccatgttcatacatatactgctgaagaaacaaaagaagcgtttgatgtagctcgtaacagcatagaacttctttcgactgttctttcctcttcccctgagcaggatgcttcgcaggatgacttgacggccacactcgtgcaacaatgctaccaatctcagcacactatccagaggattattgagaccgtcggagacaacgaagctgtgctcttcgaggccttgagcgtgaacgacgagatccagaaagtgttgtcaaagtacgaggagatgaagcagcccagggcctcggagcatgcagaacagagagcagttgtcataccggttgccacagaacatgaagatctgactgctgccgtcaatgaagacgcccttgtcagaaaaccagctgccgcgagaacaaggtcaggtggggatgatgatatccttgatgatctggacgagatgatattcggcaagaagggaggtagcagctcccaggaagggccgaagaagccagatccaaagaaggatgacctgataactttttaagcgtacccttctataattgcagcctttgcttgctattttctggtgatgtacccactcggtagattgaagattccttaggatttggatcgattgtctattcgcatacgattcgtatctgccccctttcggtttgttcagtaaagtcgctgcactttctcagtcttgtttcatggatgagtcccagtcccagtcccagtgaccatgaatgtgttggatggtggattatgcaccaacggggggaaataaaatcatgacgggaataaatggtggtccttaattgacgaagcactcgcatacaaagcatatattgatagtacattctcggtacctcatgtttcacgcctgtacccatacactggattggcagtaaacgccactaccaaacgagttgcacgtagcaaggcatggaacctgagcgtcaagctcctcaggcggtcgcggctgccgcgagcttggcgcgcagctccctcctcaggatcttcccggacgccgacttggggatggagggggtgaagtacaccttgtgtagcctcttgtagaataccacctgaaaatcggcgcacgcgcgcacacgtacactgttatgtcagaacaaacttcttcatggcataagcaaggcgcgcggcgtgatccagcctgcgtgactggtgagtacctgcttggagatgaactccttgatggcgtcctccgcgatgtcggcgtcggcgg

SEQ ID NO: 19075 - DNA, 3404 bp, Zea Mays
atggccgccaccgtcgcctccgagcactccatcgatcgcaagctctccgcgctcgtggagcaagctcggccgagcgcggcggccatgctcgccgccgccgaggccgttgacgccgtcgcggagctcatcaagagggtgccacagcagcaagcgacgccggaggccgcgcggggttttttgagggacctgggactggaaaccgagaagctttccttcaccttccgtccgccggaggtggtgcgtctcgccgggagccacgcggccggcgcggtcgcgaggcccgaagtcgctgccgacctcctcgtacgcttgccaaaggaatgcttccacgagaaggatttcctaaatcaccggtaccatgcaaagaggtgtctttacctctgtgtcgtcgagaaaaacttgaggtgctctaaattaatccgcaaagtttcatggtctaccctccaagatgaggctcgaaagcccgtgcttcatgtatatccagcgaccgaaattgtagaccttcctggattccatgtaagaataatcccaactgcggattctttgttcaacgtttcaaagttgaatgtatcaacaagaaataatgtccgtgcatatacaaaagatggtgtaaacctacccacaccaaagtataattgtagcatattggaggatatgtttttggaggaaaatgcaaactttattagtagcacctttgctaactggaaagctttgcaagaggccttggtgttggtaaaggtttgggcacgtcaaagaacttcaatatacacacatgattgtctcaatggatacttaatttctgccatccttgtgtttcttactgtggactctggaggaagcatgattactagatcaatgaccacaagacaaattttccgtgtattgatgaattttttggcaacttccaaggcgtgggcaaagggattggtgattcaatcaatgaagaagcgtacggtcaccaaagaggacattgccacttgcctgaagacatttgatgttgccgtatttgatatatctggccacattaatttggcgtttcgtatgacaaggtctgcttttttagagcttcaagatgaggcagtttgcgcacttagttgccttgataaatgcagagatggtggacttgaagagctttttatgaccaaagtcgacttttgtgcaaagtttgacacatgtttgaggataaacttgaaagggaactctaaggttactggattaagctattgtgtggatgacgagtcttggagaattcttgagaaagatgttcagtctttgctgcaacaaggacttacagatagaacaaagatgatccgagccctatggagaagcacaccttctgaatggaaaatagtggaaggtttctcagaatttggcagcagtccgcttctggttggtatgatggttagctcattggaaaagagttttcgccttgttgatattggtccaaaccctgagaaccgtgttgaggctgttaaatttaggaaattttggggagagaaagctgagcttagaagattcaaggatggaaatattgccgaaagcacagaaggatgatttgattcatgttgttgatcagctggacttttgcctcttagttgatggccaagatccggtctcgtcttctggagctttgcttgaagcttttgatactattgctaagcagttacgtctcttagatgatattcctcttaaaatatctaccgtgcaacccctagactcagcttttaggcacacttctgtgtttcctcctgaacctcatccactggcatacggaaggaattctcagaggctaccgaaattcgcaacaacttgcataagatctttagaagttatgattcagctagagggatctggtaactggcctttggatcccgtggccatggagaagacaaagactgcatttcttttaaaaattggtgaaagcttggaggatcgaggaatgtttgtttcagccagtgaaaatgaggtgaatgtccttacatctggatattcattcttactcaaaatatttcatgaaagaggtttagtgatgcaaaagccagttggagatgacaagacacaaagtgttctatcagaagataagatgctttttcagcggagccagcactctagtatgatcaatggtttgcatggtcgttaccaggtgtatggaccagtagttaggctagcaaaaagatggatttctgcacatctattttcttcatttatctcagaggaggcagttgagctggtagttgcacatatatttttgaagccattcccattccatgccccatcttctcgggttgctgggtttctcaggtttttgcggttgttatccagttttgactggatcttttcacccatggttattgacataaataatgacttcaacctgatggatgagaaggagatcaatgataactttatgctgagcagaaaatcttatgagcgaaacccccatgatatagagcctgcaatgtttcttgctacgtcatatgataaaacatctgaagcatggacaaaacagtcaccaagcaagtcggttctcaaacgggtagctgcttatgctaaaagcagtgcggagcttttaacaaatcttatgcttcatggtccatcaggggaatatacatgggagtgcctgtttcgaacacctatgagcaactatgatgctgttattctcctccatcaagagaagctttgttgcccccaccacgtactttttcctgctgagaaccctgacggtaagctggtggtctggggcaaaccaagtaaagatttctgcccctatatgccactgaacaaaggggcagtgaaaggtttgcatgatgcaagagagaaactcttggtaaactttgacccgactacatacttcttgcgagacttgaagtgcgcattctccaagaccttcaagctgtggtatggttcagttggaggagacgctgtgggtcttacatgggagaacccaaagaagcgtggcagagaggaggctgatgaggctgctcccgagccgacatctatccttaaggaggttggagatgttggtaaaggtttagtgaggggtgtgtaccttgtcaaggcaccaaagtttcagtaaactgacagggcgtgtgcaactgaagatctgaccaacaaaccgatgcacaagaaggaagacttccaagtgttggtagtcttccttccatccagggcagtgtttggaggctagcaatgggggatggggagcacacgcggtagtcatggtcatggagttgtaaacgagtcaagatgtgctgtgtttagaccactattactagtacacagctgccaaaagagaaatgaaggttgtagaacctcttattgaaattttgactgtgtagtatatatgagatgtgattctgcaaacatttgctgcgatgaaaatgccaatcaaggtttgacgtgca

SEQ ID NO: 19076 - DNA, 4339 bp, Zea Mays
actaaaaaaaagtaaccgtccccgaagcccaaagccaaaaaaaaaacctcctgcagcctgctcgaaaccctccttcctcctcctgaattcgtcaaccggtctcccaaatcggagcggcaatcggattgttgggtacttgggtctcgagactgagctgtgctccagtccgtgagctattcgttgatttttccagcgtgaaggcgccgatttttgggccgttggctgtggtggcgggttcggcggctctggatccggctgtcttccggcgatagatcgggctattggagcagaacaatacttcggattcttgaggtgtccgtagctgcactcgcgatgacctttttttaggaagccggttgaattcgtagacctgaagatttattagctggcccacgccattttcggcaataaaatagtcggctgtttcatagcaatttcagagtccttctcaatcttctgaagaagcgagcatacgccactgctttgctggctttgacctcggaggcgatcccttgctgttcttattgactcggctttcgcctccgttgctgcctacccctggttgctgtcatagccacagggcctcggttcactgccgttgtccgcttcttcttctcctgccgctgctccttcgagttttttgcaggcctcgctctcagctgctgggctactgcttagtttcttcaaaggtttgtgttggaggataagagggttacatgcaatggcccttgaggcaaaacaagctgctctgtgtttcaaggaagttttgaggttatccattagaaaaagctatagatttgtttcagaacaccctatccttttcggtttgggtgtttttctctatctattctacagatcttcaccaaggctctttgtgttcctgctttcttcttcacctgtaaatatatgcactgctcttcttcttggaatcctactgagttatggagaagttaatcttcctgaggccagtaaagatcacagggacactacagaagtttcaacttccatggttggaaattcgtccagtgatgtccactttgaagcaaatcagagaccttctgtacttgaatttagggagaatgcatcaaacttcaaagagagagaaaccaaacagaaagtttccttcagggagagggctagcgagcatgttgaccttgatgattatatccctcttctgaagagagctggtgaagaagatgagagaggtgatcggggtaacatatctagaacacttacaccatttccttctatggtcaatattcgccaagagtctgtgataggggaggacttgaccttcaccaagaaaagacaatcggaaggttcttttttcatgcaggatagggccgactgtcagactagcctatttgatgaggcctgtctgtgtggtctgaatgacaaagatataccttttggtttgttttcttctagtgagaatgttaataagaatgatgagatggaggaaaaatttaatcaacagagagtatttgcagattcaacagctaccaaagagagagatagttctgaagcgatgccaaccgaagagcttgctggaactagcaaacaagctgcttctgtccctattgaccaatgggaaaacaatggcagacttaatgttgatactagcaatgtttttgaggacaacttgcttgattcctctcttggctcaccatgggcaagagttagcagtcatgatggttcatctggttttgattctgatcaggctgagagttctcctgatgcttccatgactgacattgctcccgttcttgatgagattgatccacttttgcgtgctgattccaatcaccccgatcctgttcctaatgatgattcagacacagattctcatgtctcagaggatcatcaaattgacgatgatagtaatgatgagggtgatgacattgatgctaaagataatgtggagggggagaaggaaaatgatgggaaggaagctgcatttctttggacagcagatgatgaaaagaatctgatggatcttggatattctgagatagaaaggaaccgcaggttggaaattttgatggctagacgaagatcctggaagaacatggcatttgaaatcgataacaacttgatagatgttcatagttctggctctggtacaagtttagatgatttgtcacgcttccgtgcacaggtacctcctattgcagtgcccaggaggaacccttttgaccttccatatgattctgaagaagcagcaattcctggctcagctccttcaatactgcatgcacggaagaacccgtttgaccttccccttgaacagtcaaatgacagtgttgttgtccatgcacatgatattttaaactctggagaacctgcgacttctcgtcgtgacatgatctttagaaggcatgaaagcttcaactttggaaggatggatgtgatccaggagaagcgtttttctagactcaagccatattttgttcctgaaactgtggaatggaatgcaagcaatttcgaaagacagttcaatgataagtctgagtctaagatgagctctgttactaaatctgatattgcttcttcagttgctgatcaggaggatcataaggaccaagatgaaaaggaccttgcagatgttggaagtgaatgctcagatggtatcaactccatagatgttgaactagaccacagtgacatcgatgaccgtgagattgctctacagcaatttgtctttgaaagagcacaagaaagggaagcacatcttgtttcaactaaaggaaaaggacgtgaagaagattatgcaccagaatcagctgggagttcaacgatgccatttcatgcagtccctgacctgcttagctgggaagatggagatggtgacaacagccttggtgctaaaccttctttccagcttaacacagaagttaaatgctcagaatgggtttcttcttccaggccacccgtggagggagaatctgattctggggatcttccagagtaccttgatactgaagttgcatcaagctcaaacacagccatacttggtgcaaacaatgcagctgagaaagggacctacaccctatcccagaggagagagttgttgagaacttcaacgtgcaagaaaatcatgaagcagcaatttttactgattcagttgttgccttgactgggttgcatgtaattgaagagcactttgatgatggaactgacagaactctaagctctgaagttgtttcctcatatcctcgagctaatggtgtcacccaatctccatcaagtgagcatgcagaaatcttgaatccatttgttttgatggctgctgaacataataaggtggatataagcgacatgcatggtgaagcaactgccggatatctacttgattctgatgatgaggctggtaaaatctatcctgagcctatggaaggcagtggaattgatgaaagtttcctgtctgaattggatgtggtgggagactttggagttgaaccgatgagactggaccagcaggtgacagatcaggcttctcatggtgataacactaccgatagtgttactgcagattctgttattagtcctcagacatctgacgatgtctccttgatcatgtcggaagttggtgctgaagaatccagggagcagtctccattggttgatgacctaaatggctccgaattatattaagaagaaaaaaatgtttggaatcataaacacacacaaaaacattcacacagcaaactcagattacatgcacaccttgactaagtttagaacagtaaaaaaggaactcggactagacctctgatctccatttgatatgctgtattggtttaatcacaaatacatgatcttcatatgactcccctaagaatgagcacttacaacttctcgtgatgctataaggacgcacttacagatttttgcgtaaacaacgagcatcctagttgtgttttttaccagcaggcgctgctactcctgtcatacttcaaccatttgtattcacatggtcttaatggtttgatgacagctatcctgttgttttgttcttatctaaaacacagtcacgcttctgtcttgcattgtaatcgtatttttctgacacttgtgaacttggttgctcaggttcatgttgtctctgctaaatatgtagtgaagtgcgataatgatacttttgtgagacttgattcagtagtcattgaaattaagaaggtaccaggtgggagaaagactttacatggggagtatgaatatacaacacaagccacgacgccatgggaaacaggctgtaacctatgaggtcaagcttatggaatgtttgccatagcagttattacatttcattcttcaaacaccaccttaacatttctta

SEQ ID NO: 19077 - DNA, 2892 bp, Zea Mays
tcttcctcacggtggacatctttctcatggttaccaggcttccaagtctgtcattcccttggaggaggcactggatctggaatgggcatgcttctcatttcaaagatcggagaggagtaccctgatcggatgatgctgacattttctgtctttccctcgcccaaggtgtcagacactgttgttgagccatacaatgcaaccatgtctgtccatcggctggttgagaacgctgatgaatgcatggttcttgacaacgaagcactttatgacatttgcttccgaactctgaagctgacgacccctagcttttgtttctggacagttggagacttgaaccacttgatcagtgcaacgatgagtggtgtcacttgctgcctctgcttcctaggacaactgaactctgacctgcacaagcttgtagtcaacctgatctcgttccctcggctctacttcttcatgatcggctttgcgccactcaccttgcgtggctcgcagcagtaccgtgcgctcaccgtctctgagctaacccagcagatgtgggatgccaagaacatgatgtgtgttgctgacccacgccatggtcgctgtctcacagcctctgccatgttccgtggcaagatgagcactaaggaggttgatgagcaaatgattaatgtccagaacaagaactcgtcctactttgtggagtggatccccaacaacgtcaagtttcaccccttcgtccccatcatccgggattcatccttcgacccctcccccccacggtccctccccctacccacaccaacgcgcacacggaccgggagtcgcagcggaaaccacaaaaccagcgtgaaggcgcccgaaccaccgcgagccccgcccaccactccacgaaacccaaacgcacctccgcagcgagggatatcccccatcaccccctaccagtttcaattttcaaaagggcgtggaggcgccgcaccaccgccgccgccaccactgacgagggaggaaacgccacctccccgagccagtccgatgttgtccgaccaggagctggcccagtacgtggagtccctcgtccagcacaccgctgcgcagggtggcaccgggatatcggcggatgccgtggtgcgccagctcggggcgcagctcggcgttgacctctcccccaaggcgcagctcatccgcagcgtcctcgtcgcgctcctcggccccgcggccgcgccggcgccggaccccacgggttcgcgtaaggatcccttcgaccccgcaaccgctgccgccgccggcgggccccgcgccgagactcctccacagcagatgcacttctctaccgccgccgcgtcgtcggcccccgccccttctccagccgttccccacttcttcccgcagcagcaccagcaccagatgcagtacttcctgtccgccccgcagcagtatcagcaccagcagcagcagcaacgcgccggcgcgtccccttcgccgtttgacatccccgcgtcgtaccgctacgggcaccagcccttgccgcaggccgaccaggcgcagctgcagaggctcgtccagctacagcaccagcagcagcaactggccgccgcggcgagagttgcagctgcagcggcaccgactccgggggagagtccccgtgcgccggagccgccaccggcgccggcgccggcagcctccaagaagaacagcagtgctagtgttggagcaaaacgaaaaggtggtcctggagggttaaacaaagtctgtggtgtgtctccagagctgcaagctatcgttggtgaaccagccatggctagaactgagattgttaagcagctttgggcatacattcgcaggaacaatttgcaggatcctaacaataagagaaagattatatgcaatgatgagctccgattagtttttgagactgatagcacggacatgttccagatgaataagcttctgtccaagcatatacgtcctctggagagtaaaaatgattcgaaaccagaagcaaagaaattgaagccacagggtgatgaaccaatttcttcagttgaaactgatgttaaccaacttccccttatggtttctgatgcgcttgctaccttttttggtaccggagaaagagaaatggtccattctgaggctgttaagcgtgtctgggatcacattaaaagcaatgatttagaggatccagagaatcctacggtgatactgtgtgactcgaagcttaaacaactctttggacgtgaaagtcttaccgctcatggtgtctcggaggttgctttcagaccacctttacacgcaatctaccaatatctgactggcgatacgattttctggactcggctgggctaacatcctgggtagtaggcgctgatgaaaggacaagggatctgctcaaattaagtgttgtatttgtatcctccatattggtgaagactgatttacagtagtaagggaaaaggaaatggcagttgtgttgcatactatctagtcagacatagtagtctacgtgacttggaatgatgcggcgttaaactaaaaaggacagcgagagctgatgtaaattcggcagccgtataccgtaggcgcgtgcgttttctggtaagactctcttgcattgctagtgccctaagttgactcgaaacatctgtacctcgaaatgttgctgtgttaggtgatacctaaccttaatacagtttagatcgttatccttactcatccttttcctgaacccctgcatgtatcatcattgtgtgtgcatcgtatgcggcagcagctgtttacgaaaggaacagctagctactgcttttttctgttcctgcatgatgcaggccgtttacaagatcctgcctactgtacaaggctagatacttgctccttgccctcctggtggtgctgctggtggcgacggcg

SEQ ID NO: 19078 - DNA, 1371 bp, Zea Mays
cgtcaaggcattctttctatgcaccagcctgcagtcccagaattccttcaatgtcattccacccacatcgcgtgccaccaactacgttgtccttagatactacgatgtcaagggagaccccgagggttttaagtctggtgtcatagatgagagccattgccactacatggtcgttttccaatatgggtccattgtgctgtttaatgtttctgatcatgaagcagatggatacctgaaaattgttgagaagcatgcatctggtttacttccagagatgagaaaggatgactatgctgttgttgaaaagcctaccctagagacatggatgcaaggtggtcttgactatatcgtgcttcgggatctgagtattgatgggatccgtacaattggaagtgtcctgggtcagagtattgctcttgactactatatccgtcaagtggatggaatggtagctgagttcacagatatcaaccgtggaatggaaaaaactggtaccttcactatggagaggaagaagcttttccagcttgtagggaaggccaactctaacttggctgatgttattcttaagcttggactctttgagaggtcagacatagcgtggaagaatgcaaactatgctcagatctgggaataccttcgagatgaatacgagctaacccagagatttgggaaccttgattttaagttgaaatttgttgagcacaacatcaggtttcttcaggagatccttcagaacaggaagtcggattttctggaatggcttatcatcatcctgatcagtgttgagatcttgatatctgtttataacataatacaggagcagatgtagggctttgttccatcctgaacacgagatgcatatgttttgaccgtggattctgtgatgccctgctgccgttggcacaacctcgatttgtaaagaaacatacgtactagagactggatccgattcgacctctatactccttataaattaattcctcagacatatggtttggtgattgcatttgcatgttgtcagtcagtcagctgtcctttctactggtaaaggaatgtcaccatgttctcgtctgcttgcccactcaaaagtgctgatgctgggcaggtacccttctagaaattgaatgtgcttattagtttactttgagtcctgtagtgtcatgaggtggtagcctagagcatagaggttcatatggataggatcagggttaagattagtagataaagattagataagattaagttagttatttgggattagattaaataagattgagttagttacttggtagccaagtcttcctatctatataaggatgtgttgtacctccttaagaaaaaaagaaataaagaagaattagtcataga

SEQ ID NO: 19079 - DNA, 223 bp, Zea Mays
catgcatcaaagaagacaatatatataataacagagtgtatagagataaatgtcacaatataatcagagtacttattacatagcgaaagtcttacaaaaataatatataaatataacacgaactaaggatcatccttggcgcaagtcaactgggagacgccacctagatcaaatcgaactcctcgatgcgtggctccacttgaaccacatgtacttctcctag

SEQ ID NO: 19080 - DNA, 5107 bp, Zea Mays
cgtagacccgcccccggacgacgaacacgagaagcagcaggccaaaccaatcccgttcccgtcggcctctagcaggtcctccccaaatcccccgcgatccccgaaaccctaccctccagcgccgcaagcccgcaacacgacccttccgccacctccgtcgcgctcccgcaatccagggtcgcccggcattggttttggagcgggaggtttgagctcttctaagaatcggttttgcgaggctttcgatgggttcggaccgtgaaggccgcggctcggaggccgtggcggcgagtaagccgcggaagaggcaactggtgatggagtccagcgattccgaggccgacgagttctgcatctccacgcggcagaatgctagtggtgccgcgtcgttgggcaatgctggtgtcagcagccaaggcagtggcgatcggtcggaggagaaacctgtgacttctagtcctgagaagcttccaggggttaagtccagtgatgtagatggttcagacaagaaaacgggagttcagctggagagcagtagttcgcagcctgctgtcaagaggatcagagttgagactgtccatggtgatggcaatggatgcagtggaggcgcatctaagtgtgggactggtggaaaaatgctgcctcgggggctcccagcatggcggtttgagaggccagaagtaaggggagggcgtgttctggatgacaaaggtggggtgagtatgaaagcaagcagtgcttcaaagatgaaggagcaggtatcaagtttgggtgacaagagacaggcagagctgcagaaacatgaaagaaggacaccattgaagactgatcagggcaaagcaatcgattctggccaacaggaggttttaaggttgcaagggaaaaggggtgttttaaggatattgccaaagaatgataaggtgaccagggatactggtgatggtaagattctgtcaaggcaaactgaggtggatgaggagactggtaatggcaggattccaacaaagcgaggtgttttaaagctcctgccgaagaacaatggtgctgtgatggagagtaatgaatgcaagcttctgtccaagaaggttaaggtggatgaggaaactggggatgacaagatgccaatgaagaaaactaaggtggttgataaggagaccagtgatggcaagattcttgcaattacaactaacttggatgcagagtttggtggccataagttgccaatgaagaactgtactgtggacatggaaactgttgctgggaagtttcagcaaaagaacagtaaggcagatggagaaaccaaagggagatataaaggatatgaagagaaaagtggcgcccctgcagaatttcagaagcatgatgcaaatggtgagaagagagttctgggaaagctactctctcccgttgcgctgaggaaaagtgatccaagcgtagtgggagtttctttgggccagagaatgaaacaacaaaattcaaagcaacaactgaagaactattctctgagcttgaaagatgatagcactaaatcaagtgaacagaagaatctgaaaaaaagattgcttgagcataaagggtcatcagagagtttgtcaaagaaggcacaactgaaagctgttgatcagcaagccacatctggccctgtgctcaacaagcttgaaaagaagccaagaggaggacccctcaacaaacataagcaggatctcaggaacaagataaaacatgtgcttttagataatgggtggaaaattgacctaaggcagaggaaaaacaaagattatgaagactcagtctatgtttctcctaccgggactggctattggtcaatcactaaggcttatgcagttttccaagaacagtttcaaaatatgggtcgctcatctaaacttaataatactaaaccaggtgcttcagatgctatatcgaaggatgatctagcattgctaaaaaagaatatagtaaagagaaggactaataaggaaatttgtggtgctgaaaagaaacctggggttagcagaaacagaagctctaaagatatccttgctaatagagattttagaaacaagcatcagaacaaggaggatagggtaaaaattaaagatcggagatgtgggcttcttgtccgtgggagtacccatgatactgaagataacatggatggctatattccatatgaatggaagcgtacattatgttcatggatgatagatctgggggttatttctgaagacatgcatgtcaaatacatgaacagcaatagaaccagggaaatgttggcaggtaaaattaccagggagggtattttctgtgggtgctgttccaagattctcacaatagcgaagtttgaacttcatgctggttcaaaagagaagaagccctatgcaaacatctttctggaaggtggtaaggtatctttgttgcaatgcttacttgatgcatgggagaagcacacacaaagtgaaaataagggattttacaagatagataaaggcgacgatgaacatgatgatacttgtgctatttgtggggatggtggcgatttggtgtgctgtgatcactgtgcttccacttttcatttggactgtttgggaattaagcttccctctggcgattggtattgtcgcagctgtttatgtaggttctgtggttttccccaagaaaagccatcatcttctcctgagttattactttcttgtttgcaatgttcaaggaaatatcaccaaacttgttcatctggaaccgggacagactctggttgtaccatgcctggtacctctattgattgcttttgcagtccaggatgtagaaagatttataaacgattaaacaagcttcttgggataaagaatcatatggaggctggattttcatggagtctggttcactgttttgctaatgatcaggccatgcccaataaaaataaagaaaagttggcacagtgcaactccaagacagcccttgctttcacagttctggatgagtgctttcagccacacattgacgatagaagtggaattaatatgattcacaatgttgcatataattgtggttctgatttcagtcgtttagacttcagtggtttctatgcatttatcctggaacggggtgatgaagtaatagctgcagcatctgtaaggattcatggaactgatttagcagaaatgccattcataggcacaagaggcatgtataggcaccaagggatgtgtcgtcgactactgaatggaattgaatcggccctcggttccctcagtgttcagaaactagtagtatctgctgtgactgaaatggagaatacttggacaactggttttggttttaagcctgttgcaccttccaagaaacaaagaatgaagtcgttaaatctcttgattatgaatgggaccggtctactagagaagaggttgctgccaacacaaacagttgatggacagatcactaccaagacagctaatgctgttggatctgataagatggatgctaaaatgcttggtgaagcaagtggatctgtgacacccattcatgtttctagtgaacccgatgcctctgacaatcgtgaaattaatcgccatgagagtcctcatcctttaggaaactctgcaggcttgacattggaccagtctcctgctgcagacgaaaatgaagcgaaaataactacagaaaggacacccccagtatccataggtgatgctaagacagtcaaggtgcatacacttcctggagctacttgtggagttaacttgcagtgcatggttgaagcagagaacattcaacaagagaaatacaaagaaaccaatgggagattgattgctgaaaatactatttcagagcagaagtgtgaagatagatctaattccagtcgttcaaattcatgtgctactccggtgactgtggatcaatgttctcatttatctaatgagattgggaaaggtgacaactgtttatctagtgaagtttctgttggagctgctcccataacaggcaaaactgaatctagtttgacatctgttcattgcgctaaccaagaggatgagaaagcttacgcagcccctgtggacactaaaatacctttagtcattatggatgaaaagcctgataagcatgagtttaaaactatggttgtagggtgtagtcaaggctcaatggaacctaaaagtttggaaaatagaactagtattgtaaatggaacctcaatggacgcctatagagataaaatacctaatgaagatcacagtgcttctgcagttgacactggagtatctgtgaagctatatgctcagcaaatggagacgattgaggaaaaaactggctcagttttaccagattcggaacactcttctagttgcaaagatgtgttggtgaccttgactgagtcaaagccacttaaaaatgacattcttgaaatggatgatgcagttattaaggtaggaatgactggtcagagtttcaatgaagcaggaataacagctcctgcgctcaacatttcagatcctgttggtgaaaatgtggttaagcctactcaaacttgtggggagggtcaacttcgtggagaggatgtcatatacagtaataacgtcatggaagatgacctaacttctagagcatgctgatgtatgatcattgtattttctgctagaaaaggaactattttagtggacatcaagaatagctggtagtgggcactcattggtataaaggagagatcgttgggctggcgactggcatggatggatttttactgtgtgcgaggcacttctgggagcgcggggaccgtccgcgggaaggcatgacacagttggctcttaagctttcctgacttttggttcttctacattgaggctgttgaccatggagcctttttttagtagtagaagtaagcaaattgaaccatggaagttctatacgacccacaatccgggtcaacattttgttgtagatatacatgtctggtagttttctgttgtcctcctggtcgacccgaactccttattaagagctggtacttggtacccatggtatgcatgtgaaattctgttccttgtacagagagtagaaaagaaaatgaaagccgtgccagcggttataagccgtcgcttgtttatccgtg

SEQ ID NO: 19081 - DNA, 720 bp, Zea Mays
cccgccgccgccgccgcggcgcgcccccgccctcgccggggataccggatctgccgtcgagccgccggggcaccacggccgatgcgaccagcacagcaccgctgccagaatcgccgacgaatcggctgacgcggtaaactagtctcccgcccggctgccagccgatgggcacctgcgggctcgccgcggtcgtcgcgctactcctcgcctcggctctactccctggccccgattccgcttcagccagaagccttctggaaggcgagaaccccagctccggcgaggacgctcctgcaccagccgtttctggccagtcttcagccgcggggcagcagactgagaacaagcggcatcaggaatcactgccgccggtgacgtcaccaccgccgccgccgcccacgcaggagactaattcgcagaaggcagccagtcctcccccaggacccaatgtcgggacggggcaggaggacacagggagtcaagggaggagggaggagactgacaaactgaaggaggccatggagaagtgtgacgcctcgcataagtgttcctctggaaacgaattttctgcttgccttcaggttcctgataatgctttagttgggccatacattattgtccacaatgaaggccaacatgatatggacattgatgtcaaagaaccatcatcaaatacaaacaatgataaaaagcctctacatcttgtcaaaggtgcctttg

SEQ ID NO: 19082 - DNA, 1902 bp, Zea Mays
ggaaaaaattgctgcgtgcgccccgccgcctacacacgcctagcccgctccccaagaaagagcccccgcacacaggctgggaggggagcgaaagcgaaacgtattaaactcgcgtacatcatcaaccgcatgcgctgatgcgcactgccactgccccggagaaattcaaatcccaagccccacaagcaaattaccccagcatcaaatcagcggccggccggccggcagctctcggtcgatccactgcggtttccagtcccgaataatcccaattcccaatcgattcgaagcttccttccttcgaggagagggggaggtggaaggcgcgggggaagctctgcttagggttcggaggtggccggcgccgccgcggggcggggacggcagggggatggatccggagcagacgttcctgcgggtgcacgcgcgcttatcggggacgctttcccagctgctcacgccgcggatccgcctcgtcctcgagtacctctacctcgccggcgccgtcgcgctcttctgcctgctcgtcgtcatgcacacgaacttcgtgcagcagcctggttgctcaagtgaattttctggaattgaatttggagaagcacaacttgtccaaatcaagattatcagtgggggattatggtccagcagaggtgcttcttacatcatggatctccagaacctgggacgttcagctgagaaaattttagaggttaatggtgataagttcaacattttggcatctaaattttggtcaacctgggttggccctggagctaggaggagcttaccagatttgaaggcagccggagagggttctgtacaccaccctttatctgctaaggagtcatttaaagcagcagtgacatttttgttcagaaaatggtaccttcgtgctgtttcattctggaagaacataaagcaactttcagaaaataccctccagttaatggtcagatcaaattggaacgatttcctacatattattaaggatcttcaactaccaagcatggatcatcttatttcgacaatagtgcaatggtttgagaggagaagtaaagcatttgagcctacttatttatatggcgtggaaaagggttatttcttgctttctgaaggtgctaaaactcgtcatggtgtccgaacaatcaatatcacaatttctgctcgaaatccttgctttggaaacaggtggcagcaacttttgataaacagcattgttggatatgatactatacttacaaacagcttggtgaattctcctggtcatggctatttatacaactttcagacgaaggagctctatgatcttagttatgggcatgaaccaccagaaggtcctacaagatttggagattactttgtgacaaaatgtggtgtccttctaatgtcactctttgtctttttcacaaccaccatgtctgtttcatttactttgagagaaacacaatcccgcatgcttagattcacagtgcagcttcaacaccatgcacgccaccacctgccaacctttcagttgatattcgtgcatgtcatcgaatcattggtttttgtgccgattatgattgggattctcttttttctatttgagttctatgatgatcaattgcttgcgtttcttgttttgactcttgtatggttatgcgagctattcacgatgatcagtgtgcggacatccatatcgatgcagttctttccacgcttcttcttgctgtattttttggttttccatatctacttcttctcatatacctatggcttctcatatctggctttctctgctacggcagcattcatgcagcacctgattttatatttttggaaccgttttgaggttgtagaacgccaagtacctggcaagtctaccagccgcactggatgaagaacctggcaaaccaaaattca

SEQ ID NO: 19083 - DNA, 915 bp, Zea Mays
cagtagagttcattaaagaagagaatctacatacaagacacatactcaagcgaaaagaaaaatattggagtctaagagggagcttttactgaaagaaatgtctagggcgaattcgttggaggttgcagttctgaaggataggctggttaaattggagtcagaaaaagctcgtccatatggtactcttcaagcgatccaggaggtttaccatgagtctggtgtaagaggattttggaaagggcttattccaacattaatcatggtatgtaatccatcgattcagttcatgatctatgaaacattggcaaagcgtctgcagtcaaagcgttctggaaagcagctaccaaaaaggcacctcacagctatggaggtttttttattgggtgcattggcaaaacttggagctactgtagtcacctatccattgctagtcgtgaagtcaaggttgcaggcaaaacaagaaattggcagcaatgtgatgtccagatacacgggtacaatagatgcgataataaagatggttcgctacgaaggactacacgggttttacaaaggaatgggcacaaaaattgtacaaagtgtctttgctgcctcggttctctttatggttaaagaggaattggtcaagttagcagtgcttttagttgcgagtagtaggactatgcttattactacatccaagaaacaataggtggtggtgtatttgggagaaaagctcatttttttgcctcaacttgtaatgtatagggtcccattatacatatcctgttcaagatcaatatgaaattctttactggttactagagaaaaccttaaagcctctcaaaagccataccttccccttattaatgaaggataaaatcatctaaaagatattacatgttttgggtttaactgatatacaaaattaagggt

SEQ ID NO: 19084 - DNA, 740 bp, Zea Mays
cgcgcggccatgcatggcggcggtcctgcgtacgtgtatggatgatgatcgcgcccgtcatctggaagacgaggcaggtgggatcggcggcggagacgtgagcagtttttccgctgattctgagtttctgacagccggaatctatatatacatacaaacacaagagcaaatcaaagggacgggaaacgggaagaggtggtgcgtgctaactcctatgcatcgcattcctggatgttcattggtcaatgatgatgctgcactgctgcagctcgggtagtttttgctaagctggaggtgcagcagacaagacaacaagaaagaggaggcaactaaggagtagtactatactgatgccactagtccatcgtggagctcggttcaggaagctcatcgatctcgttgtacttgtaccgaactatctcaaaaaacatagtgcctgtttgtctggattgctgctcggccacaagcacagctgtctggcccggggcaccatccaaacaatcccatatagagcgtgtttggacgcagtcatgcgcttgggttttgcttttgcctgtctgtgcccggcagattcatgggcctgtaagcaaacacgtcccaattatctgaactcggaattatttacgcctcggcaagattcatcaactcaatttttttgtgaacaatcttattgtgttactaggtgaatgcccgtgcgttgctacggagtaaacatattatgataagatatattgaaattc

SEQ ID NO: 19085 - DNA, 2386 bp, Zea Mays
gaaatatcagctgttgataagttgagatatcttcattgccttttggtttatgttcttccagtactgaagggaatttattctgaccaatgctttgaaataggtgttgaaacaagatcttctgacagatgtcctcagagcaaagataacttctgatgagcagatgtgctgtgacttttgcaaagtgccagtgtttgattatcaccgatactgcccaagatgttcatatgatttatgccttgattgctgtcatgacatacgtcattctcgggccaatgttgcacgaggagaatatactgaaggttatgttgaagataaaggtagagattcttttaatagaagagcaaggttggaaccatctgctgagagtgtcaatgacaagtcattatcttggccaatagatataaataatattgacattaaatctttattccctacatggagagtcaacaatgatggcagcatcacttgtggacctcacgaggctggtggttgtggctcctcaaagttggtattaaggcggatattcaaaataaattggattgctaaacttgtaaaaagttctgaagaaatggtcaatggttgcaaagtacatgatttggaggatggatgcttgtcttgcagtgatggcagaagatcggagtttactggtcagcaaaacctcggtctctcaaaatgctcaaacagtgatgagattggtaggaattgtttgtactcacctgtattggaggacttaaaatatgaaggcatcattcattttcgtaagcattggaaaaacgcggagcctattattatcagggaagcatttgagccttctctatcatcaagctgggatcccttgagtatttggagaggtatccaggagatcatggatgaagaaatggatgaagatgtcatagtcaaggctgtggactgctcgaaccaatcagaggtagatatcgagctcaaacagtttatcaaaggctactcagatggcagcaaaggaggagatggcccacttgttgatgctgaaattgaaagagtggccccgacccaatggggtctcctaaaccttgctgccaagttacccccagatgccttacaacctgaattagggatgaaactgctaattgcacatggaagtcaccgagaacttggtaaaggtgattcaatgacaaatctaatgattaacatgagcgatgtggttcacatgttaatgcatgcaactgaagtgcattaccaatgtcccaagagggtaagggtacagtctgatgtatctgaaatgattgctaatggaactagtgtccatgtaaatgctcatactcctgttcaaaatttgaatctggatattgaagagcaatcacacaaacactcgaaatcacacatcgaggagccaaacactaataattcagaaggatccctggctggtgctgtctgggatgtattccgcaggcaggatcttccaaagcttaatgaatatctagctgctcatcgggaagaatgtgcagctagatgtcaagcagtgtcttctgttaagtatcctatttatgatcaaactgtgtaccttaacgattatcataagaagatgttgaaggatcaatatggaattgaacccttcacattccaccaacatattggtgaggctgttttcattccagctgggtgtcctttccaattgaaaaacctccagtccacggttcaattggctctcaattttttgtcacctgagagtttgccagagtcagtccggctgtcccaagagatccgttgcctgccaaatggccatcttgcaaaactgaagatgcttgaggtaaaaaagatctccttatacgcagcaagttctgctgttagagaaattcagagaataacccttgatcccaagttcaatcttgatcctagttttgaggatcaaaatttgactagggcggtttcagagaacttggcaagagtaaacaaacggaaggtatcttgcagttgagattgtgggggcctggtgaaattatgacatgccattcagaggattgaagtagatatagtgcttgtacatgtattatattgtgtcatatgaaaggaacacattctaattcttattgggttacacattgactttacctgtatattgtgggttaggaagagtaacagttaagcttctgaggaacaagataaaaaggcgctggaaagctcatgtagaattgttagcacaataatctctgttggtagcatctgaagaataattaattagaccgaaattgttacattgtgaacacagggttcaagatttaaatactatattttcaccacggttttgcatttgtgtcaacctgcacgtagtaacgtctaaattactatagtgtttcaaaccaagtgccttttttatatatagcatgatttatctagaaaaatcaaaata

SEQ ID NO: 19086 - DNA, 1992 bp, Zea Mays
ttaggtgccaaggatcgtttcttctgtggatgtttaggctgctgagtgaaaatgggagtggcaggtcacaacgatccattgttaggtgaaacgacatgtgggtctttgctgcagcaacttcagctgatatgggatgaggttggcgaaagtgatgaagatcgtgacaagatgttacttcagctagagcaagagtgcttagatgtttataggagaaaggttgatcaggcttctagctccaggtcatgtctcctccaacagctttccaactccaaatcggaactgactagactcctttctgcattaggagagtcatctatttctggtgctcctgacaagacatctggtacaatcaaggagcaactagcagctatatcaccatctttagagacactccgcaggaaaaaagagagtagggtgaaagagtttgctcatgtacaacttcagattcagatacttcgtgatgaaattgctggggatctacatattggtgaacagttggaaacaccccatgttaatgcggatgatctttcagtgaggagattaaatgaatatctttctgaactacaagccctgcaaaaggaaaagagtactaggctctcaaggattcttgaatccgtgagttcagtgcacgatctctgttctgtacttggcatggattttgtgggcactgttactaaagttcatccaagtcttgatgactctgttggtgtccaatccaagagcattagtggcgaaacaatatccaagctgtctaaaatggtgattgtacttgaagaagaaaaatcgaagaggtttgcaaagcaaccttttcgtcacgtaacatgcataatgtcctcaacattggatgatgtgatagttccaggagctctggctcttgatgtaattcagcaggcggaactcgaagttgaaaggcttgatcagctaaaagctagtaggatgaaggatattgcattcaagaaacagactgaacttgaagatatatatgcccgggctcatgttgcagtagattctagtgctgcaagagataggataatgtctattattgagtccagtagtttcgagccttcagaactactggctgatatggagaaccagatacttaaagcaaatgaggagtccttaagcagaaaggacatattggagagggttgataggtggatgtcagcatgtgaagaagaaagctggcttgaagactacagccgggacgataacaggtacagtgcaactcggggtgcacatctgaatctgaagcgtgcagaaaaggcccgtgttttggtcaataaaattccggctattgttgacacactgcttgcaaagacccgggcatgggaacaagagcatggcgtggccttcacctacgacggcgtccctcttcttgcgatgctggacgaatacaaaatcctgaggcaggagaaggaagacgagaagcgacgaatgagggaccagaaaaagatgaacgaacagctagccgccgaacaggagaagctgttcgggtcaaaaccgagccccgcgcggccgcagtcgtcctcgaggaaggtggctggcgcacggaccaacggcggtggcacgccagctcgcaggctgtcggccctccagagcggcggcaggaccgctagccgggatgggaggagggatgcgagcaggcccgtggcccccgtgaactacgtcgccatcgccaaggaggacgtggcctcgcaggcgtccagcaaccacactgggccgtccaccccctgaccggccgtgccagcagtaactgaactgttgtggcggtgcttagatatatatataccagtgcagtgcagtagtcagagctgattgtagatcggataatggaaaaaaacaaacgaagctggatatggtatcacacattatcagttgtcactggttgttcgtctggtcgtcctatctagcgaactcgtcctcgtgtagccgtgacaatttgctcgtcgctgagttggagacagggaatgtcaagttagagctagtttaata

SEQ ID NO: 19087 - DNA, 1041 bp, Zea Mays
ttacattaatgtgatctgcaataagttagaagtatttgggcaggaatgcacacagtccgttactttgatggcaaaacatatgaatgggtcggactgagccgccaacgaagcatcatgggtaaggtgaaaagatcgctgagccagttcacccctgctcaatgggacaaggatcagtggcatcctttcatggggccactgcggttcatccaagttctgttcctctgtgttgtcttcatgaccgtggagcttaacacattcttccttaagttttgcctgtggatccctccaaggaatcccttagtcgtgtacagattgatcctctggtggctgattgccatcccaaccatccgcgagtacaactcctacttacaagacagcaaaccggcgaagaaggttggagccttctgttggctctctctggctatatgcatagtggagctgcttatctgcatgaagtttgggcatgggctatttcatgacccaatgcctacctggctgatcatcttttggagcttggttgggattgcacttgtggttttcttgctttcatggtcatggaggagtcacagaagattcaggagaaaacggctgtgatagatttcaataactcaccttagattctttcaattcgcttcttttcttttccctttctctttctttttcatttttatatacgatatggtatgatatgatatgtgatgtaacctacgttttagaggagccccatttttctgctgctcctggcaggggactcggtttgtcaggataggtcattgttgtcaacatgagattgatgaataatcaaggtagctgcagcatcagcaccaagtgtaattaaacagtaaagcaagatcactgtgcgtgaattgggcttaccaaacttcttctgggccagtaatgcacagttgtgtaataccacctatcgctatcttggatggtgcatcatttattcagtttgtctcaccggtccagtcgaaggtctatgacatttttctcgaacatgtaaaatatttatgcatcattgtaattgaggtagaagat

SEQ ID NO: 19088 - DNA, 1012 bp, Zea Mays
ccgtgaccccgtctctagctattacgatccggcagctttcattcgttccaagaaatggcacccggacaaatgctcgtcctccagcagcgtgaagcacatggaggaagccaaggagaagttccaagagatccagggcgcctattccgtactctccgacgccaataaacggctcctctacgatgtgggagtatatgacgatgaggacgacgaggaaagcatgcaggggatgggggacttcatcggtgagatggcccagatgatgagccaggcgcagccgacgaggactgccaaggcccatcagtttcaggggccagccaaaagtagaacatgctcgacctcaccttcatcatcaccgtcccctcctcctaccacagcaaaggatgcagaggtgccatcatgtaatggcttcaataagcggggttcatcagctctggactcagggaagcctccaaagcctgttgaaggtggtgcaggtcagaaccaggctggattctgttttggggtgagcgacacgaaggaaacgccgaagctgccaggtcagaacgccagccggaggaggaacggccggaaacagaagctgtcatccaagcacgatgtttcatctgaagatgaaacggcggccggttcgtagcacaccagcagtttgacccattggcttcggtgatatatcattcgttggcccttggctgtgcctaggggccctagtagctagcagcagcagcagggacggcacatcatgccagctgctgtgatctgaagaggcgtttagctcatcatatgcctcaccttaggcctgtgggggattttccattcaaactcgtcgatgatactacatctttctttctccatctgtgtcgtttgtgttgtaagacagtgacttctgaagtctgatcgtctcggttctttttattaacatctgatatacgttactgcctgtctatagtagttaaagattgtcagcgtatctcaaaagacttaatacctttcgaaggagaagatatgcatcgttggg

SEQ ID NO: 19089 - DNA, 865 bp, Zea Mays
atggttgtattaatcttcttgcagcaatgggaaacgaaaaagcaaatagccattgggaagcagagctgcctcctaaatatgatagggttgggatagagaatttcatccgtgcaaaatatgaggacaagagatgggtaccaaggaatggaacattgcgactttcctccggtgttcgagatgagaagagccaagagtctccagctagtgctaattggagtggacatcatagatcttcatttgagcaaaaccatgcttcaccagctcttccgagcaaagttgcacctgtagcttcaaggataccctctcagagaaagagccagagtcatctccaaacgacgataatgcctgggatggcttccagtctgcacaaccagtacctagctccgaggaaaaagattctgccaaaccagcagaaagcaagacccagtctacatctggaatagaagacttatttaaagattcgccagctgtgtcgttatcctcagctccagttgtttcccaagaaaatgcaaagaatgatatcatgagtttgtttgagaagtccgatatggcatcaccatttgctgtccaacagcagcagctggcgtttatgtctcagcagcaagctcttctaatggctgctcttaaagctggaaattcaccacaaatagttccagggaatgccaatcaactaaacactaacgtttctaatccccctcttggaaccttgcctttccaaaactggacaaatcttggctatcaaaatcctgggttgactctagcagcagcacagaatggtgccacaatgaggagcatttcagtttcctgagcactcgatgcctaattatgacagtggaaaggctgctaacagtatgatcaaacagag

SEQ ID NO: 19090 - DNA, 2774 bp, Zea Mays
ttggacatacatctctaataaacgttgtaatggagttgcgcaaactctgttgccatggattcatgattgatgaacctgatcttgaacctgccaatccagaagaaggtttaaggaggcttctagattcatcaggtaagatgcagctgctggacaagatgatggtgaaactgaaagagcagggtcatagagttctaatttattcacagttccagcacatgttggacttgctggaggactatttaagttacaggaaatggacttatgaacgcatcgatggcaagataagtggcgctgataggcagatacggatagatcgcttcaacgctaagaattcaactaggttttgctttcttctttctactagagctggtggtctgggaataaacttggcaactgcagatactgtaatcatctatgacagtgattggaacccacatgcggatttgcaagctatggcaagagctcatcgcttaggacagactagtaaggtgatgatatacaggcttgttagccgaggtacaattgaggagcgaatgatgcagcttacaaaaaagaagattttattggagcacttagttgttggtcgactcaccaaagctaataatgtcaatcaggaggagttggatgatattatacgctatggatcaaaggagctttttgaagacgagaatgatgaatctcgccaaattcattatgacgaagctgcaattgagaggttgttagaccgtgatcaagttgacggtgatgaatctgtggaagatgaagaagaagatggattcttaaaaggattcaaggttgcaaactttgaatatatcgatgaggcaaaggctcaggcagaaaaagaggaggcacggagaaaggctgcagctgaggctgaaaattctgaaagaaactactgggatgaactattgaaggatagatatgatgtacagaaagttgaagaacatactgctatgggaaaagggaaaagaagccgcaaacagatggctgccgctgatgaagatgacattcatgatttaagttccgaagatgaggattactcattggaggatgacatttcagataatgacacaagtttgcaaggaaatatttctgggaagaggggccaatattctaagagaaaatcacgtaatgttgattctattccattgatggagggcgaaggacgtaccttgagagttcttggattcaaccatgctcaacgagcaatgttcctacagacactcaatagattcggttttcagaattatgactggaaagagtatcttcctcgtcttaaaggaaaaagtgtcgaggaaatccagagatatgctgaacttgtcatggcacatcttgttgaagaaattaatgattctgactatttttcagatggcgttccaaaggaaatgatgcgtgttgatgatgtactagtcaggatagcaaacatatcccttattgaggagaagatggctgccacaggaccaggaaaaattacaaacatttttcctaattacttgctctatgagttccaaggcttatctggtggaagaatatggaaagcggagcatgatctactgttactgagaggcatactgaagcatggatatgcaaggtggcagtatatatcagatgacagagagaatgggctttttgaggctgcacgacgagagcttcatctcccttcggttaatgaaataattggtgctcagttgaacgaggcaaatgggaatttggaaggtgcacaggaaggccaagcgaacacaacaagcatgtcgcattacaaggagatccagagaaagatagttgagttcttgagaaagagatatcatcttatggagagagccttgaatatggaatatgctgtgataaagaaaaaaattcctgttcctgatgatattactgaacaaggtgttccagcaggacatgctccttttattccagatatcagtgaactgttgcgggaattgcccaatcttgagccaatttctaccaatgaattggtttctgagggcacagctggtcagttacaagttccccatctctacaataagatgtgtggagtgcttgaagagagtggtgcttatgcgctcagttccttctttggagacaagtccgcatcttctagtttggccaatagccttcgacagtttgaaactgtgtgcgagaatgtcgtcgaggccttgcgaccacaccaaaatggtactggcagtgccatcaaagaggaattggtagatgcagccaccaaagcagcagcagcagcagctcctcaacaagattcaggccatgatgcaccgcatgggcagtcttcgacagccaaggcggacatggaaatcgatggttgatttgtaggttccagagtggtaagaaagggaatccccctctaatcattatgtatactgtggtcagaatgtgcgctatatattgtaacatcaaagaaagcacctccaggcctgagggtgttactgctaatgcgtttggtttacttgttgtccttgtaatatgcatacacatttagaactcatgcagccattttgtgtgctcgaaccggtggatcgctgccctgttgtcttgtactgtgtttagggcctgtttggatacgaatggttaattataagacggggctaaagataagtacggataagtacggattagctatagttggctagcttgttggttaacaattagctaaactttggctagctagatggtaaacaattagttaaaagtttagcaaaagaattagttcacctattaactcagtttgttgcctcctttttattatgccaactaatttg

SEQ ID NO: 19091 - DNA, 126 bp, Zea Mays
gcccgcgggcgagatggcgtcggacgcggtggcgagactgttcggcatgcgcgggaggctgtggcttccctgggccatgcagaccaccggcgcggcactgtgcgtgttggtcggcaggatgggcgc

SEQ ID NO: 19092 - DNA, 3244 bp, Zea Mays
ttctattacaacaccgatgagaacccttgttctacctcccaaagtcgggttcccacccagcgtgcccgccgccgaccgcctgcacaagcctgcggcgagatccggcgtcgccggcgagcttcagcaccggcacgtgctccggaaggaaatagcttccggtgacgtacgctaccctctccgcggcgtcccggggagcggggacggggagcgctttttgctgtcacccgcacacgagcgacgagctccaccacctgcccagggttagttgtgtatggaacaatgacgaacatggcaccacggcagggacccgtcactcagtgctgttgattctggaacatcgcctcgctaccacccatggcaggtagcactgtgttccctgtgctgcgctcctccgagtacttcacaagtccgtcaattgatgagctggtagagagggaggtggctgatcctggctactgcagcagggttccaaacttcatcatagggagggctggatatgggcaggttaggttcttgggcaacaccgatgtgaggggcattgacctgaatgaaattgtcaggtttgaaaaacactatgtggtggtttatgaggatgagacttgtaagccacctgtagggcatggtcttaacaaagcagcagaagtatccttgctgctgaatccgaaggatcatccggagcccagtatccttgttgaagtgctaaggtgtcgtgcaagaaagcaaggttctaggtttctttcattcaatccagtgaatggaagatggaaatttgaggttgatcattttagtagatttgggcttgtggatgaggacgaagaggatgctgtgatggacgaggcagctgttcggcagccaattactgaagtaagagaaagagatccaccttcaaatagttatgagattgagctctcacattcattgcctgctcatctcgggcttgaccctgcaaaggtgcaagaaatgaggatggtgatgttttccaatgaggaagaagatgaatacatggaggatgggttcccttctgacaagaggtaccttagcagagaaaggatgaatgtggattcacctacctcaagcagtaaaggttcgaggttaaggtctctctctcccttgcacatgtcttctcagaaggctggcaggagatctggtatgcctgttcggaaagaacgtcaggcacttttggaatacaatttgaattcttcagagcttggttcatcgaatcagggtattcttatgtctgggcaaaacagaggatttccagtgagtatgaccaaggtggaaggctttaagctgccgcctgagcaagaaactcctgttgctggaaacacgtatactgtctgtgtagtggatgctgctttattcatgggtagatcatttcgtgttggttggggaccaaatggtttacttgtacattcaggtagtctggtcaatagtcctggaactggcctatcttctgttattcacatagagaaagttgcaagtgacaaagttgtgcgtgatgataaggataagattaaggatgacctaacagaactatgtttttctgctccaatggacctccataagagtcttgatcatgactttctagagactgagtctgactcgttcagattgaagcttcaaaaagtcatgacaaatcgtttggttttgcctgacatctgcaggtcatatattgatatcatcgaaaggcagcttgaagtcaatgatttatccatgtcttcacgtgtgctgttgatgcatcaagttacagtctgggagttaattagggtcttgttctcagagagagcaactggtagccagttggactctgttggtgatgatgatcaggaaggcatggttttagacaaaaaagaaggctctgtcgacatagaccctgaagcactccctttgtttaggagagcagattttagcaattggttacaggacagtgtttgccatcgggtccaaggagaggtgggttccttaaatgatgccaggtacttggaaaatatcctcgtccttttgactggtcgacaattggacacggccactgaaattgctgcctcaaggggtgatgttcggttggcaatcttgctaagtcaggcaggtgggtcaatgtcaaatcgatctgaccttgcgcaaacactggatcagtggaaaatgaatggtctagattttgattatattgaggaagactggttaaagtattgtgagtcatggagtagagatgatgctcaaaggcaatacattgtagaacttggtataccagaagaatggatgcatgaagctctgtgcatgaaaattattacacatgaagcatgtgtagctaatgagctctatatacaggctctttatcacgaatactatggagataaacagggtgcactggagaatttgattcagtgtggcaactggaagaaagctcacactattttcgtgacttctgttgctcattctatgtttctgtcatctaaccatcaggaggtctggaggatcacaagtgccttggagaaccacaagtatgaaattgctgactgggaccttggtgccggaatatacatagacttctacgttctgaagaactcaatgcaagaaagaaatgccatggatgattcggattcactcgaggagatgagtgaatcatgcagaagtttctttggtcgattaaacgaatcgttgttagtctggggaagcaaattacctgttgagtcaagggcatgctactcgaagatggcagaggagctatgcgcgcttctggtggacaccccaagcgagacgctgaacctacccatggggtgtcttctgacgatgctcaacgctccagttccagacgagagcaggtcgtcgtacctgcaggatgcactctccgtcttcaccgaaatcctttgcagcgatccgtaggtgaaggggagtgaagcctacaggcaacacgccgaagagtttgtacgtctcatgtttgatacttgtagaaaattaggaatgtataactatgacctgatgttgctccggtgaatttgtaacgccatctgaagacatgtgtcgggatcttcgttgtatgtgagtaccaggtcttatgaaacgttgacttgcgagctgtaccaatggggagtgatttcctgggcttcattttctctgtgtgtgtgtgtgtgtttattacagggaagggcagcgtcacggcgacccgtgcttcggtgtacattggagattactgaggccttcgtttcagccgtaaatcacatggatcgaagagtactttaacttggaa

SEQ ID NO: 19093 - DNA, 861 bp, Zea Mays
cattcgatctggttctggagctcacttcatggatctggatctagttagacccaacaaagagaagtaactctccaagaagaaaatgcagcctatgagaaagctatatcagagtgtaaacagaaaattcaggaaaagcagatggaggccactcagcttctgagtaatctggaggaaatggaagtaacagagcataatttaaagacacagcttgaaaatgctctgaaggagctagaggctgctcaacataaagcatcaacagcaacctctggaacagctgaaaatgctctactggaagctaagtcagtgactgaccttaaatctaaagatttggaggagaagaaaagggagcttgaactattggataacaaggtgcaaacattagagaaagagtggtctgtggttgaagaagaatctttaaagaaacccactcctgcacaaagggagaaggtcctggagaggcaactgcatagcctcatcgagcagttgacagctaagcaagctcaagctgaaattctggccactgatgtgcattccaaagaaaaggagctggaacggctgaaccatctgcatagaaacctctacggcggtgccaacgaaactggcgcaccccggagccgcctcagcagaggcctcttgagcggccctgaagattactattacgaccctaaagcgggccggaaaccgtaccaggctggcgctagaacagaaggccagaaccggctgatgatccttaggtccgcaattgtactgtatgttctgctgctccatgtcatcgttttcataaagatatcagtctgaaagcagttgagctagcgcttcataagttcatatagggaaacagatacttgcttttggtccaaa

SEQ ID NO: 19094 - DNA, 1415 bp, Zea Mays
caccctctggcttgccgttaatttctttcccgtttcactcctcgcgtttttacacttggcccccaatccaatccccgccaggccgccatgccgacgccggtgcccgccgcgcgccagtgcctctccccgcccgccgtcacggccctcgacgccgccgtcgcctccgcgcgccgacgggcccacgcgcagaccacctcccttcacctcatcgcctcgctcctcgcccccaccgccgcgccgctgctccgcgacgcgctcgcccgcgcccgcagcgccgcctactccccgcgcctccagctcaaggcgctcgacctctgcttcgccgtctccctcgaccgcctcccgtccacccccacctccgcctccacccccacctcacacgagccccccgtcgccaactccctcatggccgccatcaagcgctcgcaggccaaccagcgccggaacccggacacgttccacttctatcaccatcaggcggcgcccacctcccccaacgccatcaagtaagcggaagctccacatctctgatgggcaagaaaagacagaagaatcggcaagcacttcaaagcgactgcatagaacatcaagcatcccattcgacttgaacctcccaggcgacgatgaggaagcccatgatgatggtgatgatgacaagagcagtggcagccacgaaaactatctagagggatctgtcggaaacctcttgcgttgggtggatggttcaatcaatttcaagccatttgactttggcaagctttgtgaggacatcctgcaggagttcagcaatactaccagcaaaattctgggcaccagggggtgcaggctggagatcgacgctggggctatggagcaggtagtggcagcggcatgggcatccgattcgcatgagaatgagaagaggcctgtgcggacgtgggtggagcaggtgtttggcaggagccttgagcaggtcaagatgaggtgtgagaatctgagcagctgtaccctgagactggtttcctgtgaggtgaaagaagatggttttggagctttgcttccctcgagaataattctggattggtgatggtgatatgtgtcgtttgcattattgctgctagctatctagctgtaagtattggttagttagctgacaccacccaccgtactgtagcatatataggttcatatcattatttggtggcttcaaaataatgtaattaagctggagtatgtacgtacggtagtctagcaattaaactactcgttcaagtccatgacctggggatggatggctgtatttattgttgctcctgcgtgtatatatatatttgtaagaccgacgtgatggccttttcatgtggaattccatatactgatgtcatttaactgtctgtgcaagacaattgcataattcacaagtatggaaagcaaaa

SEQ ID NO: 19095 - DNA, 576 bp, Zea Mays
gttttatttgcttctgcttctgcctatatccagtgaataggtgggatattttaacagtgagctcacccaagttcaatgttttgagttgtgtctatgaacttgggtggaggtggttcatgagagccacgtatggtaaccctgttgtgctgacatctttgggattcctcttcatcgagttgtggttaagcttgatggttccctcccccttgctctacatatattcggtggctgcaaactgaattcagtgaagccccctttctacacttaaatctagccaaggttctctacatatgagaggtgttcctggtgtccccaagactacacagcccctcccagtctcaaagtggatctgctctagagttcgagcatcagttcctgtgtctgtggtaacaacagccaccatcctcccacctcaccgtggccaggtaacttcaagggtttcctcggtcgagttgtgcatgttttgtgctctgcataagatagagaagctcatatgatggtgaacagatctccttaagagagttttgttggacgctatataaaaattgcagtaaaagctgtctaaagttggattgt

SEQ ID NO: 19096 - DNA, 2379 bp, Zea Mays
cgccgatcccctcgccgtcgattcatatcacccctttcgattcaagcgacgccgcggccgccggccatcgcatagcttcaatccatcggggggttcctttcagttaataagatcgatttgaaaagcgcacccggcaacctgctccgctcctgcgctgtttaggttccggcctgtgtcaaagcgtgcatctcacgcgaggcgcaccaaggccggagccctggccacctagggtcacctccctgcgatcgggccgcggcgacggggacggccgcgatgggcttcgagcgtgtggagctgcgttgccccagggacctggacccgcgcccgagctggacgctcggcgacgtgctcgccgagctcgacgcgctagacgccacccgccgcgctgcgccgcccacgcccctgaagcagccgccccattgggttaacggcgtcggtacgagggagaaggcatttgtgatgcgggttgatggctacgacgaagacgacttagaagatgaagacgatggtacaagtgctgggaagtcccgggctctcatggctaaaggagcaaggttctcgtgtaacgatctccaatcaagtgattcagaggatgaattagatggccaagttaccccatacaacttaatggagaaaagggacctagcgaagagcattcttcttgagcttgaaagcgagcatcatctaaaagttcaagaagaagttagaagtaagctagctttgttggaggtatgccaccaaaatgaaatccatagaaccatttctgcatttgcccgacttcagaaatatgcagaatcaagaaaagagatcgacagaagacttgatgtacacttccagagaagaatggcagaagtactcgataagcacttatctatggtccaaagggatcatgaacaaaaatcccagattgttgaacgtcgaataagagatgatgcagctcttgaagaagctaaaagaaaagagcaagctgtcaaggaagaaaagttaaggcaggaaagagcccagcaagaagcagaggctaggcagaaggaagctgcaaagttagcagctgaagcgcgaaaaacagcatttgaggctgctaaaaaggaagcggcagaaaagcaggctgctaaattgagagatgcagcagcaacttcccaatctagtccagatttgcagaataatattgcagacatcaaagtttttggcgttaaatatgcattagaagcagagtcacggaggtatgcattagtacagaatcaagtgccagaaaacattcatcacaacaaggaattcagcaaatatgaccgacaaattgccaaatccataagtaaacttatgccaactactgatagtgtcagagcaagggctagtgagcttattaaagctttagatggacaggattgtccccgtccaatctcttgttgtctatttgcaaacaagattatttctattgtcaagagtagaaatacaaaggacagaaccttcggaaatttggcctttgcgtgtggatatgtcatgctattagtcacaaatcaggtaccagatgcaatggactatcttttagctgagttcaacagagtttgcatatacacggttccaaagcatttgcatgctttaaatgcagaagcacgaaatagagattattacagactgataggttaccaggaagaaaatggacaattcgagagcactgaaagttatctaacatatgtcgttgcatatgtcaaattgtacgcggcaatgattcaaacagaaatcaagggtgtacgccatcctcatggcttagctgagggatggaaatggctcgccatgttcctcaattctcttccagctactacagccactgcttgtgcccttcacgccttcctcaagatggctggttttgcacttcacaagaaatatggatcgcagttcatgaaaatcctatatgtgatttcacggtactttttaccggctttgaaggaacaaggcaacaagatgcaggctgaggctgtcaacaatctacagaattatctgaacgacaagatctacctggaggaaccagaagggcagtacctcgtccagcaattactatcgaaagagttgttcatgtaaagttcaaaacaccagatcgtgtgattgactctgaagggcgcacctcgtataagctactactatcgaaagagctgttcgtgtttcagaaacgcaagcgagccttgtagagatgacctgcaaggaaatcagtaccaaatctccccaacatttgtagtcttaaccgtagaggagatgaccctgcatgaaatatattgaatattatttgtacgtgctattaccttagtgtttgaaattattgattatttatttttaactcttcatttatcaaattggcataatttaattcacatgtatatttacgat

SEQ ID NO: 19097 - DNA, 3074 bp, Zea Mays
cagcaaaaatcgtctgaactctggagccttccagcgagaatcgtaaagcggcaaaacaatgttgcttctcgcctgctagtcgccctattctactccactctgttttctggaggctgctaaactaaacccttcttctccccactccgccctcggacccgccgccgccgccgcttgccgggtctatagccatgtcaccagcggttgcctctgcctcatctggcgaccgcatacgaacctacgaagacttcgtgcgggtacacgcgtacctgctggccgcggcgggcatcccgccgtcgctgcaccggaggctgtaccgcaagctcgcggacgaggtcttcgacggcggggaggtctttgccgtagagccgtgcgaggacgggaggcagcggcgcctcgtgctcaccgccgatcagtctctaggaaaagagtccgatgtcttcctcgtcgaccatgcgtggtccttccgcctccctgatgcgctcaagcagttgagggaagtaccaggattggctgaaaggatggcagcattaatgtgtgtcgatttggaccgcaagattgaagcagatgagcaggatgatgacgagagtgggagcttggagcatgtatcgcaagtagtcgagaaagaaagggctagagttcaggagagaagtgattctacagcttggctggaacttgaagaacttggaattgatgatgacatgctagtagccttggatctatctgcaaattttccgaatctggtagctctgaacctatggggaaacaagctgcgggatccagagaaagttatgcaagaaatcaggaagtgcacaaagctaaaggcactttggttgaacgagaatcctgttcttggcaaaagtattgacaaagctgttttcgatggcctctctggattggaaatatacaattcacattttacaagtaaagccggagagtgggcactaggtttttgcgcagacattgttggagcagataatccctgttcttctgtggaaagcacattgtttgggagcattgggactattgacctttctgatagatgcattcacaagctaccagaggtgttctctcctagtaaattgccatctctgtcaaaattgaacattcgtggtaatcctctggatcaaatttctggcgatgatctcttaaagctatttggtggattcactcagttacaagagttggaggttgacattcctggccctctgggaaacagtgcaatctccattcttgagtctcttcctaatttatctttgctaaatggcgtggattcctcaagcataatagagagtgggaagcatatagttgactctgcacttgaaccacggcttccagaatggtcacctgaagaaccccttgctgaaagagttattggcgcaatgtggttgtatcttatgacataccggcttgctgatgatgaaaagattgacgaaacacctgtttggtatgtcatggacgagttgggctcagccatgcgccacagtgataatgcaaacttcagaatagctccattcttgttcatgccagaagggaaactgcacactgctataagttacacaattctgtggcccactcatgatgttcatactggagaagagtgtacccgggatttcttgtttggtattggtgaggataaacagcgttcagctaggcttacagcttggttccgcacacctgagaactactttattcaggaattcaggaggtaccaggaacagcttcaatcaaatagcatttgttcttcgacaaaaatagaagagacacagacaccctcaacccaaaagtgtacgctctaagggatggtcgcgtccttcgagtatatactgacatacctcatgtagaggagtttttaacacggccagaatttgttctcacgactgatccaaaggaagctgacatcatctgggtaagcatgcaagtagattcagaagtaaagaatgctgtagggctcacagaccaacaatacacaaaccaatttccttttgaagcttgcctggtcatgaagcaccaccttgcggagaccgtccacaaggcttggggctcacctgaatggcttcaacctacatataacctggaaacccatttgtctccactcattggtgattattgtgtgaggaaacgagatggcatggacaatttatggatcatgaagccttggaacatggcgagaacaatcgataccacagttactggtgatttgtctgctatcatcagacttatggagacaggccccaagatatgccaaaaatatattgaacgccctgcacttttccaaggaaggaagtttgatcttcggtacattgttttagtccgtagtatccgccctttggaaatatttctgtctgatgttttctgggttaggttagcaaacaatcagtacactttggagaagactagcttttttgagtacgagacccatttcactgtgatgaattatatcggaaggatgaatcatatgaacacaccagagttcgtcaaggggttcgagaaggagcaccaagttaaatggctggacattcatgaaagcgtacgatctaccatacgccgtatctttgaggcggccgcagctgtccatcctgagatgcagaacccattctccagggccatctacggtgtagatattatgcttgacaacagattcaaaccaaaggtttttagaggtgacatactgtccagactgcgggagggcatgcaagtatgacacgcaagctctggtaggaagccaggataccatcagaggccgtgattttttcaactcggtgtttggctgcctctttcttgacgagcaaacgcatgtattgcccttataggcatccgccccagaggcggctgctgtaacatcaggttttatcataataacgtgacatatgtataaccttcttgtctgttggctgttgcctctttttggccagtggtgcattctcgtcgttgtttgcgcagcgctcccgcagtacctttttaaaaatgccattttttagaacaatccttctacctctccctaaacccttgtgtcttagttgtactttttgcactaattgatttaaggctttgtttggtttggtgttaaatttacc

SEQ ID NO: 19098 - DNA, 230 bp, Zea Mays
ctcacctgcgggcacgtgcggcccggaatctcacgtcggcgcgcgcggaaccgagcctgccacctcctcttccttcctctcttctgttcgcgcgcgttcctctcgatcccctctccctcctcctcctcccgcctccgctccagtctcccggttctatttcctcacaccgctcggcctcgtccctcacgcccgcacttcctacggacccagtcacatgacccggacctgac

SEQ ID NO: 19099 - DNA, 75 bp, Zea Mays
cgggaaacctttgtactagctgttagtatgtactccatacagtatcgtcaccattcttatgtgtgtggctgtgtg

SEQ ID NO: 19100 - DNA, 2573 bp, Zea Mays
aaagattttgtgcaacctctattaggagcactgtacttgatacagcgtgaaactcaagctactttgcttgcggcattattcagagttctcattcttttgatatctgctacaccgtacgctcggatgccaaaggaattgttgccaacagtcattaaagtattgtgcagtagattactgaacaaacactcgaataagactgaacattatgccgtgctggttactgttctaagttgcttggagacagctttttcaaaagtgccacctactttggatgtctttgcggttctcactgaggattgctgtgctggaccatcacatgagcaggaagaatcaaatgttatagcttttcttcttcattgtatagaggaggaaatgcattacagtgttagacatggagccttccaggtgctgagatcagcggttcacaactacccaagctgtgcaaacatgatttgggaaaaacttcgagacaatgttcttaacttgttgcaaatacaaagttttgaagaccaaaagtatgatgctaactttgggcctcctggagctaaagaagaatcatcaatcaagggaagatgtcttgtagctggaataaaggtaatggatgaatgtctgcgtgtttcatctggattcacaggagcagatgacatcaaagaatgcagattactggatattcagcaaatttctgattgtaccataaataaaactattaagtctgcacctcactttgaaatggaagctgctggatcatcacagaattgcactttggacataacacttggaattaaccgttggatcgaggtgatagagactcatctccctcagggattatcccatggttctgctatggtcaggacagcatccctcacatgctttgctggcatgacttctgatgtattcttctccctgcctgaaaataagagagactatgtgacctcttcttctgttcatgcggcgttaaatgatatggttcctagtgtaagatcagctgcatgtcgagctattggcattgttgcatgttttcctcagatattgtcaagctctagcctaccaggcaagttcatagatgccattgagttcaatacacataactcatcaactccagttcgtgtcaccgctgcatgggctttggcaaatctctgttcttgtattcgttttagagcactggaagtgcatacagatccctatgcaggtgtaggtgtattgagcaaatcaagcatatctcttttggttgaagttgctttgcgtctggccaaagatagtgaaaaagtaaaatcaaacgctgttagagctcttggttatctttcaagatttatcagattcaattaccacgccggcacaataaatgacccaagtgattcagttttttatggagatcctgtgtggcttgaaagaatggtgcaggctttgatgtcttgtgtgacaactgggaatgtaaaggtccaatggaatgtttgccatgcccttagcaacttgttcatgaatgataccttgagacttcaagacatgccttgggcatcaagtgtttatagcatacttctacttctaatccgggactcaaacaattataagataaagatgcatgcagctgttgctctatcagtgccagtgtcaaggcttgattacggcagctcgtttccagatgttgttcgaggcctcgtccatgctctcgagtcattgaactcaaacaattcatcgttaccttcaaatttcaaacagagagacaacctcgagaagcagcttacgtttactgctctccatttgcttagttttgtgtcaccaaacgacgatccaagcctgaaagattttcttaccaagaaatcgtcgttcctagaagactggctgagatcactatgcgcatcgttcaacagctcggagcgccagcccttgccaacggaggccacaaacgacgaggacggcttcagcccaaacgtgactcagaaaggcatgctgtcttccgccctgcagtccttgctcggcgtgtacgcgggcaggacccagcaggtcatcacccagagatttgagcaactggctagaagcgtcgcttgaatggtgagcagcgacgagcagtcaggtgtggtctccactccagcctccattaacaagcagcgatatattggtcgtcgtctacccctcaggacggacagcgcgtcaggcagtggatccttaaattctgccgaatcccatgagctccaggcggcacttgtctcggatcttggctgtcatcatgcacaggctctgcaagcctggcttggtcggtgttttcgtcgttgtttacttgaaacatcgttactgatggcgctgttatgtagatgggccttttccctggtcctggggcttcctgcttgcttgataaaaggttggtatcacccgaccacggtccacgtggacgatattacaagatgttcattgttcttggcaagaggggtcatgaatgccgtccaaatctgttggagtccgtcgctagtgccactgctgttattgagcccatgtgtgtgtgtgcgcgcgtgtgttttgttcatgtaccaaccttcataaattgcttgacgctctgcactgttcgacgatcacttcca

SEQ ID NO: 19101 - DNA, 559 bp, Zea Mays
catgtagatactgtactgtacaaatgtatcccaccatttttagatcaattatggcgcccttggttgctgttattcattctgtcatgtgtatcaggtgcaagctagggaatatttggatgcagaggtagccgcaaggaaagctgaagcagctgagaagcgagctgatgatatcgcttcgggagcggcgcagatgaacggccgcgagctgttccaacatgagccctgggtgttcgacaacaacatttactgagatcgtgtcgggctactgttcctgcattagtccaagctccagcggtggtttcattttgtactgctatatcagctttgcgaaactgtggattttatttcaccgtttctaagattattctctcaataggtaattgaacttgtttcaaatacgttttgccaaatctttgtgcagtcaccgaatggtatctagtgtcgctattctttttctaaaactcttacaaacaaagagtattggtcggaagagaattctcgatcttcagattatcgttgttttcatctttcagttatcctattgtgaagtctgatgcaa

SEQ ID NO: 19102 - DNA, 2696 bp, Zea Mays
ggagaaaattacagagcaaactccaggcgcaggcgcaggcgcaggcgcaggcgcagggagacctcaatcatctggatttcggcgacatatactactgcagggagagaatccaaagccctccctcctttgggcttgtctctgcctctctctctcctcccttctcccacccacccctctctcttgctgtgggtgtgctgtggagaggagaaaggaagtagagcaagaacaagaactaataacaccaacaagagctgctgccaactcctgcacagcctgggctctcatcactgattgcccacctattaccttcctcttttgcgatttagaatcacccatatatctacctgctctcggtcctctgtgaactctctcgtcttctaggtttcccaggcctcaagataggcctctggaccaaagcttgaaagcagctgctgttcttgcctctttttttaattcttcatttcgtggttcctggatttttgggttcttaggtttcttgtatcttcccccaaccttgcaaaatcttgtggtgaagtttcttgcgttcgctgtttcgggaccatggacgaaaggattccgccgccgtccctcttgcaatactcgcagtcccctgctcattcttccccccatcccctcaattctatgaggtattcttcctctgaaagagaaaggtgagtgttgttcttgatttttttttatttcttttgtcactattgttctccctgttgttcttggtgagttttgttttgtttttgatcctgccctttcggaatccttctgaggagcacgagatttgatgctgcggtggagatttccgcttaattctaaacttccggatgccatgtttccccttgatcaatgctgccgattgttatggaggagtgatctgtaatcgtagggacttcttttgtgatggctcgctgatagatttgttactgctgtcctaaacggagctgtatggttgactcgctgctaatgggtgtaaactttgtgtgtaacaaatcgctcattggcgatagtcacatgtaaattttaatttgatggatcgttctgtatatatcatatcaaagtttccttttacatttcatttctgcgggattatagctgctttagttttagatcctccaaattatgtttcttcttttgtatcacatggataataaatttagcattggctactgttatcctaacgttgattcttgtttggcagatatctggctgagttgcttgcagagaggcagaaattggccccatttgtgcaagttcttcctttctgtaccaggctcttgaaccaagagattttgcgcgcatcttctatggcgcctaaccataactttgttgatcctgagagaattgagcatggtagcccattaaggttacctggccacccagtgaatggtcagccgatggatctggagggctggtcagggattcaaacagaggcttctcagcatatgggggttctacaagcatcatcaatgggctggaatggtgctcctgtacttgctgccactcctgttgtcaagaaagtcatgaggctggatgttccagtagacaagtatcctaactacaactttgttggtcgtttattggggccgcgaggtaactccctgaaaagggttgaagcttcaacccaatgtagagtttacattcgaggacggggttctgtgaaagactctgttaaggaagacaagctgagggataaacctgggtatgaacaccttaatgaacaactgcatgtgcttgtggaagcagagtttccagcagatatggttgatgtgcgtcttaatcaagctgtgtccatcctagaggatcttcttaaaccaattgacgagtccatggactactacaagaagcagcagctgagggagctggcgattctaaatggcacactgagagaggaaagcccaagccctcacctcagccctagtgtgtcccccttcaactccaccgggatgaagcgcgcaaaaacagggcggtaatctctgttccgaaagccttcatccccccaaatcaatcatggttcaatgcccaattattacacaagctactgctggagatgattggtgatgcatatgctgggatcatcagtgatggcctatgcctgtcatgatctgtgcgctttatcgacaagcacacaaacatgcctgtgctgtgcttggacgaatggtctccgggcttgttgtttgactctactattatttattctttgtgcttctgactgcctaagtattattaacattattggtttgggaaagttaacaaggcccggttggccagtcgctgtagaaagcttggggagaggaggggggggggggggggtgtcaatgtgacggacaataataaggtttcgttggtgtacctgagatagttgtaatatgtcatgtgctgatgcttttgtgtggtgctagtacaagacaaccagacagctatagttgaggcaatgattattttgcgttcataaaatgcatatcggtgtgctttcttcatggttcatgtaccggaaccagtgtaaaatagttcctccgtcccaaaatgttttagctcttgatttttatgtctgtatttataatatataacacatacatcaagtctttcgtgaatccactatttgtctaaaatggattttattttggcacacagaggaagtatcctgtttgagctggtctgtgtgccaaatataaaggtgtatggag

SEQ ID NO: 19103 - DNA, 376 bp, Zea Mays
cttgcccctgctcacagttctttcgtacctagctcccttcggcgcgtccctctgcccctgcacgcactcctgtgtccatgtcgcgccctggttctacgcgcgttcttccctacgcgccgctcagtcttgccatcgccctgtgcgcgtcctggttcgcccagccctgcgcgctctgttcgcccatggagtttgccgagttctatttctgctcggtcgtgcccctaccgagtctcccatggccgcgccctgggatttgccggagtctgcttccctcgtcgcgcgcctgcacgcagctcacgccctgctagcccctgctgcgggttgtcgagctctctgctcacgctcagcttgctctttccttgtttaccgcgcgcac

SEQ ID NO: 19104 - DNA, 1546 bp, Zea Mays
tacaatttttaactctaatttatcaggccattatggttaataatcttctgcaagttgtccagaaataccaagctgttgtcactgaaagtggatcagccgggatatcaaataatgatgcacaaaccatctgcaacatgtttgtcactgcatcacaacaactggcaaaaaatctagagcatcacaccttaaatgaacatgggctctctaaaagatatgtacgctccctgcagatatcggaggtggtgaatcacatgaaggacttgattgagttcagccacaagaacggccttggtcctaaagagagcctgaacagctattctaaaaccatggcgaagtttcagaatatgcatgattcaagacagctcatggctgctgctaaccttgccaataaccagagcaacaccaaactaatggggaccaaagaagaagcaagtgcttctgcgaccaaccagactcctggtgtcggagccatcggcaataatgctcttcagcatgccacacctctaaacagctaccagaatatgctcagaagctccagtgcaaatccagtcttgctgcagcaggaggcatcgagtgtcttcaaaggtcctacagcaatgcacagtggcatacagctggaagcagccagatccttccgtggacctaaccaagtgcagttccaacaccctgcggcgattcagcagcagcagcctatgccgcagcagagcaatttccagggctttggtggtgttaacccacagtaccagcaccatgtgcttaatcagcttctgcaggaagttaagaacaataaccacgtgaaagcacagcaactgcctccagatgcacctaaagcgagcggcggtcttgcaccaggagttgctattcccaacgttgctgctgctggggagcagggacagcatatcaacagtaatacccgtgaccataacggcgcggtgaagggtgctgctccagctggtactggcccaagcaatgtgatcaacaacacagccagcatgccccccggcagaaacaacagcttcaagtcggtgagcagcagtccagctgctgctaccggtggcattgcggtgaactcgaaggtcgacgactccttccatcaactggaggacctcgacctcgacggcttgatcacaaacgaactgatggagagcgggttgttcggcgccggacaagggtggtgagcatgtcccaccacgcctcacactactatcgagttccttcaccgaaagcgccaagcaacaatataagctttgccacccttctctttctggagtttttgtgttgacagtttcagatgatcgtgccatatacaattatgtaaggtagcgagttggatttggcttgggagtcgggaacggcgcaatctatagagctgttagcgtgtgcgtatgacatgttgctgtggttatcattttcatgctatggaggagtgtcgattatagtctcctgttgtctggcacggcgtgagtgtgtgtttcccatggttctatgaaatcaaattatagaagaaacaagatctaatgtttaggaatcgattctctatggttca

SEQ ID NO: 19105 - DNA, 2715 bp, Zea Mays
taagagaaagctttcagtagttcatacacgaaacattatctacccacttgcttttggtgatattgtatgttcatacacaaagaatgatatagaaccaccaaagagttgattgtatattgatcctttttctgcttcatatatctgaactctacaatgtgagatgttgctgtttgggtcctttacagaggacgagactaagttgttccagggtcagcctctcaaaagtccaaataaaagcgtcagcaaagaatgtgaacggacggagatccagtttggcaccctgaacttttcagtgctgagtttagagaaggtatctacttccagtgttgttcttcctgcaaaatcagcaaacagcgagaccagtgccatcacaaaggagaatacatgcagtaatgaaaagaaagctgcaggatcaagccttccaaatggcagagccattctggctaatggatgcccccctgttaatgttcctgccaacaatgatttatttgagaatgtgaagaagacagaagctgttgtcccaccagttgtgcctgtaaaaagcatcagcaatccaacaccacaaatgacattggaggtgcataacgatggcaccgaacccactcaaagcagaaagttagacaaggaaagggaaattactgaaaatggtagcccaattgtcgatacacccattgctgcagctccagcagaagaggcagtcacaaacctaaataagaaaacctcacagaacatgcccttgattccacaaggcttgaggaacacaggaaatatctgctttctgaatgcaactttgcaggcattgctttcatgctcgccttttgtccaccttttacaggatctgaggaaccgtagtatacctaagtttggctacccaactctgcgtgcatttgttgagttgatctctcaattcgatgtgcttgacgagtcagttaacaagaaaaaagagaaggctactactgttgctgcaaagccacttaatcctgccatgtttgatgatgttctcagaaactttacaccagatgtgccggctggaataactgctcggccaaggcaggaagatgctcaagagtttttaagttttgccatggatagagtgcatgatgaactgctgaagcttaatggtaatggtttggattcaaaggagggtatggttgtttcttcttctgctgatgatgcttgggagacagttggaagaaagaacaaatctgcaatagttagaacacatagttttgttccctctgagctaagtgctatttttggagggcagctacagagcgttgtgaaagctgcaggtaacaaagcatcagctactgttcaaccctttctactgcttcatcttgatatattcccagatgctgttcagacacttaatgatgcacttcgtctgttctctacccctgaatctttggaaggatacagaaccactgctggaaaggctggtttggtgacagctagaaagtcattcaagatacacgcccttccaaagataatgatcctgcacttaaagaggttcagttatggaaataatgggagcactaaaatctacaagccactcggcttcacatctgaactggttcttagtcgtgatctgctgagctcaccatcacaagagggtagaaaatatgagcttgttgcaaccatcactcatcatgggagggacccttacagaggtcactacactgctcatgcaaagcatgccgacgggcaatggcttcgctttgacgatgacgctgttgtgcccgttggcgagaacgatgtcttgcatgaccaagcatatgttctcttctacaaacaagtctgaaagcactacgtagttgattagttgctctttcgtatcgccgttgcttaaacagccagatataccgtctaactatcgtcctattaatgtagtcaccgagtaacagcagcagagtattatgtgaagcaccctggtgctgcacgtgtttattatcatatgcttggtcatgatgtggcgagaggggggatttgtcttcagcccattttgaggttctgtaaaaattcaactgtcatcattgcaatgagcagcgaagtaatcatggtcagccctgtcgctggcagctgccgaaatgggttgtgtgcatgtggcatgccgtggttggcaattggttgttgagaagacattgccattagcttagccatgtgccgtgtctctgggagtgtcaagaggtgcagggcaatgttagctggtgtatgtgccttgcaagcatgactagcatgttataaaaagcttcgaattattcgttttgaaggtgtcatgtccctgtcaaggagtcgtcctgacgtctgtaaggaaggtgtgcggccgacatggacttctctttgtggctttctgaggaatggactgaagtggctgcgacttaggaaatctggtatagcgcaaatgttctggagcaaactgagctagtctggttgcaatctgttgctaaactaccatcggttatacctgctgacagacagtgcaactggcgtaggttgctttatgttacacctgttgtttggtggtaaaatcagtggtccatcagtgcttcctacggccttcgtttcaaggaccgattcttcttcagtggatgctgacagctagacatcccgaaagtcatctggagagtagctcggcacatgtagcatcctggagtcgttgacaactcagttccatctgaatcataggacaactgaagcaaagcgaggtagtaatgg

SEQ ID NO: 19106 - DNA, 2427 bp, Zea Mays
gcaaattggaccgcagactgtgagatccatccaatccaacaaccgaatccaatccaatccaatcagagaaaaagaaaaaaggcgaaaggctcgtgtctgtgtggcaccacatcttgccatcagggaaaatggggctgtcaatctcgtacccaccagacgactacctgccagcagtggaggacgacatggggcggctgttcatccggtctctcagcttcgacgacatggaggccgccgccgattcgccttcgtattcgccttcggcattgccccccgcctttggctccgggaagctgatcatggagggctccctgggcttcttcgaaagaagagaagctgacagcgtccagatgcagaacgtgctgtccatcaggaatcctaaacctcctgatagagaagcctgcagcagcgtcagtcccggtgctgcgacagctacttgtggctcatcaagattcgaccgtccaccagattatgattaccccatggtcgggatgaacagccccaggcaccagagcgcggccgtcaggctgcagaaggtgtacaagagcttcaggacgaggcggcagcttgcggattgcgctgttcttgtggaacaacgatggtggaagttgcttgattttgcactgctcaagcggaactcggtgtcattttttgacatagggaagcctgagactgctgtctcaaaatggtcccgggcaaggatgagggccgccaaggttggaaagggtctctccaaggacgagaaggcccagaaacttgcgctgcagcactggctcgaggcgattgaccctcggcatcggtatggccacaacctgcacttctactaccaccgctggctccactgccagagcaagcagccattcttctattggttggatgtaggagaagggaaagatgtcaacttagaggagcattgccctagattcaagttacacaagcaatgtatcaagtaccttggccctaaagaaagggaaacctatgaggtggtagtcgaggacaagaggctgatgtacaagctgagccgtcagatagtcgacacgaccagaagcgtcaaggggaccaagtggatattcgtgctcagtacatgcaagacactttacataggccagaagcagaagggcgtgttccagcactcaagcttccttgcagggggagccacatctgctgcaggaagactggttgtggaggatggaattctcaagagatgtgttcgtttcaggctgtgtggcctcatagcgggcattaccggccgacggagcagaacttccaggagttcatgaacttcctcaaggagaggaatgtagatcttaacaacgtggtgttgagcccatcagaaggtgaagaagatggcgacttcagcctggcgagcagctactctcagctggacctgacccaactctgccagcaagaagacagccaagaacaagaggcacaatctgcgcgacgccatggccaagtcgaagccgaagccgaagctaggacctgcagcctggagcccagcctgccatctacagagacctgcagcacgccggcgacgatcaggaagagctcctcagacaaccggctgcaagggaagcggccgcccaggctgctgatcagctcaaacaacatagcgccgctgccgcccaccacgcacagcaacgccgggccatcgcccggcgggaaggacgacctggacccggactcggccatgatgggcgagtgcctcgacttctgcaagcgaaacctgttcgcggaggacgggtacgaggaccgctacctggatgacctcgcggagctgccggaggcgctgatcctgaaccgcatcaactccaagcgggccatgcactcgtaccagctcgggaagcagctgtccttccactggagcaccggcgccgggccccggatcgggtgcgtccgtgactacccgtccgagctccagttccgggcgctggaggatgtcagcctgtcgccccgtggcggcggcaggtcggtgaggttcccgtcgcccaggccgggcgcgctcacgcccaacagcatccctgcggccaagtgtggctctcttacggcggacggcgacggcgtgcacgcgtcgctcaagcccaggcagaggagtgccacttggactgcgttctgagggacataccatgcatgcatgcatgctgcttccttcagcttttttttttcacagcattgtgacgataaaccgagggaaaagtgagatagcatgctccttcacgtagacgaggatagaaggatcagcattgacagacatttggcaaacactgggtaatgccatattgtaatggtacctataggttgatgacaaagctcttgctgttttataagggcacggaaagagcgaatatggagtatcccctcacttcagtgagaccgttctcagattacgcatatccgcgcccccaaaacttaattcagatacaaacg

SEQ ID NO: 19107 - DNA, 275 bp, Zea Mays
attagagtgctcaaagcaagccatcgctctggatacattagcatgggataacatcataggattccggtcctattgtgttggccttcgggatcggagtaatgattaatagggacagtcgggggcattcgtatttcatagtcagaggtgaaattctcggatttatgaaagacgaacaactgtgaaagcatttgccaaggatgttttcattaatcaagaacgaaagttgggggctcgaagacgatcagataccgtcctagtctcaaccataaacaatg

SEQ ID NO: 19108 - DNA, 815 bp, Zea Mays
gcaaatcctttctggaatgctaaatttgaaggacctctgtttgatcactgggaaggcttcttggctagcgtacctggatatctattgcttgaatgctgatgggtctctgtttgatgctgcacttatttcagcagtggctgccttcacacatttggagattcctttagtttctgttggtgatgatggtagattatttactgttggaggcaatgatggaaaaaacaaatttgaattagtaaacagagaaaagaggaaactgacacttggtgccattccattgtcccttacatgtgcacttcataaagatgaaatattagcggacccaacttctgaagaagaatcgataatagagacctatgtgactgttgttgtagattcttcagaccgcctagtgtcattacaaaaacttggaggtgcagtgacatgcatggcgactattaaggagtgcattagcttggcgaaagaaaggagacggagcctaagagaaattctgttagactctatcaaagccatggaagtcgaccaaactgaataattctacaaatagattcagttaatctaaccggactacatcttgatggtttctctctgcctcggctgtactggttgtaacagcagttttgttgatttaggcaaagtatgtagctatttgtactctacagtctacacataattcttcacttaagtagcctggcgattttgtttgacgagcatgtctgcaatgcatctttttcgcgacttggcatctttgtaacaccctaattcacattttgcaatattttattttattttttataatcaattagaactactgc

SEQ ID NO: 19109 - DNA, 3842 bp, Zea Mays
gcctctctcccgcacgcccccgccccgaagacctcgcgacgccaaaaaggaggagagaccgccacccccacgcccgcacggcccactcagcgctctccacccccgtcccctcgcggcggcggcggagcccgagcctgagtcctgcccccccgggctaggttggtctccgcctccgccctccagtctctttggcacaacctgcagccgctggcgcaggtggacatggatctgccaagcctcgccgtcgtgctgcgcgccgcgctcagtcacgttcctgaggagcgcaaagctgcagaggagagtctcaaccagttccagttcacaccacagcatttggtgagattgttacagatcattgtcgatggaagttgtgatatggctgtaagacaggttgcaagcattcatttcaagaattttattgcgaaaaactggtcacccaatgatccagatgagtctccgaaagttttggaaagtgacaaggccatggttcgtgaaaacgtacttggttttattgttcaagtgccccctttgttaagagcccagcttggagaaagtatcaaaacaattattcattctgattatcctgagcagtggccaagtctccttcactgggtttcacacaacatagacttacagaatcaaatttttggtgctttatatgtcctaagggttcttgccagaaaatatgagttcaagtctgaggatgagaggatacctttatatcacattgtagaggagacatttcctcgtctactaagcatttttagcaaattggttcagattgtcaatccaccaattgaagttgctgatttaatcaagttgatatgtaaaatattttggtcatcaatttatttggagattccgaagcaactatttgatccaaatgtcttcaatgcatggatggttttgtttataaacttgttggaaaggccagttcctgtggaaggccaaccaatggatcctgagattaggaaatcttgggcctggtggaaagttaagaaatggactatccatatcctgaaccgtctctacaccagattcggtgatctgaagcttcagaaaccagagagtaaagctttcgctcaaatgtttcagaagacttatgcaggaaaaatattggcatgccacatgcagctgctgaatgcaattcgtagtggtgattacttgccagatagggttatcaatcttgttcttcagtatctaactaacagtgttacaaagaacagtatgtatcagatgatgcagcctcagattgatatacttctttttgagataatttttcctcttatgtgcttcaatgacaatgaccaaaagttatgggaagaagatccccatgaatatgttcgcaagggctatgatatcatcgaagatttgtacagtccccgaacagctgctatggactttgtgagtgaattgattagaaagcgagggaaaaacaatctccaaaagttcatccatttcattgtggatatttttaggaggtatgatgaagcacctgctgatcttaagccatatcgccaaaaagatggtgctcttctcgctattgggacactctgtgataaactgaagcaaacagatccatataaaacagagcttgagagcagcatgggttgctgggcagtatgcccatatcaacttttcagaccagaacaattttcgtcaggctatgcactgtatgtctcaggaatgcgtgatccagatcttcctgtgagggttgattcggtctttgcacttcgttgttttgttgaagcttgcaaagatttaaatgagatccgacctatacttcctcagctccttgatgaattttttaagctgatgaatgaggttgagaatgaggatcttgtattcaccctagaaaccattgttgacaaatttggcgaagagatggcaccttatgcactaggtttgtgccagaatttggctgctgctttctggagatgtatggctagttcagaagctgatgatgaagctgatgattctggtgctttggcagctgttggttgcttacgagcaattagcacaattcttgagtccataagcagcctcccacatctttttctgcaaatagaacctacattgttacctataatgcgcaggatgttgacatctgatggccaagatgtttatgaagaagttcttgaaattgtttcctatatgacatttttctcacctacaatttcactggacatgtggagcttgtggccactgatgatggaagcgcttaatgactgggctatagatttctttgagaatattcttgttccactggacaactacatttctcggggaactgatatctttcttgcaagcaaagatccagattaccagcaaagcctgtgggatgcactacaatctataatgatggacgaaaacatggaagattctgatattgaacctgctcccaagctcattgaagttgtttttcaaaattgcaaaggcaacgtggatcagtgggttgagcactacctcaggattacaattgcacggttacgtagagcacagaaaccatacttgaaatgcctccttgtacaagtgatcgctaatgcgctctactacaatcctgcgctgacccttgaatctttaaataaacttggggttgcagctgacatttttaaccattggtttgctatgctacaacaagttaaaaaaagtggagcacgggttaatttcaagagggagcatgataagaaagtttgctgcttgggcctgacctctcttatcgcgcttccagctgataagattccagcagaagctttggatcggatcttcaaagcaacacttgagcttcttgttgcttacaaggaccaagttgcagaagctaagaaggaaaatgaagaggctgctgatgatatggatggttttgatgctgatgaagaagatgatgatgaagttgactccgataaggagatgggtgttgatgatgaagacggggatgaaataagcagtcttcagctgcaaaaattagctgcagaggctagaggcttccaaccagccgacgaggatgatgactcagatgatgatttcagtgacgatgaggagctacactcaccaatagatgaggtggatccgttcattttctttgtagaaactgttcaagctttgcaggcatctgatcctgccaggttccagaaccttatgcagacattggatttccgttatcaggcgcttgctagtggcataggacaacatgccgagcaaagaaaaattgaaattgagagagagaaatctgagaaggcaaatgcacagtgacataataaatcatttctggccgcccttgtttttgccattttgccagtataagccattggtgtctggtcaattccctgtgatttgcaggtcgctggtatgagttttgcagccttagccaacctttaagggtaggacaattttaggctcgcaaaattctatccttgtgaggaagcatcttggataatctgtcacgtcggccatgttcttcgtggcctgttgttgccgtcttggttgcgcaagaaagtttctctcgaggacagttgctccgtcttgttgaatttttttttgggggggggcttgtaagagcatttgttatagaaactcacctcaggtggtggggttgcattctccgagttgtcaaagtttattactggttcggagtagattgtatatggtttcggttggtaagacaacggttgtacgagctgcggtatatgtttttttttgtcaacaggacattgtaattgggttttgttctttggtcggcgagagcaagaaaaattggcattgttctgcggagttaccttgtttggtttcattgtccacttgcctgtgttgcaaaattatataatgttatagaaattggatggtgt

SEQ ID NO: 19110 - DNA, 2440 bp, Zea Mays
gtgccacacacacagccacgcccgtcggcccgctaggccgctactacccagaaggatggcggcggcggtggtggtgaggcgtgccgctggccttatccctctcctctcctcgcggttcggtgctcgcatgcccctccaccgggcgctatcccagatccctccgcctcgcttctgtcgcctactatcgcagcaaaccaagcccttctccgcctccgcgtcgaatggcgcggctacggacagaacccgcgagctgcgtctgtacaacaccaagtcgcggaagaaggagcagtttcggccgcgcattccaggcagggaggtcggcatgtacgtctgcggtgtcaccccctacgatgacagtcacatcggccatgcccgcgcatacgtagcctttgacgtcctctacaggtacttgcgctatttggactatgaagttcgctatgttcggaacttcaccgacattgatgacaaggaaacctgagttgcacttctggaattatgtagataattgcaagagcaaatcagctgggggaagatccttttagcttaagcaaaaggttctctgatgacttcttgtcagacatggccaatcttcaatgtctaccaccatccgtggagccccgtgtttcagatcatgttgatgagattataaatatgattaaacagatccttgataaccgttgcgcatatgtagtgggtggggatgtttatttctctgtagacaattttcctgagtacggagaattatctggtagaaagttagatgataatagagctggtgagagggttgctgttgatgagaggaagagaaatccagctgattttgctctatggaaggctgcaaaagatggggagccatggtgggatagcccatggggcccaggaaggccaggatggcacatagaatgcagtgccatgagtgcacattatttgggtcattcttttgacatacatggtggtggggaggatctcatctttccacaccatgagaatgagattgctcagagtcgtgcggcatgttgtgacagtaccataaattactggatacacaacggttttgtgaatgtaaacagccaaaaaatgtctaaatcacttggtaattttgttaccatacgtaaggttatagagatgtaccacccgctggctttgagaatgttcttacttggcacacactataggtccccaattaactacaccatagaacaactcaatgttgcatcagatagattgtactacacgtatcagaccttgcgtgattgtgaagagatctgtcagcatcaacaaagcaacactggaaatccattgcctgctaataccttaaattacatccagaaacttcatgatgaatttgagacctcaatgtcagatgatcttcacacttcagtggcattggctgctatgtctgagccattgaaagttatgaatgatctgctgcacactcgcaagggaaagaaacaggacaagaggttggaatcgctttccgccttagaagagaaaataagagtagttctctctgttctaggattgctaccttcaagttatcatgaggctttgcaacagctgcgggataaagcactgagacgagcttccatcactgaggagcttgtggtacagaagattgaagagaggactgcagcaaggaaggcgaagcagtatgaaaaatccgacgagatccggaaggaattggctgctgttggaatcgccctcatggatggccccgacggaacaacttggaggccatctttaccacttccagaggaggaagcggtgcttgctaaaacatgatgtgcgccgactttaggatcgagtcgagtatataggggtgattaatcttgttttaaaaagttaaatgcgtctgctagcagaaataaatgtgaatttagttagttgctctagtcaagactacggctctttatctatactagatctatgcccgtgcgttgccacggaaaacacatgaaatcgttatgtgtggtactacaaatcaaacaaagtgaaaaacattaaatatttattcacacgatattgtaaataaaacaacatatcatagcaacagtgagagatccatccatgccacaaacgagcataggagagagctggagtgtgccttttcatcaccttcttgacactggcagcatctactaacaaacgactactaattaactactactactattattatttatgcctactactcactcactatcatatacttatcataggcctaagagctaaaaaaacaacctggacttgtttcttctctgttgctgtcttcactgtcccctccttaagattacacctctccaaaggtatttcttttttctttgtcaaagcttctctacgctcggttgatagggccggccatcatgtagccatattagtagtccctcccagattagaggaatggagggccccccttcccctttttttgctctatgcacct

SEQ ID NO: 19111 - DNA, 1150 bp, Zea Mays
tgaggctgttcgtccggggcggccatgcttgatcccttccgggaccggagttcactggtgcctgtcgatttctcaagcttgtttctttcggggtaagcgagaggcataggccatcatcagacgagagggagaaccagcgaggactgccaagaagatgctgaagagactgctgacgaagactaagagcaagaagaagaaggaggctgcctcctctgccataccgacgttggatcggctccatgagactctagagatgctggagaagaaggagcgtttcctccagaagaaatgttccgcggaaatagagaaggcgaaggattacacaaaagcgaagaacaagaacgccgcaatccagtgcctaaagaagaagaaactgtacgagacacagatcgagcagctatcgaatttccagctgcgagtccatgaccagatcataatgctcgaaagcgccaaggcgaccacggacactgtcgacgctctgcgctcggggtcatctgctgtcaaggcgatgcagcaatcagtcaacgtggacgacatcgagaaggcgatcgaggaggcgaacgagcagacggagagcatgcgggagatgcagcaggcacttgcgacgccgattggcgcttccgctgacttcgacgaggacgagctagaagcggagctggaagagctggaggaggaggaggaggaggagggggagatcgaggacgagctgcctgagccgccggcgaggcggtccgtggaaccatcggcgaaagcggcggcggcgtcttctagacagggcagtgatgtgagcgagctgaccaggcttcaggcagagatggccctctagctgtctagcagtgatgtgatgtgagcgagctcgtcgttgcgcctgtattgtacacacgtgttttgctgtaaattcatcttgttctagaagacaagacacggcatagatgagagaatctagtcggtgtccggcggacgatgccagccggcagaagcagtttgactttgacggtctcggattgcggtccattgttccaacagatacgatgcgatatcattattcttatactctatcatgtaaaatgcaagaattgccaagatgttctaagatcactcgagttctggtcatttctaagaaaaatatatatatttttaaaatgtaaca

SEQ ID NO: 19112 - DNA, 1545 bp, Zea Mays
tttagtttgtcttccctaattctcaacaccttccaaaagttttttgatgaatgtgccatccaggcttagtgctgatggttttgttcggcatgttttagtaacagcatgagccccattctgatgcctctcacttgcctagttttgctgcttatctgtctcgatgacccaaattcctaacgagtaatggtgggttgcacttaaacgcagaacaaatttagatgaggtgttgtgtagtagacatgcatgatggcgggaattgaagcaaatgctggcatgatgtgggattcctgcttaatttagtgtttgcatgggcttgaggcttatcattttgttgactttacacaacatttctgttttctttatcaatgcgccgagagcatcaataatgttagataattttagtttattgcatgtctaatgatttgtttagtagttagcaaggctttttgtttccagttgcaatatgcaatttgtatcctgcatctagccctgtgtttacttcttgcattaaaaagggaagaaataatggtgtatggtttcattccccatgtcagcagagttgggatgcaaattaaacggtttcatattttttgacacctaaaaacaggttcataatttgagggtgtaaattaaactgcactttcaggtgacagggcagatggttttttgtttcaatttagaaaggaaatggaggccacttattatgtcaaggtggaagaaatcaactgtgcatactttgaccaagtggacaagctaaataattatggtgctcacaacagagatacagtatcaaggctgctctggtcctttttccattactgggcatatgagcacgattacacaagagatgtcatatcaattcgtactggaaggattatcagtaaggaacggaaggactggactagacgagttggaaatgacaggcatctcatatgcatcgaagatccgtttgagatctcccatgatctcggtcgcgtagttgacaagttcaccatcaaaatactcagggaggaattcgagcgagcagctaatatattacagttcgatccaaaccccagcgtaacactctttgagccctacgtgccccctccatcgccgagcctgttgcaagaagaaactgcgaatgctgcagaaattgaactatgatagcgtttggttcgtccccaggtattgtaataggaaatagaatcaactcaaggattttgatccttgcatcactggttgcagcctttggttggatgtgtaaatggtattgtttaccgttacagctgtttggtttctatctcagggatcacaagtcagttcccgaacttaaaaatcattcgtggtatgttctatttcaactcaagggatcacaagtcagctaccatatcacatgtcctattttatttctatttcaaacttcattcggcaaatagtggtgcgaattctctatttggacagccaaaagtcagcaccatacgtataattttggttcacatatgaaagaggtcaaccaattattgtatgtcgtacaacaaatgggatgaataggatgacatcaag

SEQ ID NO: 19113 - DNA, 665 bp, Zea Mays
tgctcttgcttactttcatcaactagcattacatgattacatcgtccgcaaaaagcatacaccaagagacatcctcttgtatgtcacttgtgacctcatccatcaccaaggcaaaaaggctgaagccccgcttacagttactggattgttgaattcgttgggtcttgagaagtatattgttctctttcaggctgaggaggtggatatggctgcattgaggcaaatgggggagagtgacctcaaagacatgggggtacctatgggcccgaggaagaagattctccttgcagttggccctcagtcgaaacaacggcaaatatgagcaacatggtgtgggacttgcgagcatttgttggcaactgaaaatattggtgcaagaacgccagatagcagatattgtatatcaatccatattgtctgtctcaatccactcttttgttgctgatggcgttgtttcgtgccgtagttgacaccatgtaaagtctattcagccagctgttaatctaggttctatcattcagtctgcctgcccactgttattgtttcgaaacgggtggatacgtgtggtttactcgtgacgattagtttggaatggatgctacgttcgattcttttgtgtcacaagacgccgagcctttaagaaggccctatttatctatccaaat

SEQ ID NO: 19114 - DNA, 1109 bp, Zea Mays
tggccggggagggagatatctgcctctttttaccgacaaaagatgagataagacacacatttatggtctatattcttcatgaaacaacccattctagatgtggggctggctttcaaagggttggcccatgccttggtggtgcatccagtgcaaagatggcttcagaagttcatattgaggatgaaccaaccgctggagaacatgtttcgtcggacagtgatatgccagaaaattctcatgaacctctggagagcggagactcggatgatccatttgaacctccatactttgtaccatgcaggagtcctctatctaaatcccaaaagagaatggttgagcagcgagtgcgagctatccgatctgaagttcccatttgtgtggcagtaatgaagaacaataacgttggcattgctcagcgttggatgctagaattatgttcacgatatgcttcggtatatctcccaactaaagggcaaaacatattgctccagtgcaaggggaagacgtgggaagccaaaatgatgtttcataatggcagaaggtggtttcttaatggaggttggcccgattttgctcgtggcaatggcctgcgcgtcggtgacatgtgtctattcgaactgaagaagaaaaagagtacgcttaccatggcagtccatatcattcgcaaggagcagttttaggttgggctggcatgtagttaatccatggttgtggctgatctctggatggattagagaccaatctcaatctgtaacgtttgttggtaggctggtagctatctgctgacaacatgttttagcatgatgtatatataacatcctttattatgccgaaatgtcgccttgcttttacttatgtgtacatgtagcacagttttgtttgcttttcaaaatttgattgtacggcagtaggttgaacatgcagcttgagtttcagccgcactaggtcgcctctccacagaaaacagaaagtgaagatggagaatatgcaatgtgtttggaagcaaaactaatttaggtaaacaaatgtaatgaaattctcaaagcggtttgcacaatcctctgtttcttatcttgatcttctctttgagtttgtcagctgcaataaaa

SEQ ID NO: 19115 - DNA, 1934 bp, Zea Mays
agcgaatcctaagtttcataatggcataaatccaattttctctacaggaaacacggcatcctcgctgacgccggagaagccgaagctacaagttcgcccgtcggagccgcagcacaggcgcttgcaaacgcgatggggagcgcggacctggtgctcaagatggcttgcgagggctgcggcaacacgtcggatctctacggcacggggtgcaagcacaccactctctgcagtgactgcgggaagtccatggcacgctcccgtgcccgctgcctcgtctgctccgcgcccatcaccaggctcatccggaagaatgccgagaacaagtggtctctccataaggagggtctgcaaggccgtcagatagccgagaatatgcgggaaaaatacaacaagaaaccatggattttggaagacgaaacaggccaatatcagtatcaaggtcaaatggaaggatcacagtcagctacagctacatattatttgttaatgaggcacggcaaggaatttaatgcatatcctgctggctcttggtttaatttcagtaaaattgcacagtacaaacaattgacactggaggaggctgaagaaaagatgaataagaggaagaccagtgcaactggttatgaacgctggatgatgaaagcagcggcaaatggaccagctgcctttggttcagacatgaagaagcttgaggccacaaatggtggggaaaaagaaagtgctcgtcctaagaaaggaaaaaataatgaagagggtaataattctgataagggtgaggaggatgaagaagaggaagcaacacgcaagaatagacttggactaactaaaaagggcatggatgatgatgaggaaggtggaaaagatctagatttcgatttggatgatgaaattgagaaaggtgatgactgggagcatgaagaaacattcactgacgatgatgaggctgtagacattgatccagaggaacgggcagatttagctcctgaaattcctgctccacctgaaatcaagcaggatgatgaagagaacgaagaagaagggggcctgagcaagtctggcaaggaactaaaaaagttgcttgggcgcgctgctggactaaatgagtcagatgcggatgaggatgaagaagacgaagatcaagaagatgattcatcgccagtgcttgctccaaaacagaaggatcaagttaaagatgaacctgtggatagcagcccatctaaaccagcaccatcaggacatgctcgaggcacacctccggcatccaaatccaagcaaaagagaaaatcaggtgttgatgatgcaaaaacttctagtggtgcagcttcaaagaaagcaaaggatgcgaaagcatcaggcctcaaagaggaggcatcatctttggcaaaacctgcatcaaagacctctgctgcatcaaaaagtgggacaagcgtatcacctgtcacagaggatgaaatcaggagtgttcttcttgcagtggctccagtcaccacacaagatctggtatccagattcaagtctaggcttcgaggtgcagaggacaagaatgcatttgctgaaattctgaagaaaatttcgaagatacagaagacgaacggccacaactacgttgtcctcagagatgacaagaagtaaataaccgaacaaaggcgctgacatcgcaaccgttggctgtactgagataatatgtttatgtaacatgctgccttgaagataaacaagtctgtaacactagaattgtcttctaacccttgtgtacttgaattttattttactattccagattttatttatgcggctttgcactacacacctgttataaatggaaatccattgggagttcatctcgtgaattttggtagattgacataatttctctcgcttaaaataattattagcttatggggaacccagtgcagttgtgaattttgcgttgt

SEQ ID NO: 19116 - DNA, 1168 bp, Zea Mays
cctatctccactgatggacctaaaaggagttgatttgattagtggtgtcacatgtgatgctccatatgaatggttggacaagactgactcagaatgggagttcaagagggatcagtcaagtgaaacttttcatgtggttgcctatgactttggtatcaaacataatattttgagacgattgacatcatatggatgcaaaataacagttgttccagcaaattggcctgcttcagaggtactcaatttgaagcctaatggtgttctttttagcaatggtcctggagatccagctgcagttccctatgctgtgaagacagtacaagacataattggaaaggttcctgttttcggcatctgtatgggccaccaattgattgggcaggcgcttggtgggaagacatttaaaatgaaatttggtcatcatggtgggaatcaccctgtctgtgatctccgtagtgggcgtgtagacataagtgcacagaaccataactacgcagttgacccagaatcacttccagaaggagcagaagtaactcacgtcaatctcaacgacaatagttgtgctggccttcagtacgccaagatgaagcttgtgtctctccagtaccatcctgagtcttccccaggtccgcatgattccgacacagccttcggtgagtttatagagctcatgaagagcaacagattgtgagggaggggagtactggcaaaggtcaacaattgtcttggtgctctctcgcagcaagctcaaaagaatttgtttcattttagtgtttttctttgggatgttcatgtacttgaattttgggtccagaggacatagcataagatgctctgcagctgtaccatgaattgaagtagtgaactggttgaatttcttgagaataacatgttatcaaattgcacggtacagtatactcagattatgctcgcgaatttctggccggcaagtaaagtggtgagcaccagtagactagttagtatagagataaaggatggccatgaaggctcgtcagtggatacttctgttgttccaagctaatcagatgtgcacaagcacaacgttgttgccagctttttaaatgactgatggaaaatcatccagcttttgttggcgacaaggttcgtgtagatcgttcgatgtgcatctgatctggaaactttctcg

SEQ ID NO: 19117 - DNA, 2313 bp, Zea Mays
actcactaaaagtacctgatcattgcaacttatatttatatattttggatgacgaacaacttagaaatgatatcaaggttatatataatatcatatcttgtgtttgttcccgtaaaaaataaccaccaatatctttactactctataagcctttattgtaggcctccacacccgtgcgccggttctgcctctcgatgcccgtctgcccgcgcgccccactccctcttccctggcgcgagatggatccgccgcgaatcgcccacaaatcatggcagtacttctctggttcacgcatctgtcggtccacaaatcacgcatccgtcatggcagcgacagacagacaagatttaacttgcatccatggcagccgccgcgcatctgtcggtccacaaatcacgcatccgtcggtcccaaatcacgcgccagggaaggtgctttccaaatcatgcgccagagaaggcgccttcccaaaacacacatccatggcagccgtcgcgcccgcgccagggaaggtgcttcccaaatcacgcgtcagggaaggtccttcccagatcacgcattcatggcagccgcgcccgtaaaccgcgcctcccccacgacgctcttccatccacagcgtcgcccccttccatccatggcagtcgcgctccctctgcgagcctatacgtgcggggatgttgggaggcgctaccaccaatcgagcggcattagccccgacctgaagcacacatggccggaatccagaggatatcgtgcccccgcccccatccggagtctgccccgcatcgtgcgatgctcgttgctgagctcccgatgaccgcccgatggtgtcgaaccccgcaccgtcgtcggcaccgcgctactcggcgtactcgctaccgtcgacccacctccccggagaggacatcctcttctgcatcgacgccgacctcgaggtccacgccaagatgaagtccgctgccgtagcatcctcgggatccacgtccactgcgtcgccgcagtccgtaggagctgatggtgccccggcggtggggacccggactgtggtcgcccgagaaccacccacgttgagactgacgcatcccaagccagataaggatggataccctcacatcttcgattatttcgccgtccaaacacatgatttcctggttcccctttggcttcctccagatcttgccttcgcccgcatcgaccatcgcgccgctgccgtgacctaccatggagctctgcctcgccgcgcgcgccgggacgatggcggccgcgtgccggaggatggcaccgacgataggcgtgccgaagaagaggcacgacggtggcactgtgcgcgtacgttgcgtggtgacgacgcccatgggggagaagacggagtaccgggacggcccgctggagcgtgcgttcatggggctgttcgcgcgaagatggagaagtacgcggcgaagaagtcggcggcgcaggcgaaggagaagagggcggtgtgggagtgggactacgagagcttcgtggacgtgtcgtggcggttccggcggctgttcccgccgacgcggtgggcctgcgagttcaacacggcgctgaccgtgcccttcttccgatggctcgtgggcccctcggaggtggaggtcggcggcctccggcagcgcagcgaggtgcgcatcgagaagtgccggtacctggagagcagcggctgcgtggggatgtgcgtcaacatgtgcaaggtccccacacaggacttcttcaccaacgagttcgggctccccctcaccatggacccaagtgcctcctccgttggaagaggacccggcgtcgaagcaagcttgctacccgagcctctgttccatgttgacgctgtgtgccccggcctgtcccaagcttcaataggtccatacatgcatgcgcagagtttgccggccggacttgggatggaagaattatcatttgtgttttttatacagaaatgtagcttgtaaactattagtaaagttatatacaagttttattctgaaccaggacagagcactctgtaacaaattcggtgcatttccgttcctttcgctgatcaaatgcctttgttccctatggttcttgtagagcggttgtgtcgtccgagcattgatctgaaccagcacagtttatcagggacgtagcagtgagttggttatagagaactcagatttgatggctaaacataaaagcgacttagaaggattcaagttatatgtatactaaagtggtgaggactcgcaagaagttcaatccactgccagaaggttagatttgagtctcaattattttcaagggaagagatcatgctga

SEQ ID NO: 19118 - DNA, 1145 bp, Zea Mays
ggcgaagttagttacaaagcattttgctgcacatgttcaccctgttcttatgcttatcggttatgttattatcggcggtgaagctataatggtgtacagggtacttccaacatcgaatcatgacacaactaagctgatccatctaattctccacgggattgcactcgtccttggtgcggttggaatatactttgctttcaaaaatcacaatgagagtgggattgccaatctttacagcctgcactcttggattgggataggaacaattactttgtatggtattcaggtaaggccatgcatgtgatggcaaagttaggtgtcttctttgactatgattttgacacactaacaacactactgcatttattttgaatgatttgtttttttattgaacaaaccagagatatactgtgttttttttccttcaaaatataaactttgcatatgttgccggtagctggtgagctttatacttgctcttcttagacagtttctgaaatgagaaactgcattctagtgtgaagtgaacactcgtatagttatgcagtgatagaatgaccttatatttgccttattgatcacagtggataattggattcgtcacgttcttcttccctggtgctgcgccaaacgtgaagaagggtgttcttccttggcacgtactctttgggctctttgtctacatcttagcactggctaatgcagaactcggctttcttgagaagctcactttcctcgagagctcaggtctcgacaaatatggcacagaggcattcttagtgaacttcacagcattggttgtcgtgttatttggtgcctctgttgtggtggctgctatagctccagttcgccttgaagaaccacagggttatgatccaattccagaaaactagcgcaaatgaaatgtacagcgtatgcagttgccaagattggctgttaccacatggagataagatattcatgtctctttattgacgaagaaggtgatggaattatcacaataaagatgtagacataaatgtgtgtatatacattctgtgacacttcaaagtttcagtatatgcaaaactgaatatgctgcttcataaatgtgtgtatttgctttcatgaatatcctgcttcataatgtgctatctctattctct

SEQ ID NO: 19119 - DNA, 1830 bp, Zea Mays
gtcgctttgcatggctgaagataaattttgtattttttatatgatgcaggaaccaccttggatgctgctggaatgaacttcccagactctataagacaattgaaagtcaagttccaaatgtttgtcaaactgaagcatggaagagcaggacacattgggctggttctcaagtgcctgaagaagctacccaatccattaaaaaggccgatgaatacctccagtcttgcagacctgtacggagaaaacatgggaggttgctggaggaaggtgctagtggttttcttgctgggaaagttcctgttggggatgatgattctgttaagtgtcatgagaaaagttggagctctttcaatgaacttattaaatctaaggagagtgctgagaatacatttggtagcagtaactgggcatcagtttatcttgcaagtaccccccaggaagcagccgcattaggtctccagtttcctggagttgatgaggtagaggagatatctgaagttgatggtgattttgatgatataaaaggtgtagatgaagtagagctttctgaggaacagagaaggaaatacagaaaggtaagggaagaggatgacgcaaaaataatgaagtgcctgcagcgccgtttgaaaggaaaaaggatgagagactggtgtaaggagaactttggtttggtctcatcatgtgacgagaagcctcctctaccagaaaatggcgttttaggtgctaaaagtgactgtccttcatctaaaaaactcaaaactgatgaaaacaaagtttctattgagatatgaagcatacatgtgaagatgatgataatgagaagagattgaaaactgtgatagttgaaagcgatgatgatatgcagatagatagcaaacaagctttacaaaaggatggtgaaggtagttcaacagaatttgaaaaagtggttgatatcattgatcttgatctcttcccaagccctaagctccctaataaaagtttgcataaaactttcaaatgtactatttgctctgaaatgctgaatgcctctgatgtgcatcgccaccctgtcttggatgttgttgtttgtggatcatgcagatttcttgtgatagagaagaatcgccttgaggatcctgtatctggtagttattgcacttggtgtgcacaaagtgaactgattcaaagttgtagttctttgttgctgctgtgtacccagtcaactagagctcttaatttctgaatgtgacaaggccctcagtggtgtggaatcttccgattcagagactagcaatgcagagctttctggatcagagaataatggtcctgttagcaagcaaaaaatgaagaagagtattagaagaattatggatgatacagaacttggtgaagaaacaaagcgtaaaattgcaatggagaaggcaaggcaagaccatttgaagtcaatgcaagagcaatctgccaccaagttaaggagcaagaatgttggaaatccctttgaaactccactggaaatctgtttacaggatgctggggatggacatgtagtcaaccttgccagggaggaggatgaggaacctgttaggattccaagcagcatgtcttctaaactgaagcctcatcaggttgaaggaataaggtttatgtgggaaaatgttattcaatctgttaaaaaggtcaaatccagggataaaggtcttgggtgcattttggcgcataacatgggccttgggaaaacttttcaggtctgtgttgggctgttggcttatagcttggatatatatttacattttcttcaagagttattcgttcattgtatgctgcacctattgtacccatgacaatcaa

SEQ ID NO: 19120 - DNA, 2240 bp, Zea Mays
cgatcgagcgaagcagaagcgccaaggcagccgacgcgcatggggaggacggacggcaacgcaacggtgtcgccacgtgcacagccgctagcgaaaccgggcaggaaggaccgcagtagtatatagagacctctccggccggcgcgcgcgacgtcagcgacgacgtccgcgccacgcgggcggaacttcgtagtttgcgacggggcacgcacgcacgacgcaccccacgcattttcaactatataaaaagcaccccccgcgagcgcggccggccggcgaacagaggagaggagaggagagactagacccgctagctgaggccggccggcgcgctggacacgaacatgatggggagaaaggcgccgctcggctgtgctactactcttctcctcctcttggccgccgccgtcgctccggccgagctcagcgtattaggcctaggcggcggggcggcggctgcctcgggcgcggtcacccgggccgacttccccgccgggttcgtcttcggcgtcggctcctcggcgtaccaggtcgaaggtgcagttgcagaggacggaagaaagcctagcatctgggacacattcacacatgaaggctactccctcgacaacgccacaggcgacgtaactgcggatcagtatcataagtacaaggacgacgtaaagcttctgcatgagatgggtgtcgatgcctaccggatgtcgattgcctggcctcgacttatcccagatggtcggggagccgtgaatccgaaggggctggagtactacaacaatctcatagatgagctccttagctacggaatacagcctcacgtgacgatataccatttcgatttcccacaggctcttcaggacgagtacagcgggctgatcagtcccagattcatagaggacttcacggcgtacgcagacgtgtgcttcagcaacttcggcgacagggtcaagtactggagcaccgtcaacgagcccaacgtcgagacgatcggcgggtacgaccagggaatcctgccgccgcggcggtgctccttccccttcggcttcggctgcgaggaaggcaactccaccacggagccatacgtagcggcgcaccacctcctgcttgcgcacgcgtctgcggtgtccctgtacagagacaggtaccaggctgcgcaaggaggacggatcggactcaccttgcttggttggtggtacgagcctgggacgcagactcccgacgatgtcgcggcagccgcacggatgaacgacttccacatcggatggttcatgcatcctatggtgttcggggactaccctccggtgatgaggaggaacgtcgggtccaggctgccgaccttcacggacgaggaggcggcgcgagtgagggggtctttcgacttcgtcggattcaaccactacatcgtcgtctacgtcaaggctgaccttggccgcctagacgaccaagtgcgagactacatgggcgatgcagccgtgaagtatgacatgccgtttctcaagtcacgcaaccagttcccgttcggcgccttgacgagcgacttcatgacgtccaccccctgggctctcaagaaaatgctgaggcatctccgggtgacatacaagaaccctgcagtcatgatccatgaaaacgcctgatccatccggcgtgaacagctacgacgacgagttcaggtcacagttcctgcaggactacatcgaggccacgcttcagtccatcaggaacggatcgaacgtgcaaggctacttcgtgtggtcgttcctggacgtgttcgagtacctgttcggctaccgcctccggttcggcgtctacggcgtcgagttcaactcgacggcaaggacaaggtaccagaggcactcggccaagtggtacgccagcttcctccggggcggcgagctgaggccagtcgctctgcctgacggagcatattcacagtgaccagttacacgtgtacgctccggctccaggggaatatctggcgatcagcgctctcggtgaggtggagagaaaatagagagtttgtaagcaaggatagtcggggtggtatatatagcagtgcttagatacggttttcttgggtaaatgtggtacgagttgaataagttgtggcatgtttggttagaggttagaggattggctctacccgaaaccagctgattcagatggtcgtttctatatatttggttagggggatggagtggatccattttttgtttaggaagcaggtcttcactaccggaatccgg

SEQ ID NO: 19121 - DNA, 2654 bp, Zea Mays
tggtccctgttcgttttatagaatcaaagccaacttggctaaaaaatatgaaatttatttgattaatttggttgggaacaagctgaagctgaagttgcttctctgaagcaactacttgaaactgcatcaaagaagaatacctctctggaggatcaggtcagccacctagatgacgcccttaaagaatgtgtaaggcagcttcgccaagcacgtgaagaacaagagaataaaatccatgagacagttgctaagaagtctaaagaattggagtctgagaagtttgagctccagcaccatattgctgaactcagtaagcagttgcaagccacgaaactagaagctactacggtgcgtgtccagcgtgatctgcaggaaaagcttcagatagtggagaaagaaaacaaagacctcaaggtagaattactcgcactgtccaaggacctgaagatacttgcacgggaaagagacctgagcaaccaagcagcagaaacagcaagcaaacttcacctggaaagtgtgaaaaagataacaagagttgaggcagaatgccttaagttgcgtcatttaacgcggcgtacgtccttgaccaatgattcaaggctgataactaacagtgcttgcatggaatctcagactgacagtcagtctgacagtggggagcacatgctagttgatgagatgaaaaattctgattcatgggcaacagctctgatagctgaacttgatcagttcaagaatgccaacaacgacacaagaaatcttgtgaataattcggttgaaattgacctgatggatgatttcctcgagatggaaaagctggctgcactgcctgaagtagactgtgtaagctctagctttggagctgaaactgattctgaccaaggtgtgagtagagataaatcatcaaaagttaaaactgaaccattgcagtgtcaggtgacagatttgcacgcaaagatcgagaagattgaaggtgagaaaagggagcttgaaatggcccttgcagatgccagagttcagcttggcacatcatgtgatgctctaatggtggccaacaacaggttgattgatttgcagatgcagttggacttggcaaatgagtccaaacatgctgctttcggagaagctgagcgactgaatggtgagaggaaagatttggcattgcaactggagtccaggtcttcacaagttgatgagcttcagctgatggtggcatcgctggaaaagaatgtagacaggaaggtgttggaattgcagttagagttagtttctgtggaggctgcagatctgcgcaagacagtggcttccctggaagagaagattgatgcagagataactctctctatgcagcacaaaacaaatgcagacctggcagaggcgtccaaagaatcattagaggcgcagctgcagtctgcaaacacagagatagggaaactgaacgggattgtgcaaactttagagaatgaggtgaggaaagagacagattctcgtgaagaactactgaaacagatagaggctatgaaaattgagtcagagagatcactatctgtggtgtctaccaaagagtcattagaggtgcagctccaggtggcgaattcagaagttgcaaagttgcgtgggatggtgaatgctctggagtgtgatgcggcgaacgagaaggcatattcttcagatctccagatgcaacttgaggcagtggaaggtatcaggaaggtgttggaatctgagcttgagtcttcacaccaggaggtgatgaggctgaaggagaaagtttcgtccttggaagcaaggatcaaggaccagacctcgttgcttgtagaatatacagctaaatcagaggatgcagtgtcccggaaaaaggcaatggagggtcaactagaagcagcaaatctggaagttacaaaactgagaaacaaggtgagcctgatacaaggcaaggtggagcaggagaagcttctgtcagaagagtacgaagcaaaatgccgcaagctggaggcgcaggtgttgagggacagccgagaggcgaaactttggcgcctcacgaactcaaacggagacctgaaggagaaagaactagtcagtgctgccgggaagcttgcggagtgccagaagactattgctaaccttggccgccagctgaaatcgctaacagatcttgatggcgtggtggccgatcctgaaaagctggaatcgagggacacgcacctggacttcagagatggcggagacgtggctgatggactgtatgaactgggtcttcctaagaggaacggtagctgcctctcaccccttcggtcggatccgtcgccgaggggtttgccgtcccttagtagctacctgagcaaaacaaaaaggtgaaaagtctgatgggatcattcaccattgtgcttgtgcataaattatttgacagtctatggatgatgccagttgtgacctggtggtagatcggtgtacatttacagaacttgatggttgctcacatgtgtactttctccttttgttttgctctcattttgcgagactgcagggtttgtgacaaatttactagatcttgtgagactgtagtgcgttattctcgcgttggaattcaactcgtctacaacaaaaatagaagaaaaaaaacaaattcaaccggtcggcaaagtagaagtagg

SEQ ID NO: 19122 - DNA, 244 bp, Zea Mays
aaaatcagtgcacttttggactaaaatgcaaaaaccatgataataaagcatcttaagtcatattatccacaatcatgaaggtttgcaatccaaaacttgagatttgggcttatttgcaaaagagccacacttgaactcttttggttaagtcggaaaccagtgatattggccccactttgaagccctatattccccaatttatgaggattttgttctatgtcaccacatcaatattgtaaaccta

SEQ ID NO: 19123 - DNA, 272 bp, Zea Mays
acctgatttgtaggcctgtcaacggatagatatccagcaaaatctccatatatgccaactagctatacgtacatacagtgtcactcgctagggaaagcaagaaaaggtgatgaaatattagtacacatagatatgatgtatacatggattcagaggggtggtcgatcgatcaatgaatcttaccgaaactgaaaatgatagatgtgtccactaagaagaaagacaaataaaatgaaggtctttctagactatctagaaataggctaggagac

SEQ ID NO: 19124 - DNA, 5927 bp, Zea Mays
ccgcattctcgacaattaaaacctccgccccacccctcctcccctctaatccgcccgccattactttcgcagacgccgctcttcgctcgctcaccgccgcttccttccacgggccatttcgtctccgtcgcccatgctcacctccttcaactctgtgaacccgcgatccgacgtgtagtgccgccgtactgcgcggcgacggcccaccggcgaggagccgccgacctatgcccctcggccagtccggcattggctaacccccaaatgcctcccgccgctaactagccgcagcctgtacatacacagacagacagacatacacaccgtaccggaggttgaagcggagaatcgatcccgacgcttcgccgccgctgtctcgtcgccggagaggagttttagcctcaaaggcgtgattttttgccttgttattttctagcttttttctttcgtgatttttggaccgtgttctcgcgatcgcgccggagagatgggagttgtggacttctcggtgctgggcgctctgcagaaggtcagatccttcgtcgccggcgccacgccggctgaagccgcagacggccggctgcccgccacgccgaggtcgcgcagcggggggccctccccagagaactcgcccccgcccgcggcgacgagatccggaggcaggcgcgccatcgccctgcgccggcagatatcctcgccggagctgctccgctgccgcgctgtcaggcgagcagatgatgaggatgatgatgagcccggggttcagtttttcacccatgggaatgacttcttacatgacttctcagatacagaatctgttagtgttagtacccctaatgatatcaaccgctccctgaccccaagccccttggagagcccgacttggatggtgaagcagaacgacagctcaccaatatccaggaagaatggccgtttcagcccggattctcctggatatggtacaaaggcaagtttaggatctgatggttcgccgcaacagataaatggtagcgtcactgacagtggtgacggaagcaaaactcagtatcctgttgaatttggtgccaatatatggtgcccaccaccaccagaagatgagggcgatgatatcgaatcgaggttatttggattccaggacgaggatgatgaggctggggactcaagcgggcttcttgtttctggtagctttagtgctaacaaaatagctgctattgacgaggtcacaaacactgctcaggaagagtgtctgaagactgcggtgctcggccatttccgagctcttgtggctcaattactgaaggcagaaggcattgatatgggaaaggatgatgggtccaaaggttggcttgatattgtgtcatccttaacttggcaagctgcaagctatgtgaggccagataccaagaaaggaggcagcatggatcctactgattatgtgaaggtcaaatgtatagcatcaggggatccaagagatagtaattttgttcgaggagttgtttgctccaagaatgtaaaacacaagcgcatggtctctgagcataggaatgcaaaattgctcattttagggggcgcacttgagtaccacagggttcctaataaattggcatctattggcaggatacttgaacaggagaaggagcacatgaaaatgattgttggaaagattgagtcccggcgacctaatgttgtgctagttgagaaaactgtctcatcttctgctcaggagctcttctccaaagacatttcgttagttctgaatgttaagaggacacttttggacagggtatcaaggtgcacaggggcacaaattgcttcatcagctgacagtattgcttcagtacggctaggtcaatgtgaagcgttcaaggtgcaaaaagttacagaattcccatcagctaaacagacaaataggagatcaagcaagacactgatgttctttgaaggctgcccttggcgtttgggttgcacggttctactgagagggtcatgtcgggaggagctcaagaggattaagcgtgctgtacaacttgcagtctttgctgcttatcacctttctcttgaaacatcattctttgcagatgaaggtgcaacacttcctaaattgccctcgagacatgtggtagttgatccagatacaaggaattgtacaaatagcaattcagctgcattgaccaatgttggtatgcctcatggacgtaaatcagaacatgacaaactctcacagactgctatggtcaacattatgtttgaaaatacccctgtgtcacctagttcattgccatcgaatggagaaggccacatgtttgtgggtgcatgtcagcataaagaaactgaatattctgttgatcataagaactcttgtgaacattgtgtatcccgtgcaactggttcatgcaacgggtatgaaacatctttatgttcatcagataatgattcaatgacacagaatcaaaatttgcagaactctgcaaagcttacatcaaatgctcaccaatatgagtttccagcaaaggaatgtcaacaagtagaccactgggatagacaaccacatgatgatcaatcagtagatcagcgggacctgaataaattttctggtgaatactttcctggttctgacaatcatcagagcatattagtttcgttgtccagtacgtgtatcccaaaaggcttggtatgcgagcgctcccatcttttccgcatcaagttttatggtagctttgataagccacttggtagatacctccgggacgacttatttgatgaggcatatcgctgtcagtcatgcaaagagccatcagaatcacatattaggcgttatactcaccagcatggtagcttaacaattagtgttcggaggcttcaatctcgaaagttgcctggtgagcgtgacggaaggatatggatgtggcacaggtgcctcaagtgcaaacctaaggatggtgttccacctgccacacggaggataatcatgtcagatgctgcctggggtctgtcgcttgggaaattcctagagctaagtttctcaaaccatgcttctgccaaccgagttgcaagctgtggacattcactccagagggactgccttcgtttttatgggtatggaaacatggtggcattcttcagatattctcctgttgacattctctcagttaaccttcctccaccagtactggacttcaattgttgtagtacacaagagtggctaaaaagggtggcagttgagatatttggcaaaatggaatccttgcatgtggaggtgtctgaatttcttcactgtactgaaaagaacattgtaactgaggatgaacctgtgagggaatgtgttcaaaggcagattatcgagatgaaggattggcttaaaatgcaaagaaatgaatatgagatgttgcttttaccagtcatgagggaaagcaatcaccccatgcagacatcaattgatattctggagctcaaccgcttgcggcgtggtcttcttcttgatgcttacatttgggatcggaggctatgccatatagactcggttcttaatacacatggccatatttcaaaaaccaatccagataatcttgatattctcctatgcaccagactgaaggagtggaaagctgatttgctttgtggggatactgagattgaaaaatctttagggagtccaaagaaatctttgttatccagagagggccatttgaatgataatgagtacagtgttgctgatacaaatttagagatttgtttggagggtcatcctgtggatgatgcagatgatcttgacaaagtctacaacaaattcagtggagtaaagaagcggcctactgctgaacctactgatggcttggaacctgttgagaggttaccctcacttgcatccattttctctgatactattgatttggcatggactgggtcttgtgatttgcagcatgatcttccacaagctttcaccaaaattgatgaaaatgtatcctttaatttggacagtccgaagtacagcaatttagtaacccctgttagaattcactcgtttagttctacgctggggttgcggcagagagaacgaactggattagttccagcttctttgcatctatcatcattcaaatctgctgagtacttcggagctatgagaagcatcctgaaggacccaatgccaaatatgcgaaggtcctgttctcaaaggtctcctgggacgatagagaaattaaatgttgttcttgcacgtaaacccacatatatctcatctacttcaaatattatcaatgatggggcacggctactgttaccccagactggatatgaacatgatgtcgttgttgcagtatacgaggatgagcccaccagtattatatcatatgccatgacatcagaagaatatgtagaacaagtaacacacagactgaattccagtttgagtttttctcatcaaccaaatactaatgggattagcagccatggacttgaggcgtcctctccatctcaaggagaccatttgcattccaagggaactcattttaagttatccttcgatgatgactcaccgatttctccagataaaacaaagttctctgtgatttgctattttgcaaagcattttgctgcgctgagaaagaaatgctgtcccaaagatattgattacatacgttctctaagtcgctgcaagagatggaacgcgcagggtggaaaaagcaatgtttactttgcaaagacactggatgaaaggttcataatcaaacaagtcacgagaacagagctggagtcttttgtagagtttgctcctcagtacttcaagtatttaatggaatccttggcttctggtagcccaacctgcctggccaaaatagtagggttatatcaggttggcgtcaagagcttgaaaactgggaaggaagtgaggatggatctgatggtgatggaaaatgttttctttgaaaggaagatatctcgggtgtatgacctaaagggttcattgcgctcacgctacacggctggggacagcaaagtcctcttggatgcaaacctcatagaggcattgcatacgaagcctatatttttggggagcaaggcaaaacgaagattggaaagagctgtctggaatgatacttcattccttgcgtggcggatgtgatggactactctctccttgttggcatcgacgaggagaagaaagagctcgtcatcggcatcatcgactacttgcgccaatacacctgggacaagcagctggagacgtgggtgaaggcctcgggcattcttggtggccccaagaacgaatcccccaccgtcatatctccaatgcagtacaagaagaggttcaggaaagccatgtccaagtacttcctcaccgtcccggaccagtggtcctcttgacggcctggctagctaacaagaattgtccgccttaaccagaagcgtttgccgtgccatgccatgccatgccatagtacatgtccgtcattctttctgtgcctagaccctagagagagagagagagagagagagaggtagtcaaattcattttgtgtccgcctgtaccatctgtagcagccatagataggggatcatcctccgactggggatgctggatgccaagcatatggtcactgcagtgtccagccacagatagagaggcttggtccatgactcccatctccatgtacattacggccagcatataatatgtctgaggagaaaaaaaaaggaaatctgtcgacgaaatgcagagaattcttttgatgcctttgtggcatgtatgcagactgtgaaggctattgcaatgtgtcacccccccgtaatttcgttgggagtagttgcggttcacctgccgtgagagtgaaagctattgcatgtatcactgagctcttgacggttcttgtcaaatactcctagttaagtttcacgcaacaatcagacatcatcttcttcgagtaata

SEQ ID NO: 19125 - DNA, 553 bp, Zea Mays
gttatatttatgatcataaaatcatcaagtttgcatgtaaaataatggcagatgtagcataaatgttattcctgtagaaatatcaaagtcacgtgagagacgatatattcatcatcataaaatcctcaaatggaatgcataaaagttgcagtggtcggcataaaaatatcatgaaatgcataacacatggatcagatgaggtcgtcgttggaaaacgccacaaaaccaccggattggaggaggtcgtcgtcggacgatccacgctgtcacaacggcatccaacttgttggagctcgaagaatagttggaggtaggagggcctcgtcgtcacacgcacatcagggggtgccgctgctcaggcatgtgtctggccagcgctgccgctcacgcctctcgaggccacctccgcgcgcgccccttgagaaccaccgtcgggcaccttgtggaggaatcgccatgcgcgtgcatgggaaccgccaccgccgcgcgcctgggggagccaccgccaccatgcgcctcgggaaccatcttcgtttgtgcatcggggtgaggc

SEQ ID NO: 19126 - DNA, 2558 bp, Zea Mays
ataactttttaaaaacaaaaggcttccagctgaaagagtttgtctacagtcttgggttccacatcgaggggctggtacctttgcatctgaaaggactgatgaagattatcagcgtgagtggggacaaaacaaagcaggtagctacactgactcccgttggaacggctctaatctccaacttcagagagatgtcacttcagctggttccacaacaggtactcacaaaaataagggtgtggatggtgttggtggcagttctgagcaacattacagaagtggtggatcatatggctttcaaaacaatcatcagccatatactggtacaagagcgaataatgagagatacaatgcatcacaaccttatagaggtagtggtccatacagccagcaaggccttgatggacatttttcaaatgatcgtcaacagtacaatggcacagaagctaatagtacatatagctctggatactacacccaaagtaagcagaagatttatgaaggagagggagctaataatgggcagtatggatatggtccttcaggacaaccatgtccgaacccagttggaaatagccagcgagttcagaaacagcaatatgttgatcatagatctgggggaagttatccagatagatctgggcatcatccctctcaatatgtaaatccaactcattcccgtaaggagcatgttgcagggtttcagcaaggcaacaatagtaattttggatataatgcttcgcaggcatatcaaagcccttatttcactaggcaggctgatacacatagtacttctcaaggatattccatgtacctaaatacagatgtgcaacgcctctctcatggagttcatcaagaaaaacattcacatgcacaatctgctggatcatttgggaaccatgtaaatagtgcacctcatgaatatggcaaatatcatcagtcactacaaggcaacccttcaaatgttggatcgccttacgaagtacctagtgaagctggcagcaaacacaaatgtactgttgaagaactggagaagttttgtgatgatggcaatgtaaaagaagctctggaagttttggctatgctaaaggaaaacagaattgtgctacatgctcctcagtacttcagattgatgcaagcatgtggtgatgcaactgccctttcagaagcaagattaatacatagtcaaatatctgaatcatcacttactgttgacacagattttcaaaacaaaattatggagatgtatgctaggtgtggttctatggaagatgcaaagaagattttcagttctatggatcatcataatttgacttcttggaacactatgatctcaggttttgtgcacaatgttcttggtgaagaagcaatagatttttttgaacggtttaagcagacaggggacaagccagatcatggcatgttcagacatgttttcttggcatgtggaattttgggatctgttaatgaaggaatgttgcattttgaatccatgcagaaagattttggcatacatcccactacagagcattatgcaagcattgttactatgcttggacagtctggctacattgtcgaggcttatgaattcgtggaacggatgcctgtggaaccaagcattgaggtatgggaaaatttgatgaacatgtgtcgacttaatggctttttagagcttggagatcgttgtgctcagatcatagagtgcttggattcttctaggctgaatgaacagtctaaaatgggtctgttccctgtcgatgtgtcagatcttgcaaaggaaaaggaaaggaaaaaggcaagtgtcgccgaagctcggagcaaggtccatgaatacagagctggcgaccgatctcaccctgacactcctaagatctatgaagagctgaggtatttgttggctcacatgaaggaagctgggtatattgctgacactcgatttgttcttcacgatgttgatcaagaaaccaaagaggatgctttactggctcacagtgagaggctggctatcagttacggtcttataacaagtgctccccgctcacctattcgggttataaagaatcttcgatcctgtggggattgtcacacggctttcaagataatctcaaaacttgttggacgtcagatcattgcaagggatgcaaagaggttccaccacttcgaaaatggtgtgtgttcttgcaaagactactggtaaacaagatgaaagaaagtccacatcttggtcaatttttattggcacaagaccgctataggttgtttatgtgctgaaggtaggctgatgcctatctaacatttagttagctaatagtttcatgtgagagacatgctgtatgatgtcgtcagtgagaaacagccaaacaggtcctaagcagctctggtgttctattttgcagctcatacgttaagcctgagcttttactttaacaactgttgtctctgatttgttacttgccaccaaaataaaacagtagaatgtaactgggtagtggtcccttggcatgtaaactttgattcagctgattacaaagctttctgactgcattctggatccattgctt

SEQ ID NO: 19127 - DNA, 2414 bp, Zea Mays
atggtcttcacgcgctggatacttggacgtgagaatctgacagtgatagacagacactggaagctaagacgaccaaaaagtttcttcccccgtggagcatgacatgcacagcacaggctacaccctacacgtcgttctgatgacatggcgaacgcctagtggctgtcgccggctcgccgcagctccggcgagcggcgattcgttggtgcggggatccgtgacgctgagcagacagcgagtagttaacgtcggcgaggcgatgggccgcctccgtgacgggcgagccttcctccaccgcgcgcttgtcctctcgtcgctgctccttctcgcctccggcgaaatcttcttcgaggaacggttcgatgatgggtgggatagccgctgggtgaaatctgattggaagaagagccaaggacaagctggaaccttccgacacacagcgggaacctactctggagaccctgacgataaaggtatacaaacaactggggatgccaaacattttgctatatcagcaaaattcccacaatttagtaacaaggaccggacattggtgatccagtactctctaaagattgagcaagatattgaatgcggtggtgcttacatcaaacttatgtctggttatctcaaccagaagaaatttggtggcgacactccttacagcttcatgtttgggcctgatatatgtggggatcagaaaaagaagctccatctcatactttcataccaagggcaaaactaccctatcaagaaagaactaaaatgtgaaacagacaagttgacacatttttacacatttattcttagacctgatgccacttatagcatccttatcgataaccgggagagagaattcgggagcatgtacactgactgggatatccttcctcctcgtaagatcaaagatgttaatgcaaaaaagccaaaagactgggatgacagggaatatattgaagatcctgatcaagttaagccagagggatatgattcaattcctaaagagatacctgatcccaaggacaaaaagcctgagtcatgggatgacgatgacgatggtacatggaagcctagaatgatacctaatccagaatacaagggaccatggaagcggaaggtttatttactttatactagttataatttcttaaccttttgttcatttgaatatttatgtactcatgacttttctctctcagaaaattaagaatcctaactacaaaggaaaatggaagaccccatggattgtcaatccagagtttgaggatgacccagacctatatgttctgaaacctttgcagtatgtggggattgaagtatggcaggtcaaagctggttcagtttttgacaacattttgatttgcgatgacccagactatgcaagacatgttgtagatgaaacttttgctgcaaataaggaggctgaaaaggaggcctttgaaggagctgaaagaaagaggaaggctagagaagaagaggaagcacggagggcacgggaggaaggggagagacgaaggcgggagagggatagggaccgcggcagggaccgatacaaggatagatataaggtacatttcttccattttccatactgggtcattattccctgttgcaattatgttcgtcttgtccttgtcatatagggggcctttttttcttggtttgcagttcaatattccatccccttaacttatcactagccttcttaaggattatcatctgtcaaaagtttcaggctgtaggtccttgcctccctgtaggtcgttgatataaaggattgtatggatattatgacaacaatatatataggcagggccagcacaccaatgaagaatttagaattcatcactcccgtggacgaaattagcgaaaatatgtaccagtgttcatagatcttagctgcatagttttaagtctcaatagtatggcacagtgctttatatatcgaccatatgctgcgttgctgacatttttgttcctttcctctgcatctgcagcgtcataggcactacgactaccatgacgagctatagatcctgtattcttttgaaatctgcacgatattggatgtctgtctacggagagcgcacgtgcaaaacttgtatgttgtactcacggatgaagctgaacctgtgattttggcgatgggtagagattggccatcgcgtctgtaactaaatttccacgttgcgatgcaatatgagctgtagtactgtcctcgcactactatttaccgtttgtgctgcatatgtgatataaaccttcaagaaacacacacacgaagggtctgaatgagcacggcctttgttgtttgcttcttataaaaaagaactgttttatctgtgtatacttgccctactttttgctatttccaagcagctggacagaaactgactactgtaccagaaccagaa

SEQ ID NO: 19128 - DNA, 2170 bp, Zea Mays
ggaacactctagaaccctactcgattggatttaaacccgggtttgggtggcgtcgcctttcatcatttcccccctcgtgctctctctcgaaccttcttccaaagcacccgaaccctagtgatctcggaaccctagccgcgcgcggatctcggcttttccccttcctccacgccagccatggacgaggacttcgagatgcctcccgccggcgccgatgagatgatgggcgacgacgagatgggcgacttcggcggcgacgagggcccggtgatgaaggtgggcgaggagaaggaggtcggcaaggaggggctcaagaagaagctgctcaaggagggcgagggctgggagactcccgaggtcggcgacgaggttgaagtgcattacacgggcacgctccttgatgggacaaaattcgactcaagccgtgatcgtggagaacccttcaagttcaagcttggacaaggtcaagtgataaagggttgggatcaaggaatcaagaccatgaagaaaggagaaaatgctatttttaccattcctccagagctggcttatggagcatctggttcacctccaactatcccacccaatgcaaccctgcagtttgatgttgagctgctttcatggaccagtgtcaaagacatttgcaaagatggcggcatattcaagaagatccttaaagagggagagaaatgggagaacccaaaggatcctgatgaagtacttgtgaaatatgaggcccgtctggaagatggtactgttgtatccaagtctgagggggttgagtttactgtgaaaagggtagaccagcagctggagaggaaggtgctgtgccgccaaatgcttcgctgctcattgaccttgagttgatttcatggaagactgtcacagaaattggggatgataagaaaatccttaagaaggttctcaaggagggagaaggttatgagcgtcccaacgagggtgctgttgttgaagtcaaaattatcggaaagcttcaggatggcgcggtgtttacaaagaaggggcatgacgaagagccatttaaattcaagaccgatgaagaggaagttattgccggtcttgatcgtgctgtgttgaacatgaagaagggcgaggttgctcttgtcacaattcctcctgaatatgcatttggttcaactgagtcaaagcaggatcttgctgttgttccacctaacagcacagtaatatatgaagttgagcttatttcatttgtgaaggacaaggagtcgtgggacttgaacaatgaagagaagattgaggctgctggtaagaagaaagaggaagggaatgcattgttcaaatcgggcaaatatgctagagcttccaagcgatatgagaaggctgccaagtacattgagtacgacacttcgttcagtgaagatgagaagaagcaatccaagcaactgaagatcagctgcaacctaaacaatgctgcctgcaaactgaagttgaaggattacaaggaagctgcgaagctttgcaccaaggttctggaactagacagccaaaatgtcaaggctctctacaggagggtgcaagcttacattcaacttgctgacctagagctagcagaggccgatatcaaaaaggcactggaaatcgatcctgacaacagggatgtcaagttggaatataagatcctgaaggagaagatcaaggagtacaacaagaaggacgccaaattctacagcaacatgttcgccaagatgacaaagtagcttttggggtggaggatgttgtggtgaagcgaagggattaaaaacaccgatttctgctgccgaaggacttcgcccgttgcttaacttctcgcttttcgcatactttgtagtcaattagtgtgcacggatgcttggatatgtgaaactgaggaacatgtacttcgaggattattattggttctgaatttttatgttttctggttcttgttaggaccattgaatgttctctctatataattttcggacacatgttcttaataaaccacgggagcaaaagtttatgctaagaacgtctgctcatcgtaactaacaacagctgcctcaccgtcacgcactgccgtgtcaggatgtgtcaacctgaagatcacagaaactgcacaacgtttgcagatcaatgaatgggcactttggattagaggtggtaatgagct

SEQ ID NO: 19129 - DNA, 2682 bp, Zea Mays
tattgactttggtaatatgtatttagcttctcgaaccttaaatatatgttataaaaatatcagtgacaacctttacgaaacgaaggtagtagtttttgtacattttttagtaagacaaagtttaactttgatttttaaaagtcaaacattatttgaatttaaaacgtgtgtggaattgaaaaatcgatggctagctaatcaaattggtcaataaactagtcaacgtgatcaaactaaaaaaatgttgcactttattacttgagaaattttccagtagaaattttccagttgaaattttaaaagaataaatctaaataattaatgaagtgtttcttggcgcgcttaaacttctcgaaaatattgtgctttcggctttcgcgctctgtttatccgcgccaaaaaattcccccccccctaaagtgttggaaccaccctcccatgtttctcgatcacacctcctagaaatctcctccggttcttccacctccctgtagttctcgctctcctgccaccattctcttcgtgctcctgctccatatgccctcctttcagtctgctgcttgatgatccatcgcccagctgctggttgatccgtcgcccagctggtaacagatttcttcgtgggtgcagtagtaccataactgacccaccctctaatctttactccgacctacaagggaaagaagtaatgccaatgaaacacagaagactacaaagtctgaacttagaagctgagacacaggaaaacgtggaacaacatgaagatgtccaagatccacaaccagagctcaccattgggtttcctgagggagaagcgccaacaaggaataagtcattcaaaataatatggcaaaatggagttgttcgggaggtttttagaaatttccgaacagctgaattgtgggatctgaaaggaggaagagtactagttgaaactgacaagaatggcattcccaatcagtggtctgaatccattctctcgtcataccttggtgagcttgcacagaattcatcatttgcaccattacacattccgagatgggacaacaaattattcaaaggtccaaaggaacgcatcatcaaagatgttgagaaaaaatttatctatagtagtgagacaaaatggtctactcgagattggattcttaagacagtgaataaaaggtggagagactacaagtcagacttgaagaaacaatacttcaatccagataagaggtcttttgaccagattgaaaaggatgtccctgatggtgtgaatgaaaatcaatggagttttctgttaggcatatggtgcagtgaagcacatcagaaattatgccggacaaatgcggaatctggaaagaagcagaggcatccacacactagcggtaggaaaagccatgctagacttaagaaggagatggaagacaagaagaaaggaagcatcactaaaattgatctttgggacgagtctcataagaagaggaatgggaactatgtcaatcaaaatgtgcaaacacttatgggtaaggccttcgatgaattagagaacaggaggaaaggacaaggggacactttctactagtgattatgatgatgtgtttgagaatgtcataagaaaagacttgaacattcgtgggtactatgatgatacacattggagcaatgaaactgattcacatgttcaatcagaggagaacaaaatgattagaagggacctagagcttgctatttctgggtttaggaacattagagcattcctagaaaaaagtttccagaagaggaattgctaagcacaattctagctactggatctggaagcactacacaggttgatactaaagacaatgaaaatgtctcattgcaatatgataatgtagaacgatccagttatgagaaatcaccttcaccatacaatgaacagatttatactagagattataatattgccaaggtgggttgctctgatcattcagtaccaaatgacaacatagctttcagggaatcacaagttacaaggtctagtgacttgaaccaggaactcaacaatggatcactatctctagataaagaaatgtctgataaggaaactcaaagcaagcaacaacaacaaagcaaattgcaacagaataaacagaagactgtcttgttgtactcaacaaggaaaagaaaactaggccaagtttttgctgttggtaatcttatatctagagatactactcatgaaattggaggaactgtacttggggatggatattatgctgttgcggttcattatcttaacaatgttgaagatgaaagattacctcgaccacacggagatcttaaaactttggaggatgctgtgggcatgtgtgttgcttggcctcgcacacatcttaaaagggtgaagccaactactgagaagcgcacttgaatggttagaagactgaagatgcaactaatgaatgagcaagtgttatagtggagagtagttctaggatcaaaagttctagttgtcaatctacttgtttaattgtgttaggaacctcattttattcactcttgtatgtctaatctacctcaagaccacttcgtttggattgaaaatacttatgtattgttgcttacacatgaagcatttaattgatctgttatatatatgaaccttgtgtcttgtatatatatgtgctcaaattgagtgtttgtgtataagcaaaa

SEQ ID NO: 19130 - DNA, 3759 bp, Zea Mays
ggggaagagaggggacgaagagggagaaggaactgggacttgccgcccccgcctccgaattccccactcctccaccaccgccaccactcaccccttgctccgctcggcctcctgaatccggcgtcgtcaagcaaccccactccttctgccgttatcagaaccctaaccgatcaatccgtccgattcccagctgccggtttcgcgttgggagcgccggagcaggggaggggcggagggtcggatcggcagccgcaggagcattgagcgatggctgccgtgtaggatgcagctggactccgccggccgccgcctagctgctgctgttgttgctgaagttccgatgcttcagcaaccgcgatcttaataggagcggagggtggagtaccggtggagtgggccggacggctggttgatctccgtgagctccagcgcctacgcactgggaggtggggaggtgattgccggaggcgtatggaggaacctgggagggagggggattcccccgggccgccgtgggcgccaagtgagtcctcagctttccgggcgttcgttacggcggtgggggagcgggcggtggcgtcgccttcaggctcggacaatggggattccgtctgctcaagcaacctccgcgccgtcaggaagagaccttttgttgcaagattaaccacatatatcatccaaacttttgaaaaatgcaatcctgagtttaagtactcagagtcactaaaccccaagcgctttctcaccaatcccgcagttcctgttcacaaccatggtcttgacaatgcaaactctgatctcatattgtatgtcaacctggaactgcttaataaaaagtcaagccggaggtatgttgtccaagaaatgcttggccaaggtacctttggacaggttgcgaaatgctgggatgcagaaactaacagttatgttgcagtgaaggttataaagaatcagcctgccttttaccagcaggctatcatggaggtctctttattaagattgttaaatgagaaatttgatcctgatgatgaacatcacattgtccggatgctggattttttcctctaccaaaaccatttgtgtatagcctttgaaatgcttggtatgagctgttgaaaaggaatagtttaagaggtttgcaaatgaaatatgttcgaactttctcaagacagatactggatgccctgattatcatgaaagatgctggcattattcattgtgatctaaaaccagaaaacatccttatagctccaactgtaaaaacagcagttggagtgaaagtaattgattttggatcagtgtgcatggagggtaaaaccatttattcatatattcagagccgttattacaggtctccagaagtacttcttggttatccatatactactgccattgatatgtggtcattcggttgcatcgttgctgagctatatatagggctgcctttatttcctggtgcatcagaatatgatgttctttgccgtatgattgagattattggtgggcaaccaccagatgatctgctacgtgaggctaaaaacactgggaaattttttaagcatgttggaagtatctatcctagtagtgaggctcggaatggcgctagcagtgcatacagaattttaagtgaagatgagatcgaagcaagggactccaagaaaccgaaggttgggagatggtatttccctcgtggaaggcttgacagactcatatatacatacccctggaagaatttgagcgagggaaacttgccagagacagaaaaggctgattgcttggcattagttgatttcttgagaggacttgttgagtttgatcctaataagaggtggtcaccgctgcaggcctcgtatcatccattcatcactggtgaagccttcactggtccttacgagcctgttcaggagaccccacgaattcctgttggacgtgctgcagtagttgaccacaatccaggaggaggtcacttgctgggtgctggtctttctcctcaggttggaagcattaacagatgcttacgatttaacaacgctttgcaaccaaatatgcctttttcatatggaagcagttgtggcagttttgggagccatggtagctttaacgataatgctggctttagctatggaagctatgattttaacagtgtcgacatatataattcaccaatggatccttctgggtttaatttacgttcacaacttggaggatcgtttctcggatctagcccacatattcgacgaagacctcatctctcacatggtggtggcattcggttaagccctggtggtccagggcatatgtctcttggggccagtccatcacaatttacaccgccaaattcccagatgcaaatcccaacaggtcctaatggaaggtatggtgcctctccttcaagaggtggacatggctcttcgttgggaaaggttgctgttgtaggccaatacaataggaggaggaatcagggttatccacctatgccaatgccaccacatgaacacacatctcaactgatccaggggcaccaaggagatggtgtcagtactgctcgctttggtgcatatgcccaaggaaattctacctacctacataatgcactccctaattctagtcattatagttggagatcgcaaaggggatctggcagtggtttacctttggacccttcttctagccgtggttcttttccacccaccaattactatggctttcctttacactccgatgcgtcagcagatacattgccctccacctcatcagtatcagatccagccgattgggatctcaactctagtgacaagtcactcctgcaagaggaccgaacactgtcagctgggttaagtgatcttcgcttgatagacgcaagtggccaaacaaacagatctagcagattggctcctttccaaagtcatgatattttaagttcaaacccttcgactatgaatcaaagaaatggacacctatttcatgcatcatctctgggagagagtacacatactccaggtcatgtcacattggatggatacgaacacacaacttattctcagcgaagtttcccaatctatcgtgggcaaccatttcagcagtacaacaacatgacttccagttacatccgaccgatgagggctcatcacaatggtcagcctgtctggtctaattataggctgacagaacctccaccaactacaatgggtgacggaatgctctggggagggaggggtggccattcgtttgcagcgagcggactgccacctacacttaggaaagattttgggagaatcttttagtcctgaatccggaggaatgccgaatgccaccaaattgatggcatcagttgtttgcatctgcaattccgggttggattatttgctgggggtgcctactggtattgcaatttgttgtgttcctccgatgtctcccaggatgttcggttcaaatgattatatggtacgggatatgattacagtgctcgttctttgctatacctgcacgatctagtagaaaaatgtcagttgtgctacttgatgcgaatcttgctagttcgaggtttgggagagtttttctgtctcggttattgtcttcctttctctattctatttttgacagagggttaagttcctgaaccttaacatggctaagactgaagtgaaggccacgtggtcgtggtgacatgatttcgttttcgtgatacttgaggagccgactatctgtttttaagcatctttctgttgttgttttgctacaacaggttttctaagggcg

SEQ ID NO: 19131 - DNA, 2960 bp, Zea Mays
ctcaatcttccccttcgtttattgctcttctccggtccttctccgcaacccctggccctgtcaagcagacgcagggtgacaccaggcagcagcccacctccacgcgaacacgccgcaccacaccatcaccggcaccgcagcacggcagccagtcaccaggactccaggagtgatctttgatccccaccaggccgccacgctactgtcgcccttcccgcaccactcccaactcgtaaacgctgtgcgccaacgccgtcgcccttccggatccgtcgtccttccgccggcgccgtgatggacccaagcgattccaactccgccgcaggaggaaagacacaaaatgtttcagtaccgcctgttgaaggtgtagctggaggaggaactagctatggatgggtggatggaggtttgcggggtacaaatattggtgctggtgtgattgatcctacaaaagtacactcagatgatcttttgcacgtctggtctatgcccagcacagcaaatgttagccagcaagaagcgcctcggcctctagagaaagtcaaccttttggcagcaagaaatgaaagggaaagttttcaaattgctttacgcccaaaggtttcatgggcaacttcaggtattgcagggtctgtgcagatacaatgcaccgatctctgctcctcctcaggagacaggttagtcgttggtcagtccataactttgcgacgtgtggtgcctatcttaggtgtaccagatgcacttgttcctattgatccactcagtcctcaaataagtattcaaccaggggagacagctgcagtttgggtatcagtaaatgttccatgtgggcaaccgcctggtttatatgagggtgaaatattcattactgcagttaagacagaattagattccagaacagaatctctaccaaaatctgaaaagtgtaggctatacagagaattaagaagttgtcttgacctcactggacccagagactactcgtcaccagaggaaatggtacaaagactaacatcagcttctactgtactaaggagggtgttggataatccagcactccaggactgtcaagagaataatggatttggagacatgatggatgaagatgttataaacaatatttcagttcgcttgaagttaagccttactgtttgggacttcactctcccagtgacaccttctttacctgctgtttttggtatatctgaaactgtcattgaagatcgattctgtttggagcatggcactgaaggatggtatagtgcactggatcatcactttaggtggctcctccaatataggattagtccatttttctgcagatggggtgatagcatgcgcattctagcatacacatgcccttggcctgccgatcatccgaaggctaatgaatattactctgacccaagattagcagcatatgctgtaccctatgcacctatcctatcgtgtacggatgctgcaaaaaattccctgaggagagaggttgaaatcttaaaatcgaagcctcattggtccaaagcttacttctatttgtgggatgagccattaaatgtggaacagtatgacatgatatgcaacatctctaatgagctacggtcatatgcacctgatgtgcgaattttgacaacttactattgtggtccaagtggctctgaactggctccctctacatttgaagcttttgcaaaagttccaaatgttctgcgtccgcacacgcaaatcttttgcacaagtgaatgggttcttggcacaagagaagacctagtgaaggatattgttgctgaattacggcctgatcttggtgaggagtggtggacatatgtttgtatgggtccttctgatcctcaaccaaactggcaccttgggatgcgtggaacccagcaccgggcagtgatgtggcgagtgtggaaggaaggtgggacaggatttctttattggggttccaactgctatgagaaggctatgatcccaagtgctgagatctgtttccgacgcggccttcctcctggcgacggtgtcctgttttaccctggtgaagtgttttcttcgtcacatgaaccagttgcttccacccggctagagcgcattctcagtggcatgcaggacatcgaatacctgaagctttattcttcacggtatgggagggaggaaggcctggcccttatagagaagactggcatgtaccttggaccggatcgatatacgctggatcatggaccggtagatgtgatgaggggtgaggtgtaccgcacctgcaggtcttagtgtagcaatgcctgccagatgctgtccttccagtctagggcgtctgttgtattatatatggtggtatgtgatctatgtagcgaattaatctacccttggtgatcgatcagatcatcaaacctggactaaactagtcctggtgcatcttttgaatctggctcgagagttgcatcaagtcgggagaaaaaaaacccaagagatctggccaagagatggagcgacccaggtccggctctggtacaaggcccagttagctaccggaagtgggccctatctgctgcaacaggattgagacgagattggcattgtcctctcgattccatgacgctgtgcccgcatacagctgaagctgaaatattctcctattagctgttaccttccatttcctttctgcgatttgcaccgcaggttacaccctccaaaggcgcattcgtttctaccgtgtgccgtgacgaggattcccgtctcagcaacggacgctgccgccgcgatgccctgtctctttcgaggtcggtagcgccatggcctaacgcggagctgtgtttggttggaagggaataatgcatgcgatgcatggtgaggaaggatgagtctatcccgagctctgtttggtccagagacatgaaaattaggtccagactgttaagtaaccctagttagggttatgtgggcaaatacctgctttgtccctg

SEQ ID NO: 19132 - DNA, 200 bp, Zea Mays
cagcaggttcctcgaccaactttgcattgggaactctcgcttgtttctcgacactggagcactgacaaggtacacatgaagtttattaagctctatgtgatgtgaaccacctcagattccagtcccgtgagtagttgattaaaccaaacttgctgcgttaaccaacggttaccatttgacagggataaataatctccgcg

SEQ ID NO: 19133 - DNA, 1332 bp, Zea Mays
tggccatctctagcacagcccggccggcgtcgttcatctgtgtttggtagtacggtcgttccgacggtcggatgctcacaagagaaaagagatgctgtgtgcaagctgcagagactggcgtccgacccgatcccactcccacggtcccacctcgcctctcgcgctcctgcccacccagcctgtccgccgtctggtgtccgcctgttccccaaaagcaaagagaggcgcagagccgccgccgttgatctctgacctttccgatccagagcctagctctcaccgtctaccggagctctcaccatggcggtgagctcgcggtttccctcccaacccgcggcgcgtggcctcctgcgccgcaccccgcagcgcatcctccccgtcgagcgcacgccgcgccgcctcgccctggtcgtcaccgccgtctctgggggacctgtacctggcggatcgcccgttcccaggcggccgccaccgccggaggacgccgcgaccgtggcaccgacctcagtgccgtcgtcggccgcctcggccatcgatttcctcaccctgtgtcaccgcctcaagctattgttggtgacattaccccatcggatggtatacctaaggctgaaaaaagccggcgcgaacaagcagcactagatgaaatgtgccaagttcttggtggtgggccagctgctgatgagattaaagagttgtgggaagaatatgagaacaattcttctattgaagccaatcttgtaaaagattttgataaagtggaaatgattcttcaggcattggaatatgagaaagaacatggcaaagtgctagatgagttctttctctccactgccggcaagttccagacagagatcggtaagagctgggccgctgaagtaaactcgaggagaaaggagggatgcggaaagcaggagccttcatcaaacttccacggaaacgtgttgtgatggggacggtgtggccaactagagcctggcaagtttaagtggccctggagccaacttcagcggtgggctgatggcagttcaccgattgacacggctgttcagccttcctaaataataacaggagggttatggagtgaacactagattttagtctggttagctgaaatgttcgtagttgctcgaagaccaaggggtaggtaaaactgtgtagtgtttcgttgtagcctggaatccagcgaggatgagatacttcttcttttttcaactccgtgaataatgaaagggcaatggtgtttgcccttctcatcttccctgcccatttttattgggcaaaatctatgcacacagttacttagggcctgtttggaagcaccggtttttaaaa

SEQ ID NO: 19134 - DNA, 7565 bp, Zea Mays
ctccactccacataagagcgaggccccagtcgcggaggaggctttacgaatcccaaaaagcaaacacacacaaacccaggagatagcaccccgcgctcgcgctcgcgcccgcgccacgacgcgagagcgcgcgaggcgtggagccctaaatcccggaagcttccgaggccgctcgccgggggcgggagagggagctcgccgccggtgacggagccctcgccgccgtagatctcccgatctgagacgccgcttctcaattccctacaggtttttcggtgccggcgacggagatgactgtggagagccccggggagctaggcttctgaagcgcaccgtggggcacagcttggcggacgacggcccccgacagccaactaggttttccatgggagatgggggtgtcgcgtgcgccgtccgcgcagtcgagggcttccatgccggcgccctcgtgaggagaggaggagcgggagaagcgatgccggataagggggagaaggctcatggacaccaccaccagcagcagcactggaagaaccagcagtcagcgtcagctactgacctggaggagggggagctgctcagtggggaggcggagaccaatgggttgcctgagaggagcatgccacctaagaagtggaggaaggtgctggcagcctccgcagctgctgtggaggtggagcctggggagattgtgagtacgaagcaagcagtgccattgaagaaagcaaggagaaatggggaggttgacaaggtagagctgctgccggagaggcagaggaaggtaaaatcttctgggaagagcaccaggaagtctatcaaggatgacatggagccaggggagattgcaccgccagaaaaaaggcgagatgccaagtcccaacgggctgatgataacagcaggaggccaagttcatctgcccagaaaagctccttgcgggattctgatgaagagcctggtgaaattaagccagagagcagcaccagtggcagtctaaggaagaaccagccaacagagccccacagcattaaccacaagcaccacactgacacctctgaccagtcaggatcaaaaagtcataggaagggtccgaagggagaagggaagagatctgctgccaggcatttgtctgggagaaaccgtgagatatcatcaccaacacgggatcggcgtgatcggcacgagaggagcccaggcatcttgggtcgttttcctcatgagcgctctcgtcatgacaggtatgacaggagcccgagccgcttagagcgttccccacatcgagagcgtgctcgccactacgaaagcagagaccacagcccatatgtttcacctcgacatagagctcgtcagccccatttcagggataacacgccaagtcgtgttgataatttccctcgtgggagagtccagcgtgaggatgtcagagaccgtagcccatttcttcacgacagatcgccttctgaacgttttcggcctactgatactcatgaagcaagcaagaagagcagaagtggcaacaactcagaaaagtcacagcacaaaagcaaatcagcgaagcaatcttcaaagaccaagagtggtagcaatgagaagaatgagaaaatctccaatgaaaagcccactgaaagcagtaagtacactgaactgccaccgccacctccactaccgctgccaccaccgccgcctccaccacctccacctccacctctgccacctgctgtaccgcctcccctgcctccaccaccagaacctgagccaactggagttctagccgaagatatgatagaagacatggatatctgtgacaccccacctcacactagtgcagcacctgaacccacggatccaatttatgatatagggaggtggttttaccttgatcacttcggtatcgagcaaggaccttccaagcttgctgtattgaagaagctggtggaagatggatatcttctttctgaccatttgataaaacatgctgatagcaaccgatgggtgactgtagagaatgcagcttcaccactggtgccatctgatttcccctctttttattcggacacttcaacacagatggttaacccaccagaagcaccaggaaatttgctcgatgaagctctagaggaggcttctaacttggcatcaggttctgaggataaacaaatggtggaagcttctgcagaagatagtgaagaattctatattaatgatagggttgaagcactgatggatggatcaattttggtgcatggccaggagctcgagatcattggagagcttttaggtgcagattttcagcctgctgattggcaaagattgagtcaccctgaagattttactaggttccatgtgcacatcgaaggagacgatgaaatcattggaggcacagaattcttagaaaatagaacaacagatgcttatggccttgtttctgtggacaacttccatcattatgtcgagtctagcgaatggttttctgggagatggtcttgcaaaggtggtgactggaggagaaatgacgaattgggccaagatactccattcaggaaaaaacttgttctcaatgaagggtatcctctatgtcagataccaaaaggtagctatgaggatccacgccggccctgcaaggatgagttgtactaccctgtacgtggtaaaaagcatgacttgccattgtgggcattctcatcgacagaagaagatattgacggtgttaatgacaccactaaaaacactgttgtgcctgggaggccaggtcagaccagacagcctcctagcgaagtgaaggtgatgcttcaagtggttagtataaattatcatgttattaaagaccaatcatctgtcgaaccccgtacaaaacccagaggaactgatcgaccaccgtcgagatcttcacgctcccattcaattggggctgagagaagttctatccatgatggttcgtcgcatttcaggaagcaccatgaccatgattcacaaagttttcacaagtccaagtctgttccaaacattccgaaggaccatgtatgcactgttgatgagctgtcagttaatcggggtgactggtactaccttgatggcactgggcatgatcaaggcccattttcttattccgaattgcaagaattagttaaaaaggacactatcattgaacaaagtagcgtgttccgtaagatcgataacacatggtttccagttcttaaggatttaaaacctggaagctctgttcccagtgcagcaccaagctcaaacttaattgctgcttttacgcacccagaccaatataattttggtgtgaaccaaggatcaagtagcttccatgagttacacccccagttcgcgggttatacacgtggcaaattacatgaactagtcatgaaatatttcaagagcagggaacttactttagctataaatgaggtcttggatccatggatttcagcaaagcaaccaaaaaaagagtttgaagcatacttttctcacaattcagcatctaggaatttcctgccagaagatggtgggtctgcaaaaagggcaagattgctacctgaccagagtgacgaaaatattcatttgtcagaagacattattgctagtcggaaggaggacatctgttttgaagagttatgtgatggagcatcgtctgttgataatgattctgtgaatcccagagcaggaaatgcaagctggggtctactaaatgaccatctgttagcaagaatctttcattttatgagggcagatttgaaatcacttatttcttctgcagctacctgtaagagctggaatgctgctgcgaagtattacagaaacatgtgtagattcattgatctgtcttctgttggtcctctttgcactgattcagtgttttgtgatattatggctggctttgagaagcaaaatattaggactcttattttagctggttgttcgaaccttagttcacatgcccttggcagagtacttgaacaccttccacaaatatcttatgttcatattcaaggttgcagtcatctaggggatctgaaaaataaatttcagcatgtaaaatggatcaggagctcattgaatccagaggggtcatatcggaaaatgaaaaccttgaagcagataggtgatgggaacaactatgcatccaaagttgcaaggaacttcgaccagctagatgattctgatgagcttgatggttattttgctgatatttcaaaaatcgagggtgctagccttttttcatttggacaaggtttctataaacgatcgaaattgcttgatgctagaaagtcctccgcggttttgtcgagggatgcagaaatgaggcgtttgatgcagagacaggcagagaacagttacaggaagatggaagagtttgtcataaacaggctgagagaaattatgaggtgtaacagatttgattttttcattccaaaggtttccaagatcgaaggtaggttgaaaaatgggtattatgctcgccatggttttcgtaccatcaagcatgacatccgtaccatgtgccaagatgcattgagatataaagatggcaatgatttggatgatgtaaagcaaattgttgtctccttcatacaactagcaaagagactagggaacccaaggtacatttctgagagaaacggagcagcagcccaggacagcctggacattagtcaatattcattcgatactaaactcaaaaagaagcaaaacaaaacaagagcaaatttggtggctgctggagcagataattcatctcgcgcatttgaccttgaaatcaaaagaagcctgtctaaattaaagaaaaaggatgtctgctctggtagtgaaacatctgatgatgatggctactctgaaggtgatgaaactgagagtgaaactactgtttctgatactgagagtgactttgatgtaaattctggagcctgggatttaaaaggaaattgcctaaagttaactgaacatggggagtctgtgatcgatgatcgtatattaggtgcccgcatgacaaaggccagccttgttcctccagttactaggaagtatgaagttattgaggagtaccttattgtagcagatgtggaggaagtacaacgaaaaatgagagtttctttacctgatgactattctgagaagttgctttcacagaagaatggcaccgaaaatttggagcttccagaggttaaggattatcaaccccgaaaagtagcaggggatgaaattcttgagcaagaagtatatggcatagatccatatacacacaatctactgagtgacattatgccttctgatcttgagttgtcacctactgacaagcatatctttattgaggagttgcttctgaatgcattgaataagcaagttaggcatttcactggtttgggaaatacccctatgacttacaacattaggcctgtcattgaagaaattcaaaggtctgcggaggatagtggtgacagacgaactttgaagatgtgcttggggatgctaaagtccatgagaaatcgctctgatcagaactttgttgcttatagaaagggtcttggtgttgtttgcaacaaaaaaggtggatttggtgtagatgactttgttgttgaattctttggggaggtctacccttcttggagatggtatgaaaagcaagatggtattaaacatatacaaaataacagtgaagatcaagctcctgagttttacaacattatgttagaaaggccaaagggagaccgacatggatatgacttggtttttgttgatgcgatgcacaaggccaactacgcgagtagaatctgccactcctgcaaccctaactgcgaagcaaaagtgacagcagtggatggtaaataccagattggagtttacacacttcgaccaattgcagaaggcgaggaaatcacttttgattacaattctgtaactgagagcaaagaagaacatgaagcatcagtctgcctctgtggaagtcaagtatgccgcggcagctatttgaatttttctggtgaaggagcctttgagaaggtattaatggaatttcatggtgtgctcgataggcatagcctactgctacaggcttgtgaaacagactctgtctcccagcaagacttgattgacttgggtagagctggtcttggtacctgtttgcttgctggtttgcctgtatggcttgttgcttacacagctcacctggtacggtttatataccttgagaggcagaagctccctgatgagatcttaaggcacaatgtggatgagaagcgacagttccttatagaaataaacatggattctgagaagaatgatgctgaggttcaggcagagggagtactaaattcaagattacagcaaatagtgcatacacttgacaaggtgagatatgttatgagatgcatatttggagacccaaagaatgctcctcctcctatggtaaggttgtctgggaaaagtttggtctctgccatctggaaaggggacagttcgatagttgctgaacttcttcagtcgatggaacctcatgttgaagaagaggtacttagtgatctgaaggccaaaatctgtgctcatgacccatcagattctgaagatattgagggaggcatccgtaattctctcttgtggctgcgtgatgaattacgaactcttccatgcacttacaagtgccgtcatgatgctgctgcagatttgatccatttgtatgcttatacaaagtgctttttccgagtccgggattacaagacagtaaaatctccaccagttcatatcagtccgcttgacttaggccccaaatatgccgataaactgggaccaggctttcaggagtactgcaagacatacccagaaaattactgcttagcccagcttatctattggtatagccagaattcagaacctgaatctagattgacaagagctagaaaaggttgcatgtcattgcccgatgtctcgtccttctatgtgaagtctctaaaaccattgcaagagcgagtttatgggaacagaactgtgagattcatgttatcacgcatggaaaaacaggcacagagaccatggccaaaggataggatatgggtgttcaagagtgatccgagatactttggcagtccaatgatggatgccgtgttgaataattccccccttgacaaggagatggtgcattggctcaagacgagaccaaacgttttcctaggctagaaaaaaaatgattgtaggcagataagatggtatttggttgtttctcccttttggagattttagtctgcaggattttttttttccaggctcacaccttggctacctgatcacagggagtttagcttatagatagcagggtaacagtcaccaccccccatctgtacattccccagtccctacataccttgcggagatgtatctggttagtaaatgatagatttgtcattgatttaatgtagtgaattttcccataggaatgcccccccccctcttttgtttcatgtaaatgcagaacaatttcaatcttgaattcagtaatgtgttacaggcattttgcatttctatggttcagttgggttgtttcagtcaataaaatggttttaagggctcaata

SEQ ID NO: 19135 - DNA, 2716 bp, Zea Mays
agatgcatgcaatggaattctgcgtggattggctgggcaggcgtcaacgtaccggacgaggttggtcagcgagccctcactaaagctcttgcggagaagagatgcataccagtgttcctggacgaggagattgtgcaccagtactacaatggatactgcaacaacatcctgtggccactgttccactacctaggactaccacaggaggacaggctggcaacaacgaggaactttgagtcacagttcgacgcgtacaagcgtgctaaccagatgttcgctgatgtcgtgtacgagcactaccaggacggggatgtgatctggtgccatgactaccacctcatgtttctgcccaagtgcctcaaggaccatgacatcaatatgaaggtcgggtggttcctgcacacgccgttcccgtcatcagagatttaccggacactgccgtcccgcttggagctgcttcggtcggtgctgtgtgccgatttagttggatttcatacttacgactatgcgaggcattttgtgagtgcttgcactagaatacttggacttgagggtacccctgagggcgttgaagatcaaggaaggctaaccagggttgcagcgactctgatcgtttcaagcgagcattggagcttccagcagtgaaaaggcacgtcagtgaattgacagaacgttttgccggtcgaaaggtaatgcttggtgttgaccgacttgacatgattaagggaattccgcaaaagattttggcctttgaaaagtttcttgaggaaaacccagactggaacaacaaagttgttctactgcagattgctgtgccaacaagaactgacgtccctgaatatcaaaagctaacgagccaagtgcatgaaattgttgggcgcataaacggtcgatttggaacgttgactgctgtccctattcatcatctggaccgatctcttgatttccatgccttgtgtgctctttatgcagtcactgatgttgctcttgtaacatcactgagagatgggatgaaccttgtgagctatgaatatgttgcatgccaagggtctaagaaaggagttctgatacttagcgaggtagctgatcgattatgcatgacttataatcaaggggtggaggatgttttgtttatttacttgtttttgctatcactgcaatttcagtttgctggggcagcacaatcacttggagctggtgccattctagtaaacccttggaatattacagaagttgcagactcaatacggcatgctttaacgatgccatccgatgagagagagaaacgacacagacacaactacgcacatgtcacaactcacacggctcaagattgggctgaaacttttgtatttgagctaaatgacacggttgctgaagcactactgaggacaagacaagttcctcctggtcttcctagtcaaatggcaattcagcaatatttgcgctctaaaaatcgtctgctcatattgggtttcaattcgacattgactgagccagtcgaatcctctgggagaaggggtggtgaccaaatcaaggaaatggaactcaagttgcatcctgacttaaagggtcctctgagagccctctgtgaggatgagcgcactacagttattgttcttagcggcagtgacaggagtgttcttgatgaaaattttggagaatttaaaatgtggttggcggcagagcatgggatgtttttacgcccgacttacggagaatggatgacaacaatgcctgagcatctgaacatggattgggttgacagcgtaaagcatgtttttgaatactttacagaaagaaccccaagatcccatttcgaacatcgtgaaacatcatttgtgtggaactataagtatgctgatgttgagttcggaaggctacaagcaagagatatgctgcagcacttgtggacaggtccgatctcaaatgcagctgttgatgttgttcaagggagtcgatcagttgaagttcggtctgttggagttaccaagggtgctgcaattgatcgtattttaggggagatagttcacagcgaaaacatgattactccaattgactatgtcctgtgcatagggcatttccttgggaaggatgaggacatctacgtcttctttgatcccgagtacccttctgaatccaaagtaaagccagagggcggctcagcatcacttgaccggaggccgaacgggaggccaccatcgaatggcaggagtaactccaggaacccacagtccaggacacagaaggcgcagcaggctgcatccgagaggtcatcctcatcaagtcacagcagcacgagcagcaaccacgactggcgcgaagggtcctcggtccttgatctcaagggcgagaactacttctcctgcgccgtcgggaggaagcggtccaacgcccgctacctgctgagctcgtcggaggaggttgtctccttcctcaaagagttggcgacagcgacagctggcttccaggccacctgtgctgactacatgcatgttcttggataggcagtaaatagactgaagttgaagcctccgtgctttaccagagacagagagaagaagaatattcattcctcgtatgcgcgacagagctacacccgtagctagtcagcgtgctgtacaatcatgtacaaaatttatgctcgtgataaaactgcgagaggggagctagcaaatgggaaaggataaaggagtttagttgcttctggtacgag

SEQ ID NO: 19136 - DNA, 2638 bp, Zea Mays
gccgagttgccgacgcaccgaaaaaagacagctgacgcgaatgcccaaacgttcggggggcgagcgggatttggaagctgcgcaacgcgcttcccaaatcccccaatcccgacgcccacccgaccccgtcgccagatctcgcgcctcgtccccggggctcgatcggataagcggcggtcggcgattcggggacggggtcatctcgcctaggcttgggcggggctgggctggtgggagccgccgagccggggagccatggcgtcggcgcaggcgccgtcctccgccgctgcgccgtcgcgcaaggaccatctcgaggccgggaagaagcggctcgagcagttccgcaagaagaaagcggcgaagaaggccactgcagctagtgcagagcaggcaaaagcgcctgcgcctgatgtagtggagaacccacctccaattgtcaatgctggtagcttgggagatggactggtgtctgatgtagacccaaaccaagcgagcacgtcttcggtaccattgtccgtatatgagaatggcccagccagtgcatccaggggtgcagaattcatgtcaaatggtcatcagcaagatgctgttagtgatggaggacgtaagttctatgggaacttgagcttctctgaccttgttaatggtcatcatgagaattggagaggcgacggagcccgtaaaaaggacgagcacagcccttacaaggatgtggaatcaaaatcaaaattaagtgcctttgggaatggcagcagtttaaatttaccttctactgaaaacatgccgagttggggaagaaattctttatcaagtcaagtacatgatactgaacaatctagttcatattcatccagcaccctttttggaaagtccaaaaatgcctatgctcaggattactccacaaacagtgatatctttggtcgtttgagagctacctccgaagactcttccaaagtggagcaatctatgtatgccagcactcgagattatggcaatgccttcaatagttcaatgattgccggtactgtagatcatgatacaaatgttggaataactcggacatctgcagattccacacctgttaattctgaaagacaggatccttttctgtcatctggttatccaactacatacactcgatcaaggccatcatttcttgatatgattggagtgcaaagagcccccctaacaactgaagcctcatatagggagcctgcaaaggctaatcaactatccagctattcaaattatcagagttcatttttgcagcaatcaaatcaacaatccactggaagtaatgctgcagatattccttttgcatcagaaagtcaggaatatagtcatgaaaaggggtcatatggcagctccactcctcctgatttcttacttcccaaagaagaaagaagtaaacaccatggtaatcaaacattccaaaacttcacaactcatgggaaggatgatgattttgcagcactagagcagctcattgaagatttgacaaaagagaagttttctttgcaacaaagtcttcagaaatctcaagaactagccgaaactttggcgacagataactctgcattaactgataagttcaaccaacaggcacatgtaatcagccagttgacatctgacatggagagattgcaggaagagattcaagctcaactgctggcgctggagtctatcaggaccgaatatgctaatgcacaactagaatgcagtgctgcagatgagagggcaaaagtacttgcagctgaagtcattctactagaagataagggtttgaggctgaggtcaagtgagctaaaacttgaaaaggaagttgaaggtttacattctgagatttcttcttacaggcgcaaagtttctagtctagaaaaggagcgtcagcatcttcaatctactgtcaaagctcttcaagaagaaaagaagctattgaggaacattcccgtgaatgagaaggcaacaactactgtagagaaaccttgggttgataaaagagacgcatcaactgcgacagaagatttagatattggggaaaacagctcttcagaaacgctaaccagcactgttgacacattggaagatgctggaatatctgttttgcgttccaacattatgtctgatttttcttccttagaagaggtctcatctagcattccagatgatcagcttagaatgattgacaacatcaattctttgatgtcagagttagtagtggagagagaagcgctgctgcgagcactgagaattgagtcatccaactgctccaagctgaaggagttgaataaggacctaacacaaaagctggagattcagacacagaggcttgaactattgacttctcaaaggatggctaacgagaatgccctggcaaaaccaattgacacacgctccatcaatgatgcaacaatgtatgcagatgaaggagatgaggttgttgaacgggtgcttggctggataatgaagctcttcccaggagggccaaagcggcgaaccagcaaacttctataatgtaattccctggagtatggtgcgggcggcagcctgttttggcaaggaaaagaatagtcgcaaagaatagacccttttgtatccattgaagtatggaacaatttctttcattatacgagtcgaa

SEQ ID NO: 19137 - DNA, 1197 bp, Zea Mays
ttttattcaacagccaggagatatggaatggcccttactcaaatgacagctttccagagtacgccgaggacattgaagctggcggagatgcagccccttcattttcaatgctgtcagagatggccagctgaagggtaaacatagaaagatccatcttttcgacattgacattccaggaaagatcactttcaaggaatcaaagactcttactgctgggcagagccctactgttgtagacacagatgttgggcgcattggtattggtatatgctatgacatccgtttccaggaactagcaatgttatatgctgcaagaggtgctcatttgttgtgctatcctggtgcattcaacatgactactggaccactgcattgggagttgctgcaaagggcgagggctgcagacaatcagctgtttgttgcaacatgcgctccagctcgagataccagtgcaggctatgttgcttggggacactccactcttgttggacctttcggagaggtgattgctacaacggagcatgaggaggcgaccataatagcagatattgactactcactgattgagcagaggaggcaatttcttcctgtgcaacaccagcggcgtggcgatctctatcagctggtagatgtccagagactgggttctcagtagcgagcctggatgcggctgtgtgcccgctctgcaggcttgctcgtactacttcgttcatgagatgcatgtctatgggttctagagatcgaccaacatgatgagtgaaggcggagaggacgcaataaggcgactgtagttgtaccttcagtggtgtctccagttgccaaataaattggttactttaacgtctgaagaaaacctccctccatgggacgaagataaaacggaggactgcgacttccctttgggcccgactagtttgaagtttgtactagcttcgggggtgtctgggagtcaagttttttttcacagttttggtagaatactgtagtattctcgaatactacggtattatatacaaaatgttgtttggcaatctagataaaatctatgtttttaaaactgaagtattgcaaataccttagggcatgtttggaaatgcggttttgaaatactgtagttttgagataccatagtttataattgtacatgacataaatactacggtattgctttaccacagtaaaactacagtattgctc

SEQ ID NO: 19138 - DNA, 1246 bp, Zea Mays
aagtcatagactttcaaaatatcaatgataactgtcagtatgttcctgttgccatacatggtatggtcttcaatatcgtaacgattgattatggttgtttgccaatctcaagggaattctacaccgtgattcctcatgactttggtttcagaaagatgcgtgaatttattatcgatactcctcagaaactaaaagctaagctggagatggttgaagcccttggtgagattgaaattgcaactaaacttttggaggatgattcaagtgaccaggatgatccgttgtatgctcgatacaagcaacttcattgtgatttcacacctcttgaagctgattcagatgagtactctatgataaaatcatatttgagaaatacacatggaaaaacacactctggttatacggtggacatagtgcaaatatttaaggtttcaaggcatggtgaaacagagcgatttcaaaaatttgctagtacaagaaataggatgcttttgtggcatggttctcggttgagcaactgggctgggatcctttctcagggtctgcgaatcgctcctcctgaagcacctgttactggttacatgtttggcaagggtgtttactttgctgacatgttttcaaagagtgcaaactattgctacgcctctgaagcatgtagatctggagtactgcttttatgtgaggttgcattgggcgatatgaatgagctactgaatgcagattacgatgctaataacctgcccaaaggaaaattaagtaccaagggagttggtcaaacagcacctaacatggtcgagtctaaggtcgctgacgatggtgttgttgttccccttggcgaacccaaacaggaaccttccaaaaggggtggcttgctttataatgagtacatagtgtacaacgtagaccagataagaatgcggtatgtcttacatgttaacttcaatttcaagagacggtagatgttgcaaagagctgaaactgttgctgagatcttagcagaacatatgtggacttatagcaccaggtgccctcagcctcattttctgagcaaatttggtagcctttgcatttcgattttggtttcaggcttctagccccattgatgattgatactgagtgtatatatgaaccattgatatccaccttccatgtacttaagtttttttaacatgtcccatgcatataaatctgatgaagcatatagcactaatacgattctaacttgagaatgtattttgtgcacaag

SEQ ID NO: 19139 - DNA, 368 bp, Zea Mays
cctccgccagagctcgaatgtggccatcccctggcggattgggcgaggaggaacggcgcaagagcaggccttgacggacggaggcggagcacagagcgatcgcgacgggggagggaaaggaggagagggactgcgggagaggcggaggaggagggaattcgaaatctggcttcttatatacggacggagacggagacggaggtgggagaagagggattatataggacggatcggatcctgttcattctcttccgcatgtcggtgccagttattgattctacccctccagattgccatttggttattggcatacaactgtcagctgtacaaggacgaccgcacacatctcatctcatctcctcccctcc

SEQ ID NO: 19140 - DNA, 3231 bp, Zea Mays
cacaagtgcggtgccataagtgacagccacctcagtctctgtctgtggagctctctctcgcgcgcgttgccatctcgcaggttcttcatctcgtcgctctgttcaggcgcaggcggcgacaggagatggacggggagcaggcggcgcggtgggcggcggcgcaggagggggttcccgtcggggcggaccttgtcgcggcggcgctgcggcagctgcgcttcctcgcggcggtggaccgccgccggtggctctacgacgagggcccgctgctcgaccgggccatacgcaggtacaaagcatgctggcttccgcttcttgacaagcacactaagggtgtggttgtagatggtccattggttgttcctcttgattgtgagtggatatggcactgccatcgccttaacccggttcagtacataagggactgcaagaaagtgtatggcagaatactgaacaataacaacgttgagtcgtccactcaaacaaagtcgacacttgagtcagaaaaagtttggaaagagctgtatcctgaggagcccttcgaattgttgttcacaagaacctttgacactgccgtggatgtcaaccctgcaggtgcagaggaggacattacctatgatctggtctcggctgttaagagacaatcctctttctattatcaggttggaacaccaacaatgcatgatccacggtttctccaagaagctctagctcgatacaaggcgtttctttacctgatcaagatgaatcaagaaaaaggattgcagcgcttccgtgtaccaacctatgatgtggatctgttgtggcacactcaccagctgcatcctattacctaccgcaacgacatggtgaagcttcttggaaaagttctggagcatgatgacaccgatgctgatcgatctgaagggaagaaactcgatgttggatttaccgagactactgaacagttcgagagtacctttggtgtaagatactggaaggctggatgtatgtaccgtggcaacgtgccatctcctgtgacatccactcctcagacattcagtgctgaggttggtactgggtcttacatctgcaaagcccagaaagatcttaatgcccttgatgtaacagttgtagagttatatttacaaattgtagacatcaagaatttaccatctgctgttcaaaaagaaaatgtgtatgtacggttcgccaagaatcaatcagatatgttcatcagtgacggcggcaggttggatatctcaacagttacagggaagaacaccggagtttgtttacagtgtgaacctaccggagaactcattcttgcagtaatggttgatcaattatcaaagaaaccagaaccgatagggaaggtttctttcccactgcacgatttgacagggcctgattctaagctctccttcgagaagtggtttgaactgaaagctcatggtgggcatgccgcttcacctcctgttagtcttcgtgttgcagcttctgctactgtcccaagcagcgctcagaaggtgttcaccatggtcaggatggagccattctctctcaagtcatgtcttttgccacattccatcaaggatcagaacacgggcagctggactcgtttcgtaaatgattgtggtaccgagcttatccgtctccagataagagagcacaaggcgaagaatagcatggccgtcgttcgagaattggttggagtattgaagtcaacaaaaaagcaaattcaacttgcagaattcaaggaaaacaagtggaccctaaaagactccaacttgccaataagtcatggcactgatggcagtctactcgatctcaaaggtgacaaccatctgatcaagctttatcggggaaggaaactggaatacgagcgcaaatgttgcagcgctcactctgaggacgtatcagctgttactgctgtaaagttctgtgctgaacatccatatggcaaagccgttgccttgctagacactgaagctcagcttatcatggtgaacgaggattggctcctacttccatggatctccatatcagtcctgtttatggacggcgatggcggtacgaaacttggcggcggtgccatggttcagaaaggtacagtgtttggatccgacactagcatggtgctagagacacagaccgtcggagcagggagcgtggcatccaatctagcacaatgtggcacttgcagcgccgtgttcggtggtgatgataaagaaatggcgaactgcaaggttgagcatgcgagctctggcgcttctcgcacggttgttgcaagtggtgagaatgggcacactgagactgctggctgtggaggcggctgtggtagcaattgtggacccatgatggctgaagaccccaaggccggcaatgccaagtccggaggctgtggttcggggtgtggtggtggctgcggtggcgcgggaggttgtgggaccatggccaacgaaggccaatccaggtccggaggtgttggcaccttgttgagctccaacgccatgggtggtgagggccagcaggcccattcagctggctgtggctccggctgtggtggtggctgcggcagcggcatggtcatcgaaggctccaaggccaacaacgccatgtccggcggctgtggctccggttgcggtggtggttgcggtgccctgttcaacgctagcactgctgccggagagggcctgcacaataagtcggctgggtgcggcggcggcgggtgcggctccgggtgcggcggtggcggcggctgtggtagcggcatggctatcgaaggcttcaaggccaaccacgccaagtctggtggctgcggctctggctgcggtggtggctgtggcactggcagcatggtcgctgaaggctccaacggcgggaacgccaagtccggcggctgtggcggcggttgcggtggcggaggtggctgcggcggcggaggctgtggcgggggttgcggcgccgtgttcaacgcatgatctcggtggagtggaggcatttgtgcagacatgcagtcgtcgtcgtctactgctagataccacatgctacagcatactgtgtattgctgtgcataatctactaaataaaaggaatgaataaacaatggatggatcggctgcctccgtggcgtttctgcaaacgaaaaatctcggtgttgttgggtgcagggatgaggatgaaaacgatttcaaacggtccgaaacgatatcgtctatttaacggttggttaagaaattacctgattta

SEQ ID NO: 19141 - DNA, 3101 bp, Zea Mays
gccaccggggccacggcctacgtcagcaacaaacacttatttttctcctccggccaccccgcccgcccaacctataggcgagaccggagagtgccatatcccgcgacgccgcagcatccgcttgactccactttatgcaagtgtgcctccggcgaggcctctcgctagttcggcagcacacctcccgcgtccttcccccactgtctctccaccctacccgcttcttccttcaccaatccgcgtccgacccgatgggtgagggttccgttcctggtaaggacgccaaggggaaggggaaggccaagcaccccgcccaggcttcggccctggtcgctcgcgacgactcctacctggaggccgtcacacataagaggattcgcttgttcgaggagatccaggcaaggcaggccgtcgagcggctgaatatcggcggcgaagttatcaagataactctgcctgatggtgcaatcaaagaagggaagaaatggataacaaccccaatggatattgctaaggagatatcaagtggatttgcagctagttgtttgatagctcaagtggacgaaacactctgggatatggggaggccactggaaggtgactgcaaattgcaaatgttcaagtttgataccaatgaaggccgtgacaccttctggcactcaagtgctcatattcttggagaatctcttgagagagcatatggctgcaagctgtgtattgggccttgcaccacaagaggggagggtttctactatgatgcttactacaatgagctgacattaaacgaggagcactttggtgtcattgaaaaccaagctaaaaaggctgttgcggaaaagcaaccatttgaacgcatcgaggtcagcagggcagaagctcttgaaatgtttgctgaaaataaattcaaggttgaaattattaatgagttgcccgaggacaagaccattacagtatacaggtgtggtcctttagttgacctatgccgtgggccacatatcccgaatacttccttcgtcaaagctttcgcttgtctgaaggcttcatcatcatattggagaggaaaagcagaccgtgaaagcctgcagagagtatatgggaatatctttccctgattctcgacgtctcacggaatataaacattttctagaggaagctaagaaacgtgatcataggatactagggaaatcacaggaactcttctttttccatgaacttagccctggaagctgtttcttccttccacatggtgctagaatatataacaaactgatgaactttatgcgaaaacagtacagagatagaggataccaagaggtgttgagcccaaatatttacaatatgcaactttgggaaacttccggacatgctgcaaactacaaggagaacatgtttgtttttgagattgagaaacaggaatttgggcttaagccaatgaattgtcctggccactgtctaatgtttgctaatagggtccggtcatacagagagttgcctcttcgcatggctgatttcggagtgcttcatagaaatgagcttagtggtgcacttactggtttgacacgggttagaagattccagcaggatgatgctcatatcttctgcagagaggaccaaatcaaggacgaggttaaggctgttttggaattcatcaattatgtttacgagatatttggcttcaaatatgagttggagttgtctacgagaccagagaagtatctaggtgaaattgaaacttggaacaaagcagaacaacaattgacagaagctttgaatgagtttgggaagccgtggaagattaatgaaggggatggtgctttctacggtccaaaaattgatattggtgtgtttgatgcccttaagaggaaatttcaatgtgcaaccttacagctggattttcagctgcccattcggttcaagctgacttattctgctgaggatgaagcaaaaattgaaaggcctgtgatgatacacagggcaatcctaggttctgttgaaaggatgtttgccattcttttggagcattacaatggcaaatggcccttatggctaagccctcgccaggccattgtttgttcagtatcttctggttcagtggaatatgcgaaacaggttcttgccatgctacatgaagctgatttccatgttgatattgatgtgagtgacaggacaatacaaaagaaggtacgggaagcccaggtagctcaattcaactacattcttgtcgtaggcgcacaggaggccgagactggaaatgtctgcgttagggtaagagataatgccgacctggccacaatgagcgttgatggcctcatcacacgtttgagggaggaaatcgtagccttcaaatgattttgatgctgcataatttcctagcacttcgcaatcattgactgttcatttgtgattttgattgagttttcagggaacagtactgagttcctccaaggctccaagtgtattcttgttggtacggttggaagctactaagggcatatttagaagcacctagtttttaataaactggtttataaaaactgagatggttccaaacatatcggtttatatcctagtttttaataatctggtttataaaaactggatttctagtttcttaaaaattaagaagctagtctctcttagctaaaaccaatttatgaaaattaaggtagttctaaacatcataaaccaatttttttcttcataatccagtttctacaaactagagataaaaactaggttgcttctaaatagggtctaaacattgtctttttttattaattatatagatgtgaagttaaatgctacctatagtaaaaagttcctagtaaatactacctgtagtgtcaaaacagcttgttgtatttgactttgcatggtcttaaacatatatattgaccactaaattcttttgtacaatcttaaaatgatgagatcatatgcaacttacatgttcttaaactgttttttttggaaatattgatgtttgtatagttttaaaggtttgatgttatataagattttcctgaccgggaggaacatattagttttatgttatataaatttctttgtttcttttatttagaagctatcgtgtaccccct

SEQ ID NO: 19142 - DNA, 1504 bp, Zea Mays
cttggctttgtccccaaattgcttactatcctgatttaattttatgtatcaagattcagattggtgttttgctggtaccatgtccagtccgtggagccctctgagtattgaggaagacgaagagatacaagagcttggtgccgaggagcagcaggttggtgagcagctgcggcagggtgatgggcagcagcaggagttgacagctgatgcaagagcacaagagaccggaatgaaacgtgcaagatcagtgtccagttcatctactaatccatcaaattctcgtaaatctgagggaaagataaaggttgaggaaaatgcaccaggagctgcaacaggagtgattttgtctcttcgtgaaagtttacaggactgtaaacaaagccttgcatcttgccaggtggaactggaagctgcaaaatcagaaatcgagaagtggcattcagcatttcagagcattccagctgtaccttctggtaccattccagatcctgtttcagtggtgtcttacctcagtaccctgaagtcatcagaggaatcattgaaggagcagctggagaaagcaaagaaaagggaggcagcttttatagtaacatttgcaaaacgagagcaggagattgcagaactgaagtctgcagttagagatttaaaaacacaattaaggccaccatcaatgcagacaaggagattattgcttgatccagcaattcatgaggaatttacacgtttaaagaatcttgtggaggagaaagagaaaaaaataaaggagctacaggacaatgttgctgctgtcaattttactccatccagcaaactggggaaaatgctaatggctaaatgtagaacattgcaagaggaaaatgaagagattgggacgatggcatcagaaggaaaaatccatgagcttggaatgaaaattgcagttctgaagtctcagaacaatgagctcaggaatcaatttgatgttttgtacaaacacatggatggtgtaacaaatgatgtggagagatcaaacgaactggtgtccatcctgcaagaggagttagaagctaaggatctagagctgactagattgaaggaggtgcttgcccagaaaggagctactcaggacgcaccggtggagaccagtgacgacgctggaaacggtcaggaggcagattcagatacactgcaagtgaaggcggaaagctaagggagtttaggctttgaagtgtgtttgttgggacttgtgggaaaagtaatatcatgttatgcggtctcatagcatgtctaggttattatatagtaggggaatcactgcacaaaaacatcggcaaacttttatctatgatcgtacatatggctttacaaaagattattttgcattgtagacaacactattatagtgtggattttgaaattagatatataataataatatagatgagtaagctgtgagtaagaaagcctcaaactgattcgctacagatttgcgctggctgaaccagtaatgatctccaacaattca

SEQ ID NO: 19143 - DNA, 2544 bp, Zea Mays
ggcgaggaaaggacggtcggacggactggacgtggacgggaataataaaaacggaacggaaacggcaacaagtaagccaggccaggcaacccacaacacaaggagaaggggaagggcggcgagggaagggctccgcgtcgtgtcccttctcttcctcctcctcctcctcctctctccaacaccccatccatcagcgctgccctccgcattgctcttgatcccatccagtacatcgattctccccccaagatcaaaggccggaggaggaagaaagggagtcggccatgggatgcttttcatgctgctgtgtggcagatgacgacaacgttggcaggaggaagaagcatgacgatccctatgttcctatccctgctcatgtttataattttggacctagccggttcccagccccaacccctgtcatctccactggcagagctcagccaattgcagtaccggccattcatctggaagagctgaaggaaattacaaaaaacttcagcagtgatgccctcattggcgagggctcgtatgccagagtctattttggtgtgctgaaagatgggacgaaatctgcagtgaagaagcttgactccagcaaacagcctgatcaagaattccttgtgcaggtttcagctgtctcaagattgaagcatgagaatgttgtccaactcgtcggatactgcgccgaagggagcacccgcgtccttgcttatgagtatgcaactaggggatcattgcatgatatcctccatggtaaaaagggtgtcaaaggagcccagccagggccagtcctgtcatggatgcagcgagctaggattgccgtatgtgctgctcggggtctcgagttcctccacgagaaggccgatcctcgagtggtccaccgcgacatcaagtcaagcaacatactgctctttgaccatgatgttgcgaagatcggggacttcgacatctcaaaccaggcccctgacatggctgcgcgcctccactctactcgcgttcttggcacctttggctaccatgcaccagaatatgccatgactggacagcttagcacgaagagtgatgtctacagctttggagttgtgctgctggagcttttaaccggtcgcaagccagttgaccacacactgccccgtggccagcagagccttgtgacatgggctacaccgaggcttagtgaagacaaggtgaggcaatgcgtcgatccaaggctcggagacgaataccctccaaaggctgtagccaagatggctgctgtggccgccctctgcgtgcaatacgagggtgaattccgtcccaacatgagcatcgtcgtcaaggctctgaaccccttgctgcacagccggtctggcaaccgccctactgcctcgtcggcctcccacgctgccgagcgatccggactgtgatttctcatcgctgcgacaactttgggttcacgaaaaaggaccgtcttgtggagcgttggtgttgctgtgtcgtgactgccaaagccttggcgcagagaagagctttgccatgcagctgtgtattgtaaattgttttgtaagcgatgcgcctcctggtttgtgtgccctgtcatcatcctattctattctagaaaatggtgtacgatggatcatggatgataccaactatttggtctcttttggaatgcgaaaatgcagcacttggcttcctatgtgtgtagatcagctttgttgttctattgctacaaaccaggaatactacagtatgaatattacaactactggcagccggcatatgtaacagagaagcatgcacaacagggcaggacaggaaccgctcctggactgttgtcctagtcctaattgtgattgaaccaaaattgaattctatttcgattattagctagctagcgtatctatggttcaaaatgttttctcagacagcagccacgagacgagcgcagcacctcgatctccaactagggaagctgcatatctatggttcaacatcagcttcttcatcggagtcggcggctaggacatcggcagccgtcgtctgctccctgttagcttgttcaccagagtcggcagctgggacatcgacagccatcgtctgctctctgttagcttgttcaccgaaatcggcagctcggatatcttgttcatcggagtaggcagctaggacatcttgttcaccggagtcggcaggtgggacatcgacagtcgtggtctgctccctgttagcttgttcaccggagtcggcagctaggatatcttgttcaccggagtcggcagctgggatatcggcagccgtggtctgctccctgttagcttgttcaccggagacggcagctgggaagcctgggatatcttgttcaccggagtcggcagctgggacatcggcagccgtggtttgctccatgttagcttgttcaccggagtcggcagctgggacatcatgttcaccggagtcgacatctgggacatcggcagccgtggtctgctccctcttagcttgttcaccggaatcgggagctgggacatcttgttcaccagagtcggcagcagggatatc

SEQ ID NO: 19144 - DNA, 1369 bp, Zea Mays
ctggaggagccgctgcaccactgttggagccgccgctggcctctcccactcgccttaggtgtatatttaacggaaatgggaagacactcgaagatcttaaattggctgctgagagtggagtatttgtaaatgtggatagtgaatttgatttagagaatattgtcagagctgcaagagctactggaaagaaagtgcctgttttacttagaataaatccagatgtggatccacaggtacatccatatgttgccacgggaaataaaacatccaaattcgggatccgcaatgagaaattgcaatggtttttgaactctatcaagtcatactcgaatgaaatcaaactcgttggtgttcattgccatctgggatctactattacaaaggttgatatattcagagatgctgcagtgcttatggtgaattatgtcgatgaaattcgagcacaaggttttaagttggagtacctgaatattggaggtggtttgggaatagattaccatcataccgatgcagtcttacctacacctatggatctcatcaacactgtacgagaattagttctctctcaagatcttactcttattattgaacctggaagatccttgattgctaatacttgctgcttcgtcaatagagtaactggtgttaaatctaatggtacaaagaatttcattgttgttgatggcagcatggcagaactcatcagacctagcctgtatggagcatatcagcatatcgaattggtctctccccccactcctggtgctgaagtagcgaccttcgatattgttgggccagtttgtgagtctgcagatttccttggaaaagatagggaacttccaacacctgatgaggttgaagaggatggttcgattgttaagatcaggcatgaagagaagctcgatgactacatgaagttctttgatggtcttcctgcttagatgtttatttgtgactgctaggggcgatgttttcttggagataattgaatttttctttgtcaagctcattttgctttcttgtggttgttatggaatgttactggatactggatagttagttcggcctgtaggcgtatcctcctgaacttacctctcattgctgttagttttggcaccaagtttgttcccaattgctatttacggaagttattgcataaagggctgtttggttgtaatcttcccgtaagaataagatgcatgtttttgagttagaggaccatgcctgagcgtgatttgtttgggactgaatgttttacctggtgacttgcctgcttgtgatccaaatctgtcacctgggctccggttattcccatcatccatggattagagtccatggattagagaggattggaaaaaaataagaaaga

SEQ ID NO: 19145 - DNA, 1030 bp, Zea Mays
cctctcgcttggtgggttcaatgtcatcgatgcagcaaagaggttgcttgaagctgtgtgccctgcgactgtttcttgcagcgacattgtcgtcctcgccgcaagagatgctgttgtgtttactggaggaccggctgtgcctgtcgcgctgggaagacgagacggcctcgtctcgttggcatccaacgtccgaagaaacatcatcgacacgggcttctccgtggacgccatggcggccagcttcaccgccaaggggctcaccttggacgacctcgtcactctctcaggggggcacaccatcgggtcggcgcactgcaacacgttccgggagcggttccagcaggtggcgaacgggagcatgacgccggtcgacgggtcgatgaacgccgactacgcgaacgagctgatccaggcgtgctcggcgaacggcaccgtgccggcgggcacggccgccgtgggctgcgactccggctcggcgtccgtcttcgacaacacctacttcgcgaacctgctgggcgggcggggcctgctgcgcacggacgccgcgctggtgcagaacgcgacgacgagggccaaggtggcggagttcgcgcagagccaggacggcttcttcgcgagctgggccagctcgtacgccaggctcaccagcctcggcgtgaaggtcggcgccgacggcgaggtccggcggacctgctccagcgtcaacggctgacgagggggcgggggaggctgcagaaacttatgttgtagttgtagagcaaggaaaggtgaggtgaggtgtggtgtcggctagttcttgttcttggcccggcgatgcttcggtgggtgagcgaggtgttgccgtgtagccggcgtcaccgtttttagtgaaaggagcgaaaagaaaatgcagaaacctgtgtagatgacgtgcctgatctgcgtctgcaaccaagggcatagttcactcatgacgatggacactgtactttgacctgataaatgacatagcaagcgaggcgaacgtgcttacgcggttcactcggcagta

SEQ ID NO: 19146 - DNA, 1396 bp, Zea Mays
gtgcgccgcggggaccaccccggacaggcccatgccgacgaacagcagcgcgcggcgggcgcggtagcgcggcgcgctcaggcggggcgacatgagcgcgtacaccgtgcccgccccggccgccgtgatcgccgacaggtacgccgcccgccagcgcggctcgcactggaagatgtagtagatgggcgggaagaaggagaccacgatcatgaccgcgatgcccgtgtagtcgaggcggatcagcagcaggttcagccggtgcgagtggcacgacagcaggtggcacgcgctgctgctcagcaggcagaacatggcccccgccaggaacacgaagaagggccaccgcgtcgtctgcgacgccaccgccgtgccatgcgaggccaggctcgggttcgtctggatgaacatggccgcgcctgataggacatctccaatattgctggagacattttcagcgaccttcgagattggcctgcacagcaacaaaggggcccaacaaaaaaaagcagagaagatcagtttttacaagtaacaaggtaacttctcaattatggaatacaaaatctcatcctagctgaagcaaagtgttttggaacggaaccgaaagtgaattggtgagacttttagaacacagctgaagttactagctcagaaattaagaaggttcagtacaaacgcacaagaaccgtgtgcctctggaccagagcctaacgctacgcgtggtgttctcatctcaatcgccactggataatggcatggctgggggatggatgggagcctcgaaacgccgagcaattcgcacagtagctgaattaatctgaagaggagtaggaggaggaggaggagcagcagcagctcaccaggagagatgcccaatcagatcagccacctgggggaagtactggccgaggtgcaccagggtgagaccgaagaagagcatgaacccgagcaggtacgtccagacgttgatggtctcgttgtgccaggagaagaggctgagcacggcgttgaggacgggccactcggagcggtagtagttgaggatgaactcgttctccttcatgtactcgggcagctcgtggtagctcaccagcgcgtacttcttcctcccgccttcctcctctcccttcctcggctgcctcctccgccgcctcttgccccttcctccttcctccttcatggccgccgccgccgccgccgctgcttcttggtcggcgtcggcacacactgtggtggcgacctcctcactcgccatgtgtgcccacagcccacgccttgccgctcctctctctgcacctccctagctgcgcgccttctctctctctggaattatcaaggggggcagggaaggcttgataaaggcctggagctagcaccgcagagcgatatggtgtga

SEQ ID NO: 19147 - DNA, 2373 bp, Zea Mays
cccggtcgtctttctttcgggcctctccgagtggtcaataaaccccgcctcccttctgtcatcccgtacgtctcgacctcgcagccgcaaacgcgaaaccctagcctcgagctctatctccggccacagctggtcaggttagcgacgaaggatgagcaggcgctggagccgcacgatctacgtcgggaacctccccggcgacatccgggagagggaggtggaggatctgttctacaagtatggtaaaattgttgacattgacctgaaggtccccccaagaccacctggttatgcttttgttgagtttgaagatcctcgtgatgctgaggaggcaattgctggacgggatggatacaactttgatggacaccgtctaagagtggaggctgctcatggtggtagaggtaatgcttcctcgcatgatcgttcaagtggctttggtggcggtggtggagcacgtcgtggtgtgtcgagacactcagagtatcgtgttcttgtcactggactgccttcttctgcatcatggcaggatttaaaggatcatatgcggaaggctggtgatgtttgtttctctgaagtgtatcgcgaaggcggtggcaccgtaggaattgtggactacacaaattatgatgatatgaaatatgctataaagaagctggatgatactgaattcaggaacgcctttgggcgagcctatataagggtgaaggaatataacggcaaacgtggtcgctcctactcacgtagccgaagcccaagtcgtagttacagcaaaagcaggagtccgagtaaatcacccaggactcgccgttcatcatctagatcccggtcaagatctgtttcttctcgttcaaggtccccatcaaaaggacgttctccatcaaggtaacatacactttcaaattctgagctttgaatccttatatatgtcaagttcttttctactgttttctccaaatcacaatatatatgcattagtagaatatctggacaaattatgaatatgcctacttctgtatcataatttcttgttgcctaccctgtcggcctttttcctttgcaaagattgctgttgttttgtagtctaaaacagtggctatcaatctttattaaagtgctgtcattgttccgtaaccttcatcggtctgaatattttgtatatagtaataagcttatcagttaagttcaagttaacatagttacactcccatgcatgtatacaatgatgatggcttgctgtacagtctgattgcttgggggttccttctcaagtgctcagagtctaatgaacgatatgaactgcttagtctgttctgttttgtttttgaagactcaattatcttgcccttttatctgggattgtgcggtgatctggggattgcgcattaagatattgaggatgggattttcacaatttgctacagttcagttgattttataaggtatggttattaattgagagtttgtatgaaaagctaaaatcgtcccattattttacctaatgccctgtaactgattgacatcagagtttggcataagcgcattgtttggaatactggacataggagcgttaaggattggtgatctggattatggtggtacagtggctaggaatgtacttggagttcaatgcttggggaatgagttttcttcgtacctcaggcacacttcagatggttgctgtagttcatatatgcactgtcgacattgttatacaacaatgttacatttgcacggaactgaacacttctattttcatgagcttttattgctttgattcgacgcggcatcatggcttttggaaccaagttgttaaagctgcattttggatattgaatcagttgtttctggaacgttttgcagatcaccagcaagatcgaaatctcctaatgtttctccagcaaatggtgaagcagcaagccccaagaagcagagcccaaacaggagcccatctggctcacgctctcctgatgcgaagcctgaataaaattgctatgctgttaaaggattgcagatggagtcaggagctcttcttttcttaacatttgtcctctgttctagtaccatcagtgtcttatcgcagtacgagattggatgatattaactatctgtatcagcttgtatcgatggactccaagtgttgtcactcttgttgtctagtgtgctgaaggacccatttacttttgctaaacttttccattggtgattgttggatgcatggtgtggatttgtgctgtgttggctaaatcatgttgttctagaccttatgcatttttttcatttcactaaattacctgacggttgctgcatattatgcacagttttgcaccttgtgaaccatatgggctttatttgacaagtgaaatatttctg

SEQ ID NO: 19148 - DNA, 3269 bp, Zea Mays
cttcgccttcgtcagttcctacctgcccccagccttctctcccacctccaatggcgctgctcttgccacctcccgccctctccacgacgcctccatttctctccgctccccgaccagcacggctaccctgtctcagatgcactagaactaccaccgccacctcaagcgtctccacctgtcctcccgcatcgacgtcttctccctcgacctcctcgccggtggcgtcggacggcgcagttggaaggaagagcaagaataagagcaggcccctcaagccgagttttgaggaacaggccctccgccgctggtccgcccgggcaccttcccagcgtgcctcggtcccctgggaacaacctcagcagcagtcgcctttgccgccttcgctgccgcaccgggctggccgaggaagtggtgatgcgggcgatcaaaaacgcagtggtggaggctcaagcgcaacgttgcgctccatcgtggactactttgctggcggctcctccgatgacgaaggagttcgagtagaggaaggggcgtgcgacaccaccgcagtaccggaccaagcggcacgggagcaggacgatggatcgcattttcggccgagctatctgcttgggagccacccattctctgcgccatggattcacagggaggaatcgaccaatgataggggggtttccggtccggtggccgaagaggaggaaaggttggacattcgtgatgcttctgatgatgaactgggcttggtggatgaggataaggaagagacggataatggtgaggagcttcttactgggggtttagaagatgaattttatgatgattatgccacaccaactatgaattcttcatatggagtggatttgtcagtggacaaagatgcttatggtagcaggttcgataggagtatgatgcagagcagtgtaaacaccatagttaaaacattgaggaattcgatggaggaaagtgacccgaatgccacggttgagttgtctaatgcagaagattttgtccagaaattgggccctgcactcctgccatgggaaagggaggaggaagatgatgaggcattcagcggtggcagggcggtgaggcgcagcaacacggagctggccgagaggtctattccagagcctgaactgcggaggcttagggacacggcgttgaggatgaaggagaggataaaggttgggccagggggtgttactcaagacatagtggagagcatccacaggaaatggaaggtggatgaggtggtcaagatgaggtttgaaggccctccaagcctgaacatgaagagaactcatgatttactagaggacaggactgggggagttgttatatggaggtcagggagatcagttgtgttgtataggggaatgaattacaactttcaatgtgtgcagtcatatgctaaatttatagaaattgattcgggtaagggagttagcgatgctaatagtgctgtattgagccatgatggtcacaacttacaggcctcaagagcagatggcatgaagagtttaacgtctactggcaatttttctctggagtcctctgaaacatttgatattgataacttcttggatcaattgggaccacggtacaaggattggtctggtcgtggccctatccctgttgatgccgacttgcttcctggtgtagtacatggctacaaaccaccatttagagtacttccctacaagattaaaagcactcttagagataaggaaatgacaactctgcgtagacttgcaaggcaaactgctcctcatttcgctctagggagaaacagagaacaccaaggcttagctgctgctatggttaaattatgggagaaaagtgctattgcaaagattgccatcaagagagggattccaaacacatgcaatgacagaatggcagaagaaatcaagaaattgacaggaggagtgctcttgtcaaggaacaaggagttcattgtcttctacaggggcaatgatttcatagctcctaaagtaaggcaggtcttggtggagaagcaagaacaagccattactcaacaggatgaggaagagctggctcggcttaaagcatcagcctcaattattactatccccaaggatataaagggtcctctagttgctggtactctggcagaaactacagaagcaaaatctagatggggaaagtcagttaatgataagcagagggaagaggagatgaagcatttgtctttgttgaagcatacctctcttttgaagaacttgaagagaaaactgattttggcaaaaacaaaagttgcaaaagcagagaaggctctagctaaagtccaggaatttctcactccagcagagcttccaactgatctggaaacagttacagatgaggaacgcttcttatttcgcagaatcggcctgaaaatgagggcctttttgatgcttggcagacgagaagtttttgatggaactgtacaaaacatgcatttgcattggaagcatcgagagttggttaaaattgttgtcaggggaaagagctttgcacaagcgaaacatattgcaatctctctagaagctgagagtgaaggtgttctcatttcacttgacaagacaactaaaggatatgtaatcattttctaccggggtaaaaactacaggcgaccccaaatcatgaagcctaggaatctactaacaaggaggcaagcattggcacgctctatagagttgcaaaggcgggaggccttaaagcatcacatctcaagtctgcaaggcaagatctcgaagttgcagtcgcaacttgtacaaacaaaggttgcaagtgagaaacatgatctgaagctgcttcaaacagttgaggatgacttctcatcatcagatgatgatgtagaggatgatggggaagaagcttatttgcagacttacagcagcgctgatgaagaagatgccgaggatgatgctaatgaatatatttaggccatgtttggatcctcctagctaattgtttgctaatagctaattgtttgccaatagctaacaattagtcggcaaataattagctagcaacaattagctagtgtatgcttggagtcttggctaacagatttctttttctctttatatgatctattagcatttattagtaaggttaaatggctaacgagcaaacagtttgccagtcctccggctcaagggcggattcaaggggtgagcaaggtggactatggccccacctaatttttttgaccccttatacctaggtttagatacacaccaaaataaacaaactttttgtatagt

SEQ ID NO: 19149 - DNA, 3602 bp, Zea Mays
gctagtggcaggtggcagcgagtgagaaggtgagctcgcctccctcgcgcctcccattcccccctcgcgcagtcctatcgtaggaatgggatgaggccggggcccctccctccttcctcctcggcgcttctcccgtgacaagcctccattctccagtccgtgagcactccactccctgtctccgcttttgtttctctcgtcccaacctccccttttctgcgggtttgatccgcacggtacaggataggggaggatggatttgtccaggttcgcctccggcgtcgggcccagccgcgtggccccgcgggcgggcctgcagatcggcgccgccgagaatggcttccgggcctgctccctgcggcgagcacggcaccgcggcggcgggaacgggaacctcacggccgccgcgtccaccctccgcggccgcggcgggctcttctacctggctcccacgcgccggagtcatcccagtctccggctcttctacctgcttcccacgcgcgggagtcatctcagtctccgcgccagatggcggccgcgctgccagggcaacgactcattggcctacgtcgacggccccttggagaccgctaagggctccggcgaggtcgacgacaacgtgcccaccagctcggggtccgacgacgacaggggcctcgccgacgtcgacggcctcagggagatgctgcagaggtccaggaacgagctggaggtggccagggtcaacagcaccatgttcgaggagaaggcgcagcggatatccgagtcggccatcgcgttcaaggaccgcgccgacggcgcccagagggatgtgtgcgcggccgtagccaccgtgcaggagatcatcagcaaggaggcggacgccaaggaggccgtccagaaggctaccatggcgctgtccatggccgaggcgaggctgcagctggccgcggaggcgctggaggccaaccggggctcggtaggcccgacggaggttagcatcgaaggcatggagcaggaggccctcctgtctgcacaggaagagattaaggattgtcgggcagccctgtcgcggtgcgcggaggagctgagtcgtgtccaggacaagaaaatggagctgcagaaggaggttgataggctgacggatctcgctgggaaggcccagatggatgcgtccaacgccgaagaagatgttgccaatataatggtgctggctgagcaggcggtggctcttgagatggaagcctcacagcgtgtcaacgatgcggaaatggtgctgctgaaagcggagaaggccatagcctcgattgataccgtggtggagctaccgtcacctgctgaagagcagagaagcactgaagaagacagcgtttctgaagggtacgagtatagcagcgatgtcactgatgatgtttatgtaagggatgaggtgtcaagtatcgagcgcctaatggtcggtgacttgactgttcagggctttgagcagcttgaaccatcccgtgaaatatatgatgaagaaagcagtaataagatgtctgttgagcctcagaaagaagctgagtctgattcagataagtcgaaacaagggaagaagcaagaaatggaacgaaaggagcacaccaaggaaccactgagtgctccaaaagcactggtgaagagatcatcccgtttcttctcggcatctttcttctcctccaaagttgatggagagtttacacctacatctgtcttccgagggttaatgaaatcagtgcaaaaacaagctccgaagcttgttgttgggatattgcttctcggtgcaggggcattcttcttaaatagggctgagaagagtcaactatttcagcagcaaggcattgccacaagtattggaaaggtaacctccacaacaaagcccatagttcttgagatacggcgaattccacagagagtaaagaagctaatagagctcttacctcatcaagaggtaaatgaggaagaagcttcacttttcgacatactatacttgcttctggccagtgttatttttgtaccattatttcagaaaatccctggagcaaatactggcttaatatcctgcacctgcagctttctgtggaaagactaagctcgatgaagaagtgctggctactactgctgctgttggtgtgatagctcattgttttgccgcactaccaggaccagcagcaattgttgttgggagtggcttggctctgtcatccacagctgttgtcttgcaagtattgcaagagcgtggtgaaagtacgtcacgtcatggacgtgctacattttctgtgttattgttccaggatttggctgtggtggttctgttgatattaatacctctcatatcacctaattcttcaaaaggaggggttggtttccaagcaatagcagaagccatgggaatggctgcagtcaaagcagtagctgctataactgccataattgctggaggtcgtctgttgctccggcctatttacaaacaaattgctgaaaatcagaatgctgagatattttcagcaaatacactccttgttatttttggcacaagtcttcttacagcccgggctgggttatcgatggcacttggagcttttttagctggtctgttactagcagaaacagagttctcattgcaggttgagtcagatatagctccctatcgtggtcttctgttaggacttttctttatgacggttggaatgtctattgacccaaagctgcttctgtcaaacttcccagcgatctctgtgatattgagtctcttgataattggaaagacattgttagttacatttgtcggcagggtgtttggggtttctgctatagctgccattcgtgttggcctcttgcttgcacctggtggtgagtttgcttttgttgcctttggagaagctgtcaaccagggtcttctatcacctcaattaacatcgttgctatttttagtcgttggcatttcaatggctctgacaccatggttagctgctggagggcagtttctggcatcaaaatttgagcagcatgatgtgaggagtttattgcccgtggaaagtgagactgacgatttgcaagaccatatcattatattaggctttggacgtgttgggcagatcattgcacaactcctgtcagagcggttaattccttttgttgcacttgatgctggaagtgatcgggttgcagctgggcgtgcacttgatcttccagtgtattttggtgattctggaaagcagagaggtactgcacaaaaattggagctgaaagagcttgtgctgctgcaattactttggatactcctggtgcaaactacagagctgtctgggcgttgaacaaatatttcccaaatgtgaagacatttgttagagcacatgatgttgatcatggtgttaatttggagaaagctggtgcaacggcggttgtccctgagaccttggagccaagtcttcagctagctgctgctgtccttgcacaagcaaaactcccaatgtcagagattcaggaaaccatcaacgagttccggaatcgtcatctgtcagagcttacagagaaagcttctggcaaacaaaaggatatgcagcgaaacatggcaaaccagatttcttaatggtagtaattcaaag

SEQ ID NO: 19150 - DNA, 2955 bp, Zea Mays
cgtctccactctccagcacgcagtcgcagttgtcgtctggggtggtggtggtggtgggccgaggtggagtcgtcggatctcacacacgcaactctctcaagactcaagagaggaaaggttgctttccggccggaaagggaggcgagcgcgagacccctgtgatcccaattaagcgcccagccgcgacggccccaaaacggcaaacctccccagcccgcccgcccgcgccgcccgaccgcgatgccacccacgccgccggagacggagacggagccggaattcgccgaggtcgaccccaccggccgctacgggcggtacacggaggttctcggcaagggcgccttcaagacggtatacaaagcttttgatcaacttgaaggactagaagttgcttggaaccagatcaaagttggagatttacttcggaacaatgatgatttggagaggctgagatcagaagtgcggttgcttaaaaccctcaagcataaaaacataataaagttctacaattcatggcttgacaaaagaagcaacaatataaatttcatcacggaggttttcacatcagggacgttgcgccagtaccggattaagcacaagaaggtagacattagagctttaaagaaatggtcaaggcaaatcttgagtggtcttgtctacctgcacagccatgatccaccagtgatccatagagacttaaaatgtgacaatatattcgtgaatggaaaccagggtgaagtaaagattggagaccttggtttagcgactatcctggataatgcacgttcagctcatagtatcattggtaagcaattcatttgattattgttccattagaaatttatagtttttcgtgtatgtaacctctgtttcttcttaggtacaccggaattcatggcaccggaactctatgacgaggaatataatgagcttggtgaaaagccaggttcactggctaagattggtgatcctgaagtaaaattatttatagagaaatgcattgctaaagtcactgaaagactttcggcaaatgaactcttaatggatccttttctcctagatgttagtgatgaaaaaatattctatccagtgcatccaaatattaatacaacagaataaacatggcagatactggtagtccaaaaccaagctctagtttcagatatgacggagtagcatcatctgccggtcgccatgatcgctcaggtagcatgtcagattcacatccttctgataactatgtacatgacactgtggatccacatgctgcaattggtcgaagtatcacagtcgagagtcaacggaaggatttgaatacaatatttttgaagctgcgcattgctgatccaacaggtcatgcccaaaacatccacttcccctttgatattgaagcggacacttcaatcagtgttgcaactgagatggttgtgcagctcgatctcacagatcaagatgtaacggcaattgcagaaatgatagatgctgaaatacgttcgcatattcctgattgggcagcagaggagtcaattgacaaccaaggggatgaagctgctcactctgagacccatagttcagaaggtgatgagggaacttctgaactgcgtgatgagatcggtgcctcacataacggttttgttcaagaacagcttccctctggacggaagtactggtcagactcacccaggagagacggtgaaatatctcaatcggtggtggaacatcaaattggtgatagtagtgccaatggaataccaaagaggaacaaagtagatggcattgtgatctgtgcacgagatgaggaggatcaatccttcggctcttccatccatcccgctgaagccatgtttgaacgaatatcatcatctgtggacttgtcgaacccatctgcggtcgacagcatgtctagggatgcttctgttggtggcagccctcactctttagacggtgaggaggagcacaattctgatcagcatctggcagcaggtgtcactgagaggttaatagacctgttggctcagcagcaagaggagcttcgtgcgctgcaaaggaagcacaaggcggacatagaggagatgctgaaaatcgtacctgcggaggatcgggaagagaccttaactctatgccacttgaaggcggaacagaaaaacagagccgccgaaccttagataaactgtctcatgtgcatgttcctctgtgtgctgttagatttatacatactcacaccaaggagttgttgtttacactttacagccgttgttgtgcaaaagttggacctctgttgtgcagaagataagtctgaagcctttttcattgttcttttttgacataatggagaagctgggggagtgcttgtctctggaggacctccaattcagtgaccgagcactaaatagtaatcaggttctttttgacataatggagaagctgagtttttgacggcaaagatgaagttcctgcccaccaaatgaaatctgcagatgccactttgatgccgctgcgtgcctgaattaacggttcataaggagtgcctcccttcctttttcttttcttttcttatttgtttcttctgtactttgacttgccaaggatatacatcagtgtttgagctgttccaaacttgcaatgacagactttaaagtgcaattattttccggatcacatggctgcccaagttctcagagctgtgcgcacacacacacacacatatacagatagataaatatatatttctctgaatgcaaacaggcaggatatgcatacagatagatgtatgtatgtatttgttaattgcaagtgtggcgtggaggctgctgaggaagtctccatgcactcccagtgatgaggtagcagcagatctggattctggagtgggcagtggatgataaaacaagcatttgcgcaacacatgcgttgctccagatctcccacatgcatatgcctggctgccccagctct

SEQ ID NO: 19151 - DNA, 3795 bp, Zea Mays
ggtccttctcagtctccctcgtctccctcagatctaagccaccgtcccttcccccagctccggcgatcaccggagtgcctccgccttggggcatgatggacctcctcatcgcgcagatcaccactgacctccgctcctcggacgcgctccggcagtcgtcggcgctgctgcaggccctgcagcagtgcgccgcggggcgggacgtctccgcgctcgcccgcaccgcggccaccgagatcctgtcggcgccctcctccgccgtctgcaagcgcctggcgctcgacctcctccgcgcgctcccgctgccgccggacctcctcgacccgctccttctctcctccctccgctccgatctctcctttccagaccccgacgtcgccgcctcctccatcgcctcgttcccatccctgccctcccaccttctcccctcgcttctctcctccgcccacgctgaaatcgctaatgcactctcctcgcccgctgagtcgctgcgcctcgcagctgtcacatctctgtcctcgctcctcccgcgcgatgacctaacgctcatgtgctccacaaacccctccctcatggcgcatgctaccacgtggtggggccgcctggccgagcttgcgctggactctgcagacgctgtttccgccggtgcgtttgaggctcttgcacggctgttccaggagctagaggggcgccgcatgagccggctagctggagacaagcttgttgatggagaaggtgcgcttgcagtgcgtgcccagtgggcggctgatgccattgatttcatttggtcaaggcgcaacatgctgattgcgcgctctatggtgatgcctgtggagagcttccgagttactgtgtaccctctagtgcatgcagcaaaaatggttgcttctggtgtggtaaacactctgcggcgagttgctaagccaggagacactacaattgctgatagcgtggagtcgagtgcggagaaattggtaggagtgtcagacatcgtctcacacttgctgccatttcttagttcacttgacccaccactggtgttcgaggttgggatcaatatgctggcgcttgcagatgtccctggaggcaagccagagtgggcatcagctgcaattattgcaatcctgacactatgggaccggcaagagttctcttcgatgagggagacaattgtaagggctgttgtaaccaatcttcatttgctggatcttggaatgcaggtctctctattcaaaagactgcttcagatggtgagaaacttgagagcagaatcagatcgaatgcatgctttggcatgtatttgtcggactgctctttgtgttgatctttttgcaaaggagagtgtccgaagaggtcagaagcctgttcctggaacagatgtgatatcgctctttgaagatgtgagggtgaaggaagatctaaacagcgtaacaagcaaaaacttgttcagagaagagctagtggcttccctagtcgaaagttgtttccagctatctcttccactaccagagttgaagaattctgggacagagagcagagttataggagcgttagcctatggaactggttatggtgcccttaactggacagaacctgctttggatgtggtggaagtttgcaggccatgtgttctttgggactgtgatggtcgtacctatgcaattgattgctatctaaagttacttgtgaggctttgtcatatatatgataccagaggcggtgtgaagacaattaaagctggtgcatctcaagatcagattctgaatgagacacgacttagaaatttgcagctgcagcttatcagggaccttcgcgaggtctggatccccttttagctgatgacccagaggacccactgaatattgtcatatctaacatgcacaagatattattcaacaccgattcatctgctactacatcaaataggatacaagatgtgcaggctgttctaatttgcgctcagcggttgggagcaagaaatgcaagagcaggccaacttctcactaaagaactggaagagtttagggcaagtacttcagctgattctatgaccaagcatcaatcacgttatgtgttgcaagtaataaaatacgtaacaaaccatcctgacaacaggtgggttggtgtaggtgatgctacaggggattatccatttagtcaccacaagcttaccgttcaattttcagaggcgtctgctgcccaagataggaaattggagggattagtccataaggccatccgggagctttggaggccgaatcccagtcaattaattctcctacaaacaaggggaattggtgctttgcataaagagcttccaaaagcgtgtgctttgactggcagcagtgatccgtgctacatcgaagcatatcatttggcagatccaactgatggcagaattaccctacatctaaagattttaaatttgactgagctggaactcaacagggtggacatccgtgttggcctgtctggagcactgtattatatggatggtttctctcgcactgttcgtcaccttcggaatcttgtttcccaggatccagtccaaagtagtgtgactgttggagtttcacattttgagagatgctcgctctgggttcaagttttgtattacccgttttatggaagtagtggatcaacagactatgaaggagattatgcagaagaggattcacagatgatgaggcagaagcgctcacatcggcctgaacttggggaaccggttgttttgcggtgccaaccatacaagtttcctctcgctgagctcctcctaccattagagtgttctccagttgagtatttccggctatggcctagcctaccagccatggtggagtgcactggcacatacacatatgaaggcagtggtttcaaggccaccgctgctcagcagtatgacagctctcccttcctcagtggattgaagtcgatttcttctaagcccttccatcaagtctgctcacatttcatccggacagtagctggattccagttatgttatgcagcaaagacatggtttggtggatttgtgggcatgatgatatttggggcaagtgaagtcagccggaatgttgatttgggtgatgagaccaccacaatgatctgcaaattcgtcatgcgcgcatccgatgaatccatcacgagagagatcaaatccgacctccagggctggctggatgatatcaccgacggcgctgtggaatacatgcctgaggatgaggtgaagagtgtggccgccgagcagctgaagatctccatggagaggattgccctgctcaaggcagccaggccaaaggtcccacccgcaaagaccgatcaagaggaggaagaggagcgaaagcagagcgaggaactagatgggtttggaaaccccaagggcccctcgacgctctccaagctcaccgcggaggaggctgagcaccgcgctctccaggctgccgtgcttcaggagtggcaccagctatgcaaagagagagccatgaaagcgcagtgaggtcgatttggaccgtgtggatcttacgcgcatgtataattttgtatttttccttcgtctcccattctttgcgtgtctatactgctggtttcactcactgtataccgtcgccgatttgttcattgtattctcaaatacttgtgcacgaaaaaacctgttttgtaacatactactgttagggcgtttttaagcttcggtgtgaagatcgattgtacaagagaatccaaatgtcattgttgccttcccagttttatgaaaatgcattctgtaattgaagaattctccccaaaatgccacga

SEQ ID NO: 19152 - DNA, 2872 bp, Zea Mays
cactgccaagcgcagttgtctctgatgtctggtcacgcctgacgacgccgctatcacgcgccaccctcctgccgacgaacgcggcctcctcctcattgctgagcgcagcccctcacttctctcctggctgcgccaccatgatgccgccacggaatgcgcagagccgccgaagagagcagagtcccagcgagaaacgcaggagctcttccttccacctctggcgaacctccaaggaaactcgacgcccagacctgctcgcgcacagggagcatctttgctccggcggctgctcgccggcctccctgtctcctccccagttcttcctctcacagccgtgcagcgccctcttctctacagtggccgctgctcctctctgaagctatgcgcaggagctctccaggacgccgcgcctcctccctgctacacgccccggtcgacgacgaacttcccgtggtctgggaggccgcgcccgcccagatccgccggaaggagcgaaaggagccccgccgccgctgtcatcacaggccgcacgggcttccggtggcctgctcaggcggcggctagggttttgaggggcgctcgggtcgcccagcgcggggacgaccgagcgccgtctgcttcaaacatttggagctcatcccctcgaaatacagaaggtgcatccacaaaggattaatctcttcgtctaattttcttgggcatacacagattcagagcatatggcgatcaagtagctatgcgttcagctgaggacattgcatatgctgtgttacggttttttgcaaagggtgggtcattggttaactactacatgtatcacggaggaacaaattttggaaggactggggcttcttatgtgctgactgggtactatgatgaagctcccatggatgaatatggtatgtacaaggagcccaaatttgggcatctcagggacttgcacaatgtaataaggtcatatcagaaagcattcctcttggggaagcattcgtctgagatattgggtcatgggtatgaggcacacatctttgagttgcctgaagaaaatctttgcctctctttcctttccaacaataacacgggcgaagatggaacagtaatcttccgaggggagaagcactacgtgcctagccgttcagtctccattcttgcagggtgcaagaacgtggtttacaataccaagagggtgtttgtacaacacaatgaaaggtcataccatacctcagaggtaacaagcaagaataaccaatgggagatgtactcagaaaaaatcccgaagtaccgtgatactaaagtcaggatgaaggaacccctggagcaatttaaccaaaccaaggacgctagtgattacttatggtacaccacaagctttcgcttggagtcagacgatttgccttttagaaatgacatccggcctgtgcttcaggtcaaaagtagtgcacactcaatgatgggatttgccaatgatgctttcgtaggatgcgcacgcggaagcaagcaggtgaagggtttcatgtttgaaaaacccgttgatctgaaagtaggtgtgaaccatgttgtattgttgtcgtcaactatgggaatgaaggacagtggtggtgaacttgctgaagtaaagagtggcattcaggagtgcctaatccagggtctgaacactgggacgttggatttacaagtcaatggctggggccataaggctgcactggaaggtgaggacaaggagatctactcagaaaaaggtgtgggcaaagttcagtggaaacctgccgagaacggccgggcagccacttggtataagagatacttcgatgagccagatggagatgatcccgttgtacttgacatgagctcaatggacaaaggaatgatttttgtgaatggtgaaggcgtgggtagatactgggtctcataccgaactcttgctggaactccttctcaagcactataccatattccgcgtcctttcttgaaatccaaggacaaccttttggttgtcttcgaggaggagatgggcaagccggatggcatcctcgtgcagacggtgacgagagacgacatatgtctgttcatctcggagcacaacccgggacagataaagacgtgggatacggatggtgacaaaatcaaactcattgcagaggatcacagcaggcggggcaccttgatgtgcccccctgagaagacaatccaagaagtcgtctttgccagcttcggcaacccagagggcatgtgcggcaacttcactgtaggcacttgccacactcccaatgcaaagcagatcgttgagaaggaatgcctcggcaagccatcctgcatgctgccggtggatcacacggtgtacggcgcggacatcaactgccaatcaacgactgctacactgggggtgcaggtgagatgcggaggcggcaagaagggtgcctgagaataacaagatggatgctgctaattaatggacgtttcagcttgtttgtttgttcatcccttcggtttggcactgatgcttacattgttctgacattgcaattgaaatgtgattggaacattcttgatcgggaactaacatgaaatgagtggagggtagatgctgatcagaccaaagatgtgtatttcccccctctttccttctgtctcgtgttgtttcatgtaaccatcacaatatatatagatgttgaataatcatgaccagtagtatagatcttagagcatccctaacttttgaataaaagactcttggagattggagctggactaactgattgcttcttgcaacatgtatatgaacatttcattaaaaaacgagcgatgagcaaaacaatataccctactaattaagatgttgcaaatgagtttaatcctacagctttgatactgc

SEQ ID NO: 19153 - DNA, 1269 bp, Zea Mays
cacagattgcttgtgtgcttccttacttgtacgggggctgcttgcgctgggcctgcgttctcgggtagttcatgtctgggcggctggacctggggactggactgcttctgttgtggattagcgagacttgtgggcatctcgctatctcgtcctcctgggcgcttgggagaacggcaaccgccagccggccgagccaaggccaagccatggtggagtccagtggccaccggagcaccgtccccgcggccgtcggcttcttcagggtcccgggcctcttcgtgaggctgagcggcaagggcggagcgagcaatgccgtggacccggaggactcggtctggagcccgacctccccgctggacctgaagcacgtcatcaggtgcagcccgccgagggcctgcctcggcctcgccgacgccctcaccgccgacgggaccggttccctgcactcagggggcaggagctcgttcgtcgactccatcaagccgttcctcgagcgggcgctgcccaaggcggcgtgcgggaaggaggctgctgctgctgcctcctcgtcggccggcgtcgtcgccgcaaccctgggcaaacaggcgagcgagtacgccgactgcgaggagtacacttgcgtcatctcgcgcggggccgacccgaggaccacgcacatcctcgccggcgagacggtggaggtgcgcaggggcgacgtaggtggtggctgcaggaaggtggttttcatcatcgagccgttggcattgagcgaccggcagccgcgcgcgtcttcgtcttcgtcgccggcggcacccgctagagtcgtcgcgtccggccgttgctgctgctgcatgaagaggctgctggaggaccgggacatcttcatctacctgggcgagaaggccttctgcagcgacgagtgcaggaacgggttcatcgaggaggcggcggaggaggagctcatgattctggatcctgctcgaaatctttgatcaagatttgttagctgccgtggcaaaagtagagagtgtaatatttgcccgcaatattttgcttctgccttcaacttggggactacttggctgggagagtgagtgggggaaggacaaaggaaattgcctctcgttcaagtttttcggtaaggagaggtcgtgtcgtgtcccggtttggccaaccagtgcaacggccgagccagccaatttccgtggtttgttgagctccattttggctactgtcagattagtagctcttcgccatcaatatattactactgttttgtttaaggccagt

SEQ ID NO: 19154 - DNA, 1067 bp, Zea Mays
ctacaatgcacaactaaactcaatccctgttatgctgcatttcatgatgaagagtggggagttcctgttcatgacgacaagaagttatttgagctgctagtgctgtcaggagcattagctgaactgacatggccagcaattctgaataagagagacatattcagggaagttttcatggattttgacccagtattggtttcaaagttaagtgagaagaagattattgcgcctggaagtcctagctgctccttgttatctgaacagaaattgcgtggtgttattgaaaatgcacgtcaaatactcaagatcatagaggaatttggatcatttgataaatactgttggagcttcgtgaaccacaaacctatattgagccgattcaggtactcccgtcaagtgcctgtcaaaacatcgaaagcagatgccataagcaaagacttggttcgaaggggtttccgcagtgtcggcccaacagtcgtatataccttcatgcaagtctctggcatgactaacgaccaccttatctcctgctaccgttttgctgaatgcgcggcctcctctgctggcgctgctaaactttctgatggaagcctagcaaattcaagtgatagcagccatggcacggcagagcagaagatgaacgggacgaatgggctggattcaggtcttgaactctccaggactatcgatgagctcagcatttcatagcggggtaggagcggtgctgaagcgatatggtgttagtttgtgtattttatgtgctgtagtataggtgtgattcggcgacctttttctgtagtttttccactcgtcaatgtaggctagaaaaatttttagtcttcggtgtgtcaggacccttgaacgacagcagggtaccgatgtactaccttcgtccggagataattgtctatctcgtattttgaggtgcttccttcgtcccgagataattgtttatctcgtattctgagaagttaaatattttaaatttcgactattttatttaaaaataataatattaacatttgtgtcacgtcacaacaccttggtttcccaaggtacaaaaaaaa

SEQ ID NO: 19155 - DNA, 792 bp, Zea Mays
accggtcggtcccgagcgacacaacagacagaggaggaaggagaaggatatgggaggcgaggcgggaatggggctccgcgtccgcgcctcctccctcctgctgtcactggtcctcgagctcgccgtcgcgctcgtctcagatcgacgccgtgtacgccgccatgcaggccgcgggggggcgcgcggacgtgggcgtcacggtctcggagaccgggtggccgtccaggggcgacgacgacgagcccggcgccacggcgcagaacgccgcggcgtacaacggcaacctcatgcggagggtcgccgcgggccagggcacgccgctcaggcccgccgtgcccgtcgacgtgtacgtgttcgcgctcttcaacgaggacttgaagcccgggcccacgtcggagcggaactacggcctgctctaccccgacggctcgccggtgtacgcgctcgacgccggcggtccgggcccgggcggctcgctcaacccgtactacacgtccatgttctcctcctcctcctcgtccggatcggcggtgggcgtaacctttttgacggagaaagtggtactatcactgctgctgcaagcaattgtaatactccgacgatcacattcgtactgttagactgttagtcagtgccatatactcttgtaatcttgtatacgaaaaatatgcatttcaattcaaccatagggtaggcctagattcgggaattttgcacgacggcggtgtggctgctccgaaagctctcgtcttttctcttattcccccgcccccagcaatggtcttgaaaaag

SEQ ID NO: 19156 - DNA, 1385 bp, Zea Mays
tctcggtttatccatccctagaccctaatcatgttcaggcaggttagctgatgcgaaggatgttatggaagcagttcggactatggggggtgtacgttttcctgtattgactccaaaccttaagggatttgaggcagctattgcagcaggggcaaaagaaatcgcaatatttgcatcagcttctgaaggattttccaagtcaaacataaactgcaccattaaagagagcattgcccgttataatgacgttgctcttgctgcgaaagagaaagaaattcctgtccgagggtacgtttcttgtgtggttggatgcccagtagatggaccagtgccaccttcaaacgtagcttatgtagcgaaagaactttatgacatgggctgctatgaggtttcacttggtgataccattggagtcggtactccaggcaccgtggttccgatgcttgaggcagctatctccgtcgttcccgtggagaagctcgctgtccacttccacgacacctacggccagtccctctcgaacattctcatctctcttcagatgggagtaagcgtggtggactcctccgtcgccggcctcggtggctgcccgtacgcgaagggtgcgtcggggaatgtggcgacggaggacgtagtgtacatgctcaacgggctgggcgtcaagacgggcgtcgacctgggcaaggtgatggccgccggcgagttcatctgcaggcacctgggacgccagtctgggtccaaggcagcgaccgctctgagcaaagttaccgcgaacgcctccaaactctgacaatttaccatgatcccctactgcagataattgcagtaaaattagcgcatggtaataaatagactgaggctattcaaataaatacggcctcggagctagtagtgagtagatttttatttatgtccatctagctagcaaaataagcgcgacactgccaacactgccggtctagcaagcaaaatgagcaaatatgtgaccacctctacgggaaagattcccccaacactctcagcaaacggaagtggtgcatcagttcgttccagcttccagtcatcacatgttcactcagcaaacagaaatggagcatcagttcgttccagcttccagtcattacatgtttacaacatccagatctcacctacgctatggacacaatgggaaatgtctagtgctgtaatgcattccacgaaagttgatgggttagctatgatctcaaacttacagcagattcaaagcatttttgggagggctcccaaactggccctggctctgctttctctaggtgcaaaaaaaaaacagcttcaacatagagcatttaggagctggaaccactttttttttataagctagagtaaaaaaaaagctcctagcggct

SEQ ID NO: 19157 - DNA, 196 bp, Zea Mays
cagaagacgagccaagtcgaccccaagcgtgggctactccgcatggtggtgctggtagacgaacctgcctggtcaagtgctcggacaaggatgatcgtcaagtggacgtcgcctaacaaacactaacctagtgttattcaggcaagccccggtgcatttgccacctccttgatgttttaaaatctttatcaccttg

SEQ ID NO: 19158 - DNA, 6455 bp, Zea Mays
cgactttccagatgactaattattattaagcacttcgactggaacaatggcacgcggccgagacgaaagcctccatcagatccagctcatcgccgacgtcgccgtcgcagttcaaaatttgaattggagcggagagaacccaaggggagaccccatcgaccgtttctggtcgcctctgcgtctctggctctcggcccaccccgctcccactcacgctctcgccacctcactcactcactgctccgcccgccacctccatggccgcacccggcgccggcgcgggcggccggcgcgcctccacctcgcgcacccgccgcgcgtccacggcggcggcggagtccaatgagaacgaagacaacgccgccgcgccctcctcgtcctcatccgcgttcgccctcccctctgctccgcatttctcgctgcccccgaggtcgccgctctcggccatcgcggatcccgggcggaaccctcggtccgcgccggcgacgcccaagtcgctggccggcacgcccagggcctccgcggcggggtcgggggccaaggaccggacctgttcggttggggcggcgaagagggtgttcgatcagagggatgtcgcggccgcggaggtgcccctggaggtgccgcacttcgagctcgacgaggaccccgcgttctggaaggatcgcaatgtgcaggttctgatacgaataagaccaattagtgacgctgagaatgcgactcatggtcagaaaagatgcttactgcaggatagctcaaagacattgagctggacagggcatccggaaaccatgttcacgtttgaccatgttgcatgcgaaacaatatcacaggaaaagctattcagagttgtgggtctgccaatggtggagaactgcatgtcaggatacaatggctgtctgtttgcctatggtcagacgggaagtgggaaaacttacacaatgatgggagaactttcaaagttgggcaatgagcttagtaaagatgctggattgacacctcgcatttttgaatatctttttcggcggataaatgaggaagaagagcgccggagagaagaaaagcttaaatatatctgcaaatgctcttttctagagatttacaatgaacaaataactgatctacttgaaccctcatcaaccaatcttcagatccgtgaagatataaagaaaggggtatatgttgaaaatctgatggaatgttacgtgtcatctgttaatgatgttatgttgctattgctacagggagttgcaaataggaaaatggctgccacaaatatgaacagcgagagcagccgctcacatagtgtttttacttgtgtaattgagagtcgttgggaaagtgattcgatgacacacctccggtttgggaggttgaatttggttgatcttgccggttctgagaggcagaaaagctcaggtgccgaaggagaacgcttgaaagaagctgcaaacattaatagatcgttgtcaacccttgggcttgttattatgactctggtggatgttgcaaatgggagaagccgtcatgttccttatagagattcaaggcttacatttctacttcaggattccctaggagggaactctaaaacaacaattgtttccaatgttagcccatctatatgttcttccagtgagacattgagtaccttgaagtttgcccaacgtgcaaagttgattcaaaataatgcaaaagtaaatgaagacgcttcaggagatgttattgctttacaaaggcagatagaggaactaaaggatcaactgacatgcttgaagaagcaaaaagattgtcctggatcacctagcttgttgcttaattcatactttgccaatgaattcaaaacttcgtgtggagtagatgaacaactagactgtgatctcaatatcctaaagcaaaaggttagccatctagaagatgtcttggttagaagcctcaggagagagaaatcagcagagaccaagattgggaaactggaagcagaaatacaacacttgaaccgtttggtcaacctgatggagtctgacgcacatcgcttgaggaagagactcgaacttcgtggtgaaaaacaaagattacactcgattggtgaaaatgctgcattgtccatggagattcagttgttgcaagaacaaatcaatgaaaatcctcaattgactcacttcgctttggaaaacaagagattgattgaggaacttacaacgcttcataacttctacaagcaaggggaaagagatatgttattgacagaaatatctcttttgcggaatcatttcctccatattcttgagcagaaatacacaacaactcgtaaagaagtagaacctcagggtgatgagctcatcaaggagcttgacagttgcaggaaggaattggatgcgtgcttagaaaacaatgttctattagctcgtgaagtaaataagctgcgctgtgaacttatacaataccagaaagcctgcacaaatcaagttgctcctgaggaaaaggagaatgttgtggccacaagcaccaatgcaatgcaacatgatcaagccgggaagaatttttcatatttgtcaacagatgatgttaacaggcagttcatgcaagcagagatcacaactaatatttcagaatcatttcaacttgaattaccttatgaaattgacagtgaagatccggactctcctcatttgcatgatcctgaaacacatgactttagggatcctagaacagcatcagagtatgatggtgtattgtctcagtgcttaaacttagctatggcgtcttcacatgatgttcttaacaaaagtactattctaactgatctgaattttctagagaaggatgacacatatcatgtccatgaaaagcctccatttaggggtatacatttgcatgatgagactttatcgtgccaagagattgaaacagtgaactcaagtaaacatctatcacaggatgaattggaaaaccttaaaagaacaaatgaagagctcaaagagaagctgtttattatggctgaagaaagcaataagctttcagagattattgttgcaaaagatgtagaaattgcttctttatctgaagaatgggaggctgcaatttttgatctaacaagcttcttaacagatggatgtagatcactggatgatgcatatcagaacattgataatatgattagctcatttcctcacagtaacagttctgtaagtgaacatgttgagaaggctatgaaaattagcattgagaaagaaaagatgatattcaaacttcaaactgaactacaaactgcacaaaaaattggcagggaagtgaaggaaaagctgcatattttaaaaggtgcaacccttgctataactgaagctcagcagttggataatgaagaaaactctcaggaagaactacagctagtgggactattgcaccaaaaggattgtataatacaagaactaaggaacaatttgaaaccagaaaaatttgtatttgcagaaagagcaaaagggcattctcgtgatgacctactgttgcctggtagttcagttgacatgattgaggatcatgatgaaaatcaaccagcagccagtcaagctagtccagattatcagtcaaagcttgatagtgtgatgcatcttgtcgaggacaaatcaaataaggttctggccttattttcaaattttgaggcagctcatgaaaccatggaagaggctgaactcatgctttcagctttgctgaaggccaatgaaggattgaaacttgagagagataattgcaggcaagcggtggaattgttgttgtctgagaaaagttctctgatcggtgagttgaaggaacttgaagcatcaagctcttgtacatcccagaagtatgacaaattgcatcaacagataaatgagtgtgttacagagatgacaaagctcgctgctacaataaggaagtcgttccagcaaattcaaagtgtttctacagtagaactctttgctctttgctcagagattattacttttggccaagacttgaaaagatatataattgactcaaggtcatatatagcaaacatggtatcacttatagaagaaaaaagcagatctatagagcagttccatcacctaagtacacatgcttgtgggtctgctcgccaacaggtagagtcgaattcatgccagtggggtagcagaaaactttctcaatctgattatagtacagactatgcatcactcagaagagaatttaacaggaagagcaatgttgttgaaggattgtcttttgatcttaaactactgcaagagtctgcctcaaacgcgaaagatatgaaagataaagctgatgaaatatctattgcccttagcaatactcaaagagaactagatatgaaaacttccacaatggaaaccatgttgaaaaaacaaaaggtacttgaggaagaactagctgaaaatggtgccagactcattaatttaagattagagttagagcaatctcaaagtttatcatcagcattattgaaggagaacaaaggtctgagagtgatgttggaagatgaaactatgaagaatagtgaaacaaaagtgctgttggaagaaaaagttaaggtcatagagggactggagagccaaatactatttctaaatcgttgtgaagtggggcagttgatgtcagatattgaagaattaaacaatagcattaaaataatgagtagtgacagagacaatctccaggcagagatatttaagttaagggacaagcttgagatggcattggctttagctgaggaaaatgaagctgctgctattgaagttcgtcaaactgcagagattagtaaaatttatgctgaggaaaaagaagaggaggttaagattcttgaacgatctgtcgaggaacttgaaggaacagtaactgttcttgaggaagaggtatgcaaccttaaagaggaagtaaggaactatcaaatacataaacaatctgaagcccaatttcaagctattaatgacatgcttgctgaagaaaaagcatcaaaatgtgatgctgctgaggaatcgtgtcaagcgaaatgtcatctagaaaagagattgcaagctgagattcttgcacatcaaggtgtcagaaagaagattgaaggtctcaaattggaagcaaagcgtaaagatgatgagattggacaatacaaagagcatattgctgagttggtcctgcattcagaagcacagtccttgttgtttcaggagaagtacaatgaaatggaacacatggtttctagacagaggtttggtccgcatgaatcttattctgagactgtccccaagactgaaaagccttcagggcgagcaagaggatccagctcccctttccggtgcatatctagcattattcaacaaatgaactctgagagagatcaagaaatcttggtggcacgccaacgaattgaagaactagaaggtttggttagttgcaaacagaaagagatatgcttgctaacatcaagactagctgctgtggataccatgacgcatgatattataagagaactacttggtgtcaaactagacatgacaaactatgctaatttggttgaccaagaagagctgcaaaagttgctcatagcatcccagcaacagattgaacaatcaaaggcgaaggatacagagctcgaagcgctgaaggaacaacttggccatcttattctggaaagggacagcttgcttgatgacatggaccaaagaaagacggacctattggaggctcaactgctcgttgaacagctcgagcaacgggagcagatgctagaagcgcagattgaaatgttgcagctggagaaagacagccttcagcaaaagaccttggagatggacgagacaatcgagcttctagccagatcaaaccaaccagatataaatccacgaatgggcgacaaccaccatcgcggcagcagtgagttcagcaggcggctcgctcagtccgacatgctcctctcccacgcgaggcatgagcattctcgcaggcacgcggccggaagctcgaggacgcaccacggccggcaccgatgaagctcgaggatgcttgctagtagaatgctggtgcgtcagccgccagacaccgcttgtgtttgtagcggactagcggcgcggcttctctggccgggactgtacagaagctgcaccgaatggcagtggccagaagaaacttcccacgtctgtaagatctgcgcgcctgtaaatctgatagtgcaatgtacgcgttgttgtcatttgggccattgtatgttcttccgcgaggcttttcagcgagatctccctgaaagaagacaaacaactgaaaagtgacataatcccacagatttgtttctactttaccgagggttagctagggttatgtgccgagtcatatctaaatggatcaatcatcgtgccgagtcataatcccttgtaaggaggcgcatatatttacatgctccaattgtttttttctaaaaagcgcgc

SEQ ID NO: 19159 - DNA, 665 bp, Zea Mays
ccctcctctccctcgcgggtcccggcgcggacgcaaggcaaaggcaaaaggcggcagagcccgaaagctgagactcatcaggttacatcatcaactcctcgccctgctattgaatcctcagagagaattgctagggctggttctttgcccccagctttggaaccagagtctcctagaatagaggcgcctaaggttgtgcgctcatctacaatcatgtcagcatcgggacttagtttgctagctggaactacaacaccacctaaaagagaccagccgggtgctttcagcagaacaagttcaatgaaggaaggatcctctgagttaccgagtggtgtccgaagctcagcagaaccaagccccaggagatctggcggttcaaccctttttggagggcttggttttctaaggagctacaccagctgagacgaacttaataccttgcagggcaatgcctggagggttgtatattgcactggattatactagtagaatacatgtttggcaaggagcagttgcaactaaatttgtgcttttcttggactcaaacctgctggctgatgatgcttgcttggatagcatgtatgcaacatttgttgtggcagctgcaggctgcaggcatatctggaaactctggatccactcacggttggatttccacccagtac

SEQ ID NO: 19160 - DNA, 2608 bp, Zea Mays
ccgtcacagcccgcgataaacgaaagagatcctggacagggaaagcgagcccgtgcggtgtggtcgagccagccagccagcgaacatggcacagtggaggtggcaacgacaccggtgaggcgagcctggttcctgaagaactcgctcgcctgctctgcctccctccctctcacaaaatcaccaggggttgcgggctgtggccctggagggcagggcatgcacgcgcgcgcacgaccgacgaccccctcgtgcaagctgcaaaccaccaccccacctcgcccccacgttcccttacgtgccctcccgtccagcgccgcgcggttgcccatcgaagcggccaaggcagggcgccagcgccacccggcccggccccttctcctgcttctgcttgctctggtctccctcctcctcgcgatcgagctcccgcgcttggcttggcttggctgcgcacttgtctaaagtctaaaccaaagccgctccggccatggtcgcgtcgccgtcacccacaccgtcggcaccctcgtcctcgccctgcagctgcagcagcagcagcagctgcagccccgtcacgtccggcgcggcgcaccgccgccgcctcccggacttgcccgccgcagcggaccgctccggcggggcggcgcgtgcgagggccctgttcttcgcccggagggccagcggcaagcgggcggcggccgtgctcgaccaggcctgggcgcggaacgcggtggcgtgcctgctcggcgccgccgtcgtcgtcggcctcgtcacgacgacctcgcgccggggcgccgtcgtcggcgcggggatggggagccgcctcgtccgcagggcggtgcccgccgaggcgctgcggttgggggaggaggagaacctcgccgccgtggctcgccgcccgctcgacgacgacgacccgccgccgtcgatgatggcccaggtatggacaaaaccagatagcgagggctacacgaagtgcactggacgcacgaagaatcgtcacggaaccaacagtacgaccgctggctatataatcgccgacgccaatggtggacttaaccaaatgagactgggaataagtgacatggtcgcggttgctaagctcatgaatgccacactagtaatcccggccctggatcacaaatcgttctggactgatccaagtgatttcaaagatatatttgacgtgcaacacttcaagcaaactctagaggatgatatcatggttgtggactccttgccgccagatttcaaaaggttcaaaccctacactagagcacccaagtcctgggccagggcttcttattatagggcattcacaaagacactgaagaaggccagggttgtgagattcacacatacagattcacgcattgccaacaacggtctccctccttccatccaaaggctccgatgccgtgcaaactacgaggcgctaaggtacagtcgagagatcgaagagctaggtaatactctagtcggcagactgaggaacggatccaaccactacatcgcacttcacctaaggtatgagaaggacatgctctcattcactggctgcagccacaacctaacacatcaagaggcagaggagctgagggaaatgcgactcagggtgcagcactggaaagagaaggagatcaacggtaaggagagaagactccaaggaggctgccctatgactcctcgtgaagcggctcttttcctgaaagctatgggttacccttccagcacaaggatctacgtcgtatcaggcgaaatatatggtgtgcgtagcatggacgcgttgaaggccgaatatccaaatgtctacacacattatagtctggcaacagtaaatgaattagagtctctcaggctgtaccagaacaggttagctgctgtagactacaatgtagccctccagagtgatgtttttgtgtatacatatgatgggaatatggctagagcagtccagggccataggagatacgaaggattccagaagaccataaaccctgacaggcgcaagcttgtcgagctcattgacaagctagatgaaggtacaatagattggacagggtttgcaagtgaggtgaagatgcaccatggaaacaggcttggaggtccgtatcagaggctgtttggtcgaagtccaaggcatgaggagtatttttatgcaaatcctcttccagggtgcttgtgcagaagaaacacacaggatcaagtggcatgaaccttacatacgaatagactgttatcatatattgaactttcctccaacccattgacatacaccaaacagtgaaaatccgggtaaactgacagcaaaaagacaagtttatgtagttttccatcttacatgaggatacaagagggaacactcactgaaatgtgcattttcaaaagatgtttattcaggttttaaaatagaacaggcaaagatattcaaagaggatacgtgttgtaccacagagtatataattagcagatttgatgagtttttagtgtatgtttgtatttactccatagtccacatgtaaagcctctcatgtatgagattcttctgggagcctccgacacttggtttgtcctccagatgtacagccttaaatctaaaaattaactttattca

SEQ ID NO: 19161 - DNA, 2957 bp, Zea Mays
ccgccactaccctgctccctcccccaagccgccgccactccttctccctccccctttctctctcttctctctctaccgcccacctctctccacctcctctccccaagccgcgccaccaggagtgcagcagccgctagaagctgccatccgcccgccaggagttcagtcaatctcctgtctcctgagagccgccgcccgccgagtcccgctcgccgctcggtcgctcccgtgaggcgctcgatctcctcagcgccgcgcccacccagccacggtggagccacccttcgtcccgtcgtccggcggccggccctcaatccctcacgccctagcttctctgccatttccggtcagcccctcacgccctagctttcctatcaggcgctcggtcgctccctttgccacgcgctcctagcttctctggtcggctcttcctccgccatttccggttggatcctcctatgagctttaatatatagaaatatcaacgagtcgccgataaaaaaccaagcatgaatgtgcagtgcagtgctcgacaaacggcaccagcgccgctgggtactgtcaccgcttcggtcgccggagcccggagatgtaaatgcgctggagttttcatgctgtcgctggaggaattgaggaagaaagtttggtaaccgtatactgctctaagaagttttgccagttttgatcatagccaagcttttgattcatcataatctgatcctgtaaccaatttctctccctatgtctagagcagcctcgtggccaatgcaattgatgccctggaactgccgaagggatctgcaattgctattgacatgcctatggatgttacctaatttcaggatgctaaggtaataatgcttggactggtacccagcatcgttcgtacttggaagaatacggactgtacagctggactagactggtcctccatccggtaattttttaattgctcaactatccagaccttttgtcttaactttgcaagttacacatatagtatggtatgcagtttctattgaccatattcattatatacagatgctttagctcctctagggaggcatccagtgtggattttgtgttaaaggataggttggaaaccacacgacagcaatatctgaatttcttatttgatgatgctcagatacataattttttgactgagccttgatattctcagaaggtgatgtcagtcttttcctaagagaagtaagtagtgttactccatccttactgctcggatgtcggatcattgactaccactgaggtcagcactggcattttttttaacgtagagctctgcagttcttacgctgacaccttataagtgaaagtgcaatatagaggccttgtgactatcttttcgtcagcaagagaacaacatcgatcttggtagttcttagttgcccctgtgtttcggaagtgttgtgtcagattattatatacccatttctagaaataaccaattgctcatattgcttacttagacaaataagcaatcttgaatctggaattttacagtgtacctgaactatcaactcccttcaacaaacttttttgtatggaacaggagcagcagcaccccccccccccccccgcctagtgaaaatattatgaacagaaaaagaacatcaaacagcaaagaaagaaaccaaaaagttcaacaaacattgcttatcatcaccagcaattattatccttattcctcctaatcagaaatcagctttaacgacctgtttggttgattgtctggtacttctctcaaaatatttatttgatttagctttaggagctatcttgtttccctatgcagggtcttcatttaaacttcctcaggattttatcagtatatattttacttttgcagtttaaacaatggaatgtagcatttatcggttccagctttcaatcttgcaaaatagaagcactgacagcgtgcttgttgcatgcattacctgtaataatgctccatttgtgttctttatttgtttagccactctaatcgacactgcccgtttatttacataggaacgtcaatcatatggatgcttcttcagtggaattatcatgtgaatccccatagtgcccaagctgtgaagcagtcatgattgatgcttgggctgttagctttatgtggtccagggggaggaaggataccttagaaactgtcagaaaagctcatttcatacttcatttttcatcatgttattttgttgcatgagacatttgtccaactgcgtagggaatgaaaattcaaattatttctgccactgattgggggatgtaattccaaacgttgtaaaaggcgactgtatctagtgattatttatggctgatgggaagagctggttgtggtatagtgtcagcagcgtatgatcggttggttcatcaaatctgtccttcgttgattagtttttttgttttgttttgcagatgcagttgaagacccaagatttgaacgacactattgtcacaccgaaagtgtgttcgatgaaatgcctccaacatccggaggtttctatttgtgaaagtttgcaggctaagacaaatgatagctattcaaggagctagaggctgctcaacataaagcatcaacagcaacctctggaacagctgaaaatgctctactggaagctaagtcagtgactgatcttaaatctaaagatttggagaagaagaaaagtgagctttgttcactgatacaagaagttggagtgcttttgtgaaggcttttgcgaatcacttgaagtgttagtacttttgtgaatgattttgtaaagtgtttgcaaatatgtgcaaaacataataacatgtgtaggttttgtgaatgattttgttgtggtgcttgttgatggtttatgtgatgtggatctatcattgtgcaatactaattaaatttgtatatctatgtgattatctgtataaaaattggtgatttgtgatgcttttgtata

SEQ ID NO: 19162 - DNA, 583 bp, Zea Mays
gaaaacgatatcgctcccgcctgttcagcaaagcccatttcttcgggcccaatcagcgcagaatccggtccacgacgactcttcaccccaccctctcctcctccaactagtcaggctgctagtgctacctttcaaaaaacccctacatcctgccatacatccatccgccgccgccgccgccgccatctcctcccactctcttcccactccgacgaaaccctattcagtatccatctctccatccatggcgtggcgcggccccgccacccgggccgtcctcgccgccgtccgccgcccggcagcggccgcgcgcctccacgccccgcgccgccgcgtcccgcccgccttcgccaccacctcctccccgctcccgtccgcgcggcctctggcggcgttgatggggtccccggtgacggtggccgccgtgatggcgcgtctcacggcgcatcccggcgccagcgcgcgcgcgtgctgcgagctttcccagggtacttgaatctgttgtgtagatcccatcctttcgaaaggataaatgatgtgtcttttgggggaataaaagctattatggcatttcttccacagc

SEQ ID NO: 19163 - DNA, 961 bp, Zea Mays
caaagttgcatgggattatgtttgaaatagatgatttgtgtgcaatgttatcttctttcctccataaatagactgccaatatttagatctgctgctggaagaacttcgttatcctgcggttgctttgaactctcacaagtctcaggcacagcggctctcagcacttaaccggtttaaatccggtcaggttcctgtattgcttgccactgatgtgggcagtcgtgggttagatatccagacagttgatcttgttatcaactacgacatgccgatgtctccacgtgattacatccaccgggttggacgaactgcaagagcttcaaggggagggctcgctataagctttgttacacagaaggatatatgtcttttacacgagatagaagatgttgtggaaaagcagttggaggcctatgagtgcagtgataaagaagttactaaagatattacaaaggtgttcaaagcaatacgtctctcgaaaatgaggaggagggacgagggacatgatgagaaagtagaagcaagaaaagaacagaagagaagagatcgggcaagaaagaggaaacatgaagactaaaacccatagaaggacgaatgttgaaggccgctgtgcccgatctaaaacgttaaacatgagaggcagttgcttgttcagtctagcgagtagctttaacctggaggagtcgatgatgactcgctccagtgagcccattcagtcgactgctctcagttttgccggcgttgtgctgtggatgtataaatttagggggtggctcggcagatgtgccactgaattcgtggcgcagcagtaatggacgaaacttcaccattgcttgtcagtacttactttgttctaaaggaattataattctcgctctttgacgagttaatctatctctgattaggtgaaacaaatatataatcaatatttacaatataaaatagatatgttataaaagat

SEQ ID NO: 19164 - DNA, 3122 bp, Zea Mays
accatcacttgttctctcttctctctctctcgtcgtgtgcctgggtcgaccagcgacctggctagctagctctccagctgcgcgcgccatggccaacccaacagctaccaagcatgctttcaagcgtattttgacgagcctgcttaagcctggcggtggtgaatacggcaagttcttcagccttccggcgctaaatgatccaaggatcgataagcttccctactctatacgtgttctcctggaatcagctatccgccattgtgataacttccaagttacagagagtgatgttgagaaaatcattgattgggagaacacatctccaaagctggctgagatacctttcaagccagcgagatgcattctaatggacaacactggagtcccagcagttgtagaccttgcagctatgcgtgatatgatgccaaagttgggatgtgatccctacaagattaatccattgattcccgtggatgctgttattgaccacgcagtgcgagtggatgtagcagggacctatgatgcattggatagaaacgaggagctggagttccaacgcaacaaagaaaggtttgcttttcttaaatgggcatccaatgctttccacaacatgcaggttttccctcctggttcgggcactgtacaccaggtaaatcttgagtatcttgcccgagttgtcttcaacgaagatggcattctttacttcgacagcgtggttggcacagactcacacaccactatgattaatagtcttggagttgctgggtggggagtaggcggtattgaagcagtcgttgcaatgcttggccagccaatgggcatggttttgcctggtgtggttggattcaaattgagtgggaagttacgggatggtgtcactactactgacattgttcttaccatgacccaaatgctaaggaagcacggtgctattggcaaattcgttgaattctatggtgtcgatgattgaagcatacctgcgagctaacaaaatgtttgtggacaagcatgagcctgagacggaacgcgttttctcttcacatctggagctggaccttagtgaggtggagccttgcgtttcaggccccaaaaggcctcatgatcgtgtccctttgaaggaaatgaagtcagactggcatgcttgcctggacaacgaagttggcttcaagggctatgcggtgccaaaggaacagcaaggcaaagttgtgaaattcgacttccatggaaggccagctgaaatcaagcatggcagtgttgttcttgcagcaatatgtagctccacaaacacatcaaatcccagcgtcatgattggtgctggccttgtggcaaagaaagcctgcgaattaggccttgaggtgaagccatgggtaaagacaagccttacccctggatctgtggttgctaccgagtacttgaaacatagtggccttcaagattatctgaaccagcaagggttccatgtcgctgcgcatggttgcgccacttgtgtgggcaactccggtgacctggatggatctgtatcagctgctatcacagaaaatgatatggttgctgctgcggtgctgtcggccaaccgaaacttcgaggggcgtgtgaaccctctcactcgggctaactaccttgcctcgccgcctctggttgttgcctatgctcttgccggcactgttgacattgactttgagaaagagcccattggagttggaaagggtggtaaggaagttttcttgagggacatatggccttcaaaccaagagatcgatgaggttgtggagtccagcgtgcagactcacctgttcaagaaagtgtacgactcaattatggaacgtaaccctaggtggaaccagctgccggttccaaaggaggcactgtacccatgggaagacaggtccacctacatccgcaagcctacgtacctggagggcatgtccatgacgccgcctgcagccccgcccacggtgacggaggcctactgcctgctcaaccttggggacagcatcaccacggaccacatctcctactcggggaagatccccgagggcacacctgcggccaagtatctgctcgagtatggcgtggagcccaagaacttcagctcctatggtggccgccgcgggaacaacgaggtggtgatgaggggagcgtttgccaatatgaggatcgtgaataagcttcttgatggcaaggctggtccctggacgatccatgttcctaccggggagaagctctatgtttacgacgcggcaatgaagtacaagtcggaaggtcatgacatggtcatcattgctggctccgagtacggcagtggcagctctcgtgactctgctgccaagggaccaatgctactgggtgtcaagtcggtgattgcaaagagcttcgagcggatccaccggagcaacttggtggggatggggatcattcctctctgctttaaagcaggagaggatgccgattcactcggcctcaccggacgtgagcgctacaccatccacctccctaccagcaccgccgagctcagtccaggccaggacgtgaccgtcacaacccacgacggcagatccttcacttgcactcttcgcttggacacacagcttgaggtcacatacttcaaccatggaggcatccttccctacatggtccgcaacctggcagcacagatgaaataagttaaaaagcaagctagcttattggcgcggtgggaataaattaaaaaggtactcagtgccccacgtatttgacgtatgtctgtaaataagtggcacattcgagcgctcttcgctctgccattgaggtggatcgaagctgccacatattttctccgcaggacatcggcacgaattttgtcttagcaaaccagttaattttgtactctttagattctttaattggttccatgctctctttggtacttttcatgtcagtttgctttgcaaacattatcagcgtgcccttgtagatttcgtaatggttatatgtatatgccctattgaaattgtcattttgctttgcaaaaaaatatcagcgtgccgttgtagattttcaaatgtatatgtctgccgtcaaactctctcgtgaatatgtttggttacaataatggaacaggacggaatgaaacgattccaagt

SEQ ID NO: 19165 - DNA, 938 bp, Zea Mays
ctaccactgtagccgttttaggggctacagtccgcccctatccccttcaccggcttcctcctcctcctcctcttccctctcgattccttctctctcccgctaaatggatgggcacgctactgcgccagatttctccccagccggttccttcggccacgcgaccgcgcgctcggaaaactccacggacagcgaaggaggtgaaccaaggacgacgtatctgtcgccggagaagcgcggaatctaccttgtgctgacagatccggggaaaccctcgttcctggtcgttccggctcgaatcttctgcggactggcaatgtaagcgttctccattggagggcgacgatctacggggcggttgttggcggggttgcgggaatggagcacgtgttcggagggaagtttaagcctgggaagaagatcgggagcggatctttcggcgagctctatctaggcgtcaacatacagagcagcgaacaatatcagattattgcaaaaatgtggtacatctttcttcagctggatgtcatcactcacgaatgggttacccatgctagatggagccactgctgccgttccacttgaacagaagttttcagcaagtacaggagatggatctgcagcaccttcccagccacttcaaaacaaccgcagcgttcctatgcaattttttggcttcaatttgctcttccagtccctgtatactcgtaatgttctgcatgtaattgctttaaaaaagactggcatggtcccgagctatatttttagctgagtaataacaagattttaaaaccttttcttggttgtccatgcgaattgacctgtgcatccagttctaattccaatcatggttctgttacctttcattagtgataactgtataacagtatctatttttataaagaaagtaacaaggcatattttcagaacatatgaagaaa

SEQ ID NO: 19166 - DNA, 1488 bp, Zea Mays
ttatcgtcagaaccggtctggttaaaagatagcgccgtagcgcaatgaaggcaccatcgctactggttcggtgtttccctggcttgcttcccagcaaggacactagttgtgtgccaattgtgtccgagaaggatctgcagctaccatcactagccgttgaaataattccctcaaagagtgctcacccgtacaaatatgctggagagaaggttgatgtgcaaggttttgatattttcaagggtaaagttagtgtagcagatatgatatccttctcaccttctgaagtagcatcatcaaaatatgatggagctctgaaaagctgggagaattctattactcttgtcaacattattcgaaatgagatccgtgatggccagttgagcttcaggggcaagcgggttctagagcttggatgtggatctggcgtctccgggattttttcatgcttgaagggtgcatccaccgttcactttcaggacatgaacgcagaaaccatacggtgcagaacaatacccaatgttcttgcaaacctcgagcaggctcgggacaggcagaacagaccatcagaagagagccccgtgacgccatcccggcagctcttggatccaaacgtgcatttctatgccggagagtgggatgaactcccgacagttctctcggctgtgccgccacccgcggcgccagcagacctcagcttctccgaagacgatttcatggatggcggcagcagtagtcatgatggaagcagtgtagtcgtcggccaggactactgccccagaagatctaggaagctctccggtagccgccgcgcgtgggagagggctaataacgagaccgaccaggcagatggcggctacgatgtgattttggtctccgatgtcccctacgcagctaactctctgaagaagctccatgcgcttatttcaaagtgcctacgccctccgtacggagtcatgtactacgtggcatcgaagaagagctcggttgggtccaacggtggcgccaggcagctccgagctctgatggaagagggaggcgtccttggcggccacttgttgaccgaggtgtgtgacagggagatatggaagttcttcttcaagtgagcagatccagggactgggagtgggaacggcaggggaaatggatccttcctgacgttgaaatgaaacccagttttttttttggtttctatctgcagcgatgtacatacataccgcgaggcgtatagtacgtagttccattaattctttggcagcagcagcagcaacgttgaagcttcaagaatcaaatacctgtagctgagcttgcacgaatccttcgccgcctttgtagagatctgtctgctatgtgctgtgctagtgtcgttctgttaaagtacagagagcaaattgtagtgacctttttgtgtatatcgaatacacggtgatggcaattcggccggtgcatggtatgtgtgagaaactcgcgcacaatttctacatgcatctt

SEQ ID NO: 19167 - DNA, 1520 bp, Zea Mays
gccgccgcctcgttccgcagtccagtccaggcacaggtggacgggcaggttcgaggcgcatctctgggacaagcactgcctcgccgcgctccacaacaagaagaaaggcaggcaagtctatctgggcaagtctgcgtccctttgatggcttgtcgccagatcctgctgcgatctgcgtccttgtcttaatgcggggcggaaccgggattaattcggtcaattatgcatgcgtgcgtgtgcatgatctgcaggggcgtacgacggcgaggaggcagcggctcgtgcctatgaccttgcagctctcaagtactggggtcctgaggctctgctcaacttccctgtggaggattactccagcgagatgccggagatggaggcagcgtcccgggaggagtacctggcctccctccgccgcaggagcagcggcttctccaggggggtctccaagtacagaggcgtcgccaggcatcaccacaacgggagatgggaggcacggatcgggcgagttttagggaacaagtacctctacttgggaacattcgacactcaagaagaggcagccaaggcctatgatcttgcggccatcgaataccgaggtgccaatgctgtaaccaacttcgacatcagctgctacctggaccacccactgttcctggcgcagctccagcaggagcagccacaggtggtgccagcgctcgaccaagaacctcaggctgatcagagagaacctgaaaccacagcccaagagcctgtgtcaagccaagccaagacaccggcggatgacaatgcagagcctgatgacatcgcggagcccctcatcacggtcgacaacagcgtcgaggagagcttatggagtccttgcatggattatgagctagacaccatgtcgagatctaactttggcagctcgatcaacctgagcgagtggttcactgacgcagacttcgacagcgacttgggatgcctgttcgacgggcgctctgcagttgatggaggaagcaagggtggcgtaggtgtggcggatttcagtttgtttgaagcaggtgatggtcagctgaaggatgttctttcggatatggaagaggggatacaacctccaacgataatcagtgtgtgcaattgattctgagacctatgcgtggcgtgcgacaagtgtcctgtctttgggtatacttggtttgtccaatgccacggtgccactgctgcgagtcagctgaacttcttgtagaaagcacatggcagcttggcattagacaagtgtgttggtgttccttaattctttggatatgctttaggcattgactaaccttaagggttcgtcactgtctcgcttagcttagattagactaatcacatccttgaatctgaagtagttgtgcagtatcacagtttcacatggcaattctgccaatgcagcatagatttgttcgtttgaacagctgtaactgtaaccctatagctccagattaaggaacagtttgtttttcatccatacatataacacgctttcagaagcagac

SEQ ID NO: 19168 - DNA, 358 bp, Zea Mays
cagatactccctccggtgcatcaataatcgacgttctagctttgagtccaaagtgcacgataaattgacgtttcacgtggagcgaggagaactctcgattgacgcagcaagaagtaaattcaccagccgtccgttggccttctccacgccatgcatttgcatgcaaaatggtaaaaaatttagtattgcgtgagtcaagaatcgaacctaggcctcctgcctgggaaggagtgaagatgaccactccggctattaaagggatttgactaggaatgaaaaagtgtggtatttattagttccttggtatgtgagaagctgtccaaaacgtcagtttttggtacaccggagggagtagatt

SEQ ID NO: 19169 - DNA, 2145 bp, Zea Mays
cgacagtcgacaacacggtcaccaactgctcccgtctaacgatcaggatccagacgccaaggaagaagggtgaggtagaggttgacacagaaatcaattttctcctttctcggtctcgcgagcaagcctcgccatggatatctgcaccagttgcttccaagccagatattagagctgcctactacttgcgtcgcgcggagagcgggttgggaccagaaacaagagtagagcaagactcctatcttttttccacgcgccagtcttctctgaaccggtgaacccattcctcctcctcttcctactcaacgccacgatcgaagaggagactcagtcaatctcgccttgctctcctcttcgacccatcgtcggttcctgggatcagcatcgacgagcaggatttttccggctgtggaggagcacgagcacgagcaggagaaggcggctagaaggttcctgctcccgggcgtgacctctcacacggcatggtcgttgcttcgccggggaggcgcagcggggatggtcgataggagcagggccgtgctcatcggggtcaccgccggcgtcgcggccgcgctggtcgcggcggcgggcgtgcttctggccgtctggctctaccgccggcgggccagcgtcgccgcacggacgcgctccccggagtcgccctcggcgacgctgcgggccggcggcgccggtcgcgccagcctcgactccagcgtctccgtctcggtggtctccgagagcgccgccgactggggccacccgccaccgcacaaacgcgccgcgttctgggcctggagaggcggcgccggccacaacggcagggagccgccaccgctgtccgtctccgggatcccaaaataccattacaaggatctgcagaaggctaccagcaactttaccacaattcttgggcaaggatcgttcggccctgtgtacaaagctgtaatggccactggtgaagtggtagctgtaaaggtgctcgcgagtgattcaaggcaaggggaaagagagttccagactgaggtagcattgcttagcaggttgcatcataggaatcttgttaatttggttgggtattgtgtagaaaaaggtcagcgcattctgatttatgagtacatgagcaatgggagtttggcaagacttttatatggcgacaataaacgaagtttgagctggcaagaaaggctgcaaattgctcacgatgtttctcatgggattgagtacctgcatgaaggggctgttccttctgttattcacagggacctaaagtctgataatatacttttggaccattcaatgagagccaaggttgcagactttggtctatcaaaggaggaagtgtatgatggaaggaagtctggccttaagggcacctatggctatatggatcctgattacatgtccacaaataagctaacaaagaagagcgacgtgtatagctttggcataatactttttgaactgataactgccataaatccacaacaaggtctgatggagtacattaatctggcagcgattggaggggaggggagggttgattgggacgagatactggacaaggacctcctagtagggaacatccctgaagaggttcggatgcttgctgatgttgcctaccgatgcgttaacaagaatccgaggaagcgcccctggatatcagaggtcacacaggccatctcaagactcagacagcaccagctgataaagcatgatgcgataactctgccgaggagtgagaccaggaccgtccttaggaggatagactaccagcacgtggagcttagtgacctcactagcatcaaagaacttacgccgataagggcatcatgaactcgtgagcttgttctagtatgtaggttgctttatagagttagatttggacttggttcggcgatgttgtagctgtttgatgaaagcatcaggtagctagatcgttgaaagatgtcttggctgcaatgagagctctccttaattggagttctgtactgacctgaggtttgaaatcgttgtaaaaaaatcaacagtagtagctgtagcatttgataaaaaaagactttataaactgcatttttaccatggccatgtgagtacagacactgaattcgacagtagtagctcagtgtgagtaaagacactggattt

SEQ ID NO: 19170 - DNA, 2423 bp, Zea Mays
gggtgcagtgcagtgcttcctcatcttttcttctttctattgggatatcaaagatcaaatcgtgcacttcacttttcctcttcgatcttttcagcaattcattacacttcgacgagctcctgggcaaaggcgccatgaagtcggtgtaccggggcttcgacgaggagcgcggcgtggaggtggcgtggaaccaggcgagcctcgccgacgtgctccgctccccggacgccgtgcagcgcatgtactcggaggtgcagctgctgagcgagctccggcacgacggcatcatcggcttccacgcgtcctgggtggacgtgcccgggcgcagcttcaacttcatcaccgagctcttctcctccggcacgctccgctcctaccgcctccggtacccccgcgtgaacctgcgcgccgtccggtcgtgggcgcggcagctgctggggggcctcgcctacctgcacgcgcgcgacccgccggtcatccaccgcgacctcaagtgcgacaacatcttcgtcaacggccaccagggccacgtcaagatcggcgacctcgggctcgccgcggtgctccgccggggcggcgccgcgcacagcgtcatcggcacgcccgagttcatggcgcccgagatgtacgacgaggagtacgacgagcgcgtcgacgtctacgccttcgggatgtgcatgctggagatgctcaccgtcgagtacccctacagcgagtgcaccaacccggcgcagatctacaagaaggtcaccgcaggcaggctccccgacgcgttctaccgggtggacgacgacgacgcgcgcaggttcatcggccgctgcctcgtccccgccgccaaccgcccgtccgccgccgagctgctgctggaccctttcctcctccaccaccaccaccatgctgctgctgctgctggcacggtaccagtgccgtcaccattgccaactaccgctgttgccgccggcgctccgccgccctcgacgtgtagtagctccgcggccgacgatgatgtcgtctcggcgttggacgacgacgacgaggtggacgtgccgcccaggaatgacatgaccatcaccgggaagctgaacgcggaggaggacaccatcttcctgaaggtgcagatcgccgacgaggcgtcggggcacgcgcgcaacatctacttcccgttcgacatggcgagcgacacggcggcggaggtggcgcaggagatggtgaaggagctggacatcacggaccgccacgcgtcggagatcgccgccatgatccaacaggagatcggcaggctgctgccggggcgagcgcagcagcacgagtacacgtacgcgtcacgcggcggcgactacgacgacgaggagcggcctcctcccttctactacctctcctcgtcccccgcatcctcccatggttctcactgcggggtggggccatatgccttcggaggcttctctggcccatgtggcagtgcttggaccaaagatcatgactggtacgctttaagcgacaacgacgatgacatgagctccgtgcactccggtaagtactctcctgtgcactacgcgtcaggtgccggccacgaggaggcgccggccagcagcagcggctcgtccaagacaaggttcggcggcggcggctccggttccgccgcggcgctcgcgcggcagctggagcggcagtgcagcgtgtcgccgcagcacgcggggcggccgcggcggcgggaggacgacgacgaccgggccggcaggcggaggaggatgacgcggaaccggtccatggtggacatgcggagccagctgctgcaccgcacgctggtggaggagctcaaccgccgcctcttcttcaacaccgtcggcgccgtcgagaacatcggcttccgcgcgcccaccaccaccgccgcctcgtcctcctcgtctgcgcgcggcggcctcgaccgcggcaggagaccaggcggcggcggcaagcagcggcagctggacgacaaggagcagcagtatttcatgctttgattgccgctccgcatacgaccgactttttttttttgacaacatatctggtgtcacatattaaatcatcaccactcattttagatctaatatctctagttgtttggtacattttattaaggataccctccaacgtggtgttgtatagtggtggaaggtgttatttgtaaattgaataatcaactagagacgttagatctaaaatgagtgttaatgatttaatatgtgcaccatgtacaccagtcttctatgtgtaccagatatgtcctctttttttgttttggccgtcgcgtgggatgagatcgagtactgtgtgtacatatacatatgcagcttggagaaataatgtatgtttcaagagcgtaaagtttgttacaaactcgcaatgcatactgtgattaattacattacaccagctattctttg

SEQ ID NO: 19171 - DNA, 1858 bp, Zea Mays
ggaacttaacagttaacatagtggcacaattgagggtgagcctcttataacagagagagtttgggatgcaattgtcaaggcctttgcaagtcagatgaagactacctttacggcttcaagctttgtgaaagaaatatttactcttgggtatccaagactgttttcgatggttgaaaacctccttgagaggatttcaagagatactgatgtaaagggcacccttccagctctcactcctgaaggaaaagatcatatgatttcagccattgagatgttccagacagcctttttggctctgtgtcatagtcggctatctgattatgtcaacagcatatttccaatgtcaaaccgtggaactataccttcaaaggatcagatctcaagattggtttctcgcatacaagaagaaatcgaagtagtgagaactcatgggcatttgcttgttcttgttctacgtgaaattggaaagaccttgcttcttttagcacagagagcagaatatcagatctctactggccccgaagctcgacaagttaccggcacagcgactgcagcccaactaaaaaattttgctctgtgtcttcaccttcaggaggttcacatgcgcatttctagcgtcttgtcaacactcccaaatgttgcttctgaagtcctttcaccctcccttggtgttgtttatggtgttgcttgtgattcagtgacttccctgttccaagcgatgcttgatcgtctcgagtcatgcatcctgaaaatgcatgagcaggactttgcaggtcagggaatggatgcatcaatggataacaatgcatcagcttacatggaagagcttcagaaatgtgctgtccacttccgcagcgagttcttatcgaagctgttgccttcatcatcctctcgatcagaaaccatatgtaccatcatggttagaaggatggcctcaagggtactcatattttttataaggcatgcttctcttgtcaggccactctcagaagcagggaagttgagaatggcacgggacatggctgagctggagcttgctgttggtcagaatctgtttccagtggagcagctgggggcaccataccgggcactacgggcattccgtcctgtcttgttcctggaaacatctcagcttgacaagtttccgctccttcaggacttgccgcctagtgtgatcctccaccatctgtattctcgagggcctgatgaactgcagtcgccattacagcgcaacaagctcacacctttgcagtactctctgtggcttgattcacaaggcaaggaccagatctggaagggggtcaaagcaaccctagatgactacgagatgagggtcagatctcgaggagacaaggaattcagtccggtgtatcctctcatgcttcagattggatcttcattgtctcagcccaacacctaacatgtctctggttcaatcttgcatctgtatcatcttgtaggcattgatttttgaggggtcgggtgaagcttcggcatagtctatacacatgaaataggggatttgtgtttgttcctgaaaataatggttagcgtacattgtcttgatgttctgctagtttctgtatctttttgtaactctgatccgtgaaatatttgaaaaaggtgtcgtttcacaaatacatcagcgtcgtggaaggaggtaaatatagaggttaaaaaaggcgagaagacctcttgtgatcaacttcatccaatttcgtattttttttgctagacatagttgcttgattcgagtaggaccatacaataaaacaaaactagttagttgttagatgagtgctctctttctagataggtttaaattccaacagatgtatatttttttaatattttccgc

SEQ ID NO: 19172 - DNA, 404 bp, Zea Mays
cacatcgttcgcgaagttggagaggaagctccacgcagtagtttgaggaggaggctaaggtttcacatgcagtcgagggaaaaagggagagagagggaggcatggtgttagcgatgcctagcgaggctgcagaagagaaacgagcagcaatggcagatttcgtggagaagaggtaaggaaggcagcgaggaaggagacgaggcagagaagtagcgtttctgttatgtgttttaccatgtcttcctcagtttgagacacacatatatcgttctatacaggccgaacccaggtaatgtattacatagcccatctaagcccatttagcacattcttacgtcgttgccggcttgccgctgaagcctaggcacgacatcttcgtccctctgacaccgcatgccgctgac

SEQ ID NO: 19173 - DNA, 1154 bp, Zea Mays
caaggatgttctggttctgttttggctagccacaaccacctcatcctgagcgcccatgaaagctcccttaggtttgatataccaaggccgcccagctcaagagggctacaaactttgtttcatgccacgtgatagtgccccctttcacatctttgcggccacgccaaaggaagccccgccgtatcttgtcaatggctttgaaggcccatcatggataaatacaaagacctgcatcctaggttgccagtcattgttgctgagacgcttctttatactgatcctgagattgagctaccactttggttggttcagatgttcaaggctaataaggcagggaacaagatctcatggggcatgtctggaaaagaggcagatcctgctgctttattcagattgtacataaactacggacgccacgcagaagccaccaacctgctggtggagtatctagagtcgttcgcatcgtcgaggccagtggacgtcctccaccgcaagaagatgtccgccgtttggttcccctacaccgccgtcgagaggctctggtgccagcttggtgagatgcaacgggcagggcacagcgtggatcagtgcgaccggctcaagaagctgctgcacggagccctgatgagccacctgcagcaggtcgtggtcgactcggatgatgtgctgtcgtcagttggagatgggcaggggatggaggaccagagcagctgaagtcctgaagatcgtgttgttggcatgtgtagaaaacgatgtgccaccgctggatactgtatgtgattgtttgtgtggtcagctgaccaagagttacgcctgtgtcttttatatagaattattattagatgaaaacaaagacggagcgatggctccatttgtaacgtgagcatggaactgtcgctgatgacgagctgttcacttcccatgtgtagatgtagaaggtggattgacgcatccattacagcactgctgcactggtattgtatcggttctgccttcggggtgtgtaatggggttgttgcgatcgggttcagattagtgttgagcgtcgtggcattagggcatgtacaataccattcaatatatggtcttttaaggggtttctaaagagttaattaaaaaaatacaagagattacctctttatgaaaagcttgtt

SEQ ID NO: 19174 - DNA, 5478 bp, Zea Mays
aacgtcgtcgccgcacaggcacagaagctcccctcgcctgcggtcactgcatggtcgaatttgccccttgtgctttcctctccttcctgcaaggagtcgagacgagacatcatcccttctctctccacatctctcgaccccgacctcgctcgccgtctcttccctgcccctgcccctgccccctcagctgcgatctccctccctcccccgaatcgctgaatttttctcactcctcctccttcccatctcggatcgactccaagacgccgagcccactttggtgacccagccccgaaatccccaatcgagctcgaccggaacccgtcgattccgccggattcgacctcccgccggtgaggcggttcgcctgaatcggccgattggacccgaattcgggtgttccggatgcgctcagagcggaggcttgcggatctagggttccggagggcctagggttgctgccggcgatctggtgatggtggtgcggcgcggtgccggagctcggcgaggagggttcggcagcgacgttggagaagatgcagcgagccggatatgcatgggtggcgcggcgctgaggggtgcgacgtcaggaggcggcgtctcgttcggctcatgtggccagcggcacgcgtagaggcagaagctccaccaccaccggcacaaggaccagctacttctccttctggttcatctgctacccatcctcggactacttatcggccggaatcgagtgcgcagaagcaggagtgcatcgatcttccctgcccagtgtcatctgattcctttgtaaaggacgggcgtgagattagagttggcgattgtgctctttttcgggctgtcgatgtccctccattcattggattgatacgttggattgagaagaaggaagaaggctatcccaaattacgtgttagttggctttatagacctaacgacgtgaagcttaacaagggtatacaactcaacgctgcaccaaacgagatcttctactctttccaccaggacgaagcatctgctgtttctctgctgcatccttgcaaagttgcctttttacggaaaggtgttgagctaccagctggaattgcttcatttgtatgttggcgcgtgtacgatattgacaacaagtgcttatggtggcttactgaccgggactatattaatgaacggcaggaagaagtaaatcgccttctatacagaacaaggctagaaatgcgtgccgcattacaatcaggtggacgctctccaaagcgcttaaatagtccttcagcttcccagcaactgaagactgcttcagatggtacacagaatggtggtttgtctagaggaaagaagagagagagaagtgaacagggagttgatccagccaagcgggatcgtgatcgtctacttaaggttgatgacggtgagcctggaagctttaacttggatgatattaagtccgaaatagcaaagataacagaaaaaggtggacttccaaatgcagaagcagttgcaaaacttgtacatcttatgcaacttgatcgaactgagcagaagatagaccatagtggtcgggttatacttgctgatgttattgctgctacagatagtcccgattgcctcggcagatttgtccaatcaaggggccttcccgtgttggacagttggcttcaagaggcccacaaagggaagtctggtgatgggagtagtcctaaagaagcagataagcctattgatgaacttctcttggccctgcttcgtgcactagctaaattgcctattaatctcagtgcattacaaagttgtagcattgggaaatctgtcaatcatctgcgcagccataaaaatctggagattcaaaagaaagctaagtgtcttgttgagaactggaagaagcgtgttgatgctgagatgaagtcaaatgatgtgaagcctttagtttcaggtcaatctgtttcctggtcaggaaaagcaggttttcaagaaatttcaaatgttggaaccaaacgaggtggctcaagtgagaacagtccaaaaaattcagtgcccactctttcatcatcaaaagttttgactgataaacctgggggcacagatgctgcagcgaagttgaatcctggggtatctgcattgtcaaatttacaacatgtgcaatcaacacatgttactaccaacttgaaggagcagccctgcaaatcaactggtgggactggctgtcctgagctgcctactgtaaaagaggagaaaagcagcagttcaagccaatcgccgaacaacagccagtcaatatctagtgagccatcgaaggatgcaagaagttcaactgctgcttctggtggtgctagtaaaacttctggaagctcttcacggagccatcgaagggcaaacaatggtcttgtttcagggaacctgaaggaaccttctgtaggaagatctgtctcccttgatcgatcattgctgcaggataagtcatcccaaactggtacagcttctgaaaaaggaattgatatgccatctgatcatggaaataatcatagattgattgttcgctttccaaatcctggtcgtagtcctgctagaagtgcaagtgctggatcttttgatgacccatctgttactgggggtagagcttcatctcctgtggttgcagataggcatgatcagactgagcgcagggtgaaagtgaagactgaaaattctcggcctcatttagcatctgatgctaatgcagagtcctggcacagcaacgacattaaaggagctactggttcggaggaaggtgataaatcaccatgtgctatattagatgatgacaacagcaggacacctgatcattctgttaaggatgcacatgcatcgcgagctgcgtgctcgtcatatatgaatgaaaaaggtgtcagtgaaactaaggtgggaacctcattcagcccaatgaatgctcttattgaaatcaagtactctgaagctagtcattcactgcaagctggagatgacacagctatgaatcttcttgctagtgtggcaggagaaatatctaaatctgaattggcttcttcaccaagtacttctgtaaagaaattggtctgtgagggtgtcaatactggaaaggttaaagtagaaagtgacatgggcccatcacatccagggcaagcagatgctaagaaagttgccatggggaatgaagtgaaaaaagctgatgtcgtgggcaatagtagtgtattgcagaatgacactgaaaagaaggaacatgtttctccctcttcggctgatgttccaaaactagtaccagcagcgtccccagttggtgtggcaaatgggaataatgagatgaaagaatcaaacggcagttcaagtgaatccaatagccatgtaaaatctgaaggtgtcaattctcagcaaagcgagcaaagtgcaaagcagagttcaaagaaatccagtgatggtgtgtgcggaaaagaagaccatgtcttatcagacgaagaaggttcttctctagccgctcacaccaagtcaaatgctacagccaagcttgattttgacttgaatgaaggaatacctggggatgatgggcatcagtctgagacaactgcctcacctgttgtatgttcctcagcaatccatttaactgggcttttgccattcacttcgcctactacaagtgggttgccgccagctccaataacagtagctgctccagctaaaggaccctttgttcctcctgaaaacctactaagagcaaagccagagatcgggtggaaaggttcagcagctacgagtgcatttcgccctgctgaaccaaggaagattttggagatgcctgctgccacacgtgacattccagtatctcatgctgctgggaagcagtctcgtcccacgcttggtttcgatttgaatgttgcagatgaccaagctctcgaggaagattttccacagagttctgcacagactacctgttcagaatctggaaatacgagaagtcgagatggctcgtcacgaagtgctggtattgaacttgatctgaacagagctgatgaagttgcagacaatggccaatttgtaccaaatgcttcacacagagttgaagtcccattgttttcgacgagatcgttacctagagttttatctaatgctggcgcaaatagctcaagggactttgatcttaatagtggacccgacctttatgatgttggcactgaacctgcaccaaggagcctaccttctaaaaatacaagcagtattcaattcctaccacaagttcctgttaggatgaatagtgatgccatgagtaataatatatcaccatggcttgtctctaccagtccttgtggtccagtagctatacagtcttttttaccatctagagaacagccttacccattggaggcagcacctggagcccagcggattattgcgcctacagctgatggtggccaatttggaggtgatccctgcaggcctccagttatttcaacgtctccagcgatggtttttcatccgcctgcatatcagtatgcaggattctctttccctccaagtgttcaccttcaaacaccagcattttcaattggatcagcaacatttaataattctgcatctgcaggagttccatattttccaactctttcctcctctcttgttgggccagccggagcgttgccttcccaacattcaaggcagtatgccataaatcttgctgagggtagcagcagtagtgtacgtgacggtaatcggaaatgggaaagtcagggccttgatcttaactcaggccctggaagtatagatttagaaggaaaggatgaacggatgcctttaccagtcagacaaaatttgatcccacccctacatggctttgtggaggatcaaggaagaatttaccaaatgccagttgtaggaacaaagagaaaggaacctgatggcagttgggactcagaaaggtctacatacaagcagttaccatggcaatgagggctctgaaggagatcattttgcaccgactggtctgcgaatgagcatatcacctgcatgtagagcttggccggtgtgttcttcagtcactggactacactcaggggattcagccccatgacgatggcgtgggattgaggaaagcgaaaacttcctgtaattgttgtagattttttcttagctgttaggcttttggttctaatttactcaggagggtatggctgcggtggaggaatctttgtgatcctgagctctgtggccgctgtaattagaccgtccgctctgtttgttggtgataaactgttgagcacatgctggagctttacataagaatttagatgtggccttgttccttgttggggaagcgttacgtcagctgaccatatatatacactggtgcaacgtacagctctagttgctacaccatgtatcttgggttgcagtgcagctgtatgtataagaattctagtagatgagcagctataactttttttctctctttgacaccgaatccatctgcatctggtttactcc

SEQ ID NO: 19175 - DNA, 1454 bp, Zea Mays
tccccaccagccacctcctcggctccgtccccgctgtgacacaagatgacaggaaattgggtccccccgccgcccaagctgccacctctcggttgcaggagttcccacctggaggtggtaatgttggagggtatcggccaccaggtggccctgcagatggagatgttgaaaaccaagcagattggaaaggatacttcaatgttgcatcttatgctccatacttcaatgttgatactgatgttgtagttgacaggctcatcagttcagtttatccaatggatggtttttacaggaaaattgatgctaatcctgacatgtatgggcctttatggatcaccactactctgattttcatgcttgctgtgtttggtaactatgccacttatctggtgcaaactaaaaaggatatggacatatggaactttgatgttggttatttcagttgggcagcatcagtcatgtatagttatgctatcattgtgcccgtcgtgttctttttcctgtttcagtattttggatcacgcccaagtcttgttcgattttggtgtatgtggggctattctctgtttatcttcatacctgcatctgtacttttgcttattcctgtgggatttcttcaatgggtcatcatagctcttgctggtggtgcatcatcttggttcatcactttaaatttgaaggaatgcactgaaggagctgatctaatggttctgatggctagtgcatcagtgctgcaatttgctctggcactgttcatcaaagtttactttttcgcctgaggtttgcttgatgattttgcaaaggtgacctgatgcgccctttgcccacggcttgttctggaatacatcttttgaaagggcatggcagaccagttctactcgacatcgtgacatacgtactgaccctagattgttatgctttgggcgttcttcatttgaagtgtctaatctgcaagtctctatctagctagggaacagaattttacagcgtgccgtacagagtaccgagtttaggcaccaaagtctttccacgttgttcagtgaaagcccttcacttggatttgcatacaatcctttcttgggtaaagatctccagtgtgtatttgtgtgctagtacgtctcatccggttttcgaacgtccaactgacaactgatttcgcatagctcttttttttaaaaaaaatggtttagcgaataaaattagcatgctctagccacgaattttcaacgaaaaaaggtttccggatttgtttgctatttagctcagaattgaagataagaagagccttatggtcagacgtgtatcttggaatttttgtatggttgcagaagggaaggtcctgttcctaggatcaagagattagaactatgtatagttttttcaaagtaggttcatgtatgttattatttcaaataaacttcctttccacaaatttcattctgagttcatgagta

SEQ ID NO: 19176 - DNA, 1726 bp, Zea Mays
gaaccgaaacccgatacatccaggcgtacagccctccgcctcgtgaaggcaaagcacgcgcaaagccaccacagcgtcttcatcttcgtctccagtccaagcaagcgaagagcacccctcgagatctctccctccccgcgccgccatggacgcagttgactcggtagtcgacccgctccgggagttcgccaaggacagcatccgcctcgtcaagcgctgccacaagccggaccgcaaggagttcaccaaggtcgccgcgcggactgcgatcggcttcgtcgtcatgggattcgtcggcttctttgtcaagctcatcttcatccctatcaacaacatcatcgtcggctccggctgatccgtaaacctcaggtatactttccaatcacgttatacccctgctctggcttccactggatgtgtgtaattcggtagatctcttgtatcgagccacatgcttaggacaattcgttactgttacatctttttgtgtaaattgttctgccgagtttggtttgtgtggtaatttagatttggtgattggagattcgctgaatgagaattcagcataggtgtttatctgctgtctttaatggtatactgactattagtagtgcttgtgagatccaatatcctctaggattctcatactactataatggatgatcagattttttttatttgttctagactctagtagcttggtttggaagccaattatctgtttttacggggtattcccttgaaactgtggcattaatgaattcatgcatctatatggagacaattgcatatttaggactctaaacaatgcgcttcacaataatgccatccgaaagatttaattcgtaaaaaaggtactacaaaccttctctaattgattatactaccattcaacgtatattcttcctttttataatctgatctcatgtattttctctgcaacaagacagttttaccccttataaatctctcctctggccaacgtcccagcaacgagtgagcatccacccgacttagattagcagattcgtttcctctggttccttcatgaactcatgctgaaatggattgctaattaatgctattgtgggttgttcattactgattgatgagtactatacattacctgacatgccgtcacgacacaaatttccttgctttactcaattactcagtgtacaattggtgcatcaaaattcaaaatggacttgctgctgtgatttattcatgcttggatcgattcaggtggcataagtactaacttttttagcagttcaatgggcacatccattccatgcaactggcaaccctttttattttccttcgtcatcatgtgctaatccataagaaagcattgcagatcatgctttatttctctggagtaattagctttttttaggaatggtaattaaccgttttaaagagaaatacttctttgtttataccctgcccactgcccgtcgcggcgcggtggcgtccccgccccctgcccggcgcggtgcggtggcggctctacccggtgtggcgcggtggccgtcgcgtgaacagccgtggaggagagaggcgtggtggcggccctgtccggctcggcgagagaacgcgaaatctcagaggaagatagatctcgaggaagatagagacaaccgagggagaggatagtggagcagcagttcgtgcgtgcggcctccaagcgtagagtatactagatgattgttataaaagaatt

SEQ ID NO: 19177 - DNA, 614 bp, Zea Mays
aacatggttccttggtgttgcgggtgtgctccagccccaagtgtccgagtctttccggcgaagggtttcggacagagaagatggcgacggcggcggcagggttggctccggcaaaggaggtggtggagaagaaggtggaactcctgaaggaggcggtgtaccagaaagctggcaacatcttcttccgtaagagcgtcaaatcggtgatcacaacggagcagaagcaacttgaccaagccaaggctcggctgagcaagctgaaccaagcttgatgggcagcacgctacaaatgttgaccttgaacaaaatagagcatgcagatttgaatggacttctcgttgctcattaattctgcagttgggcgttgtggacataatccatgtgtaatgctactttctttttcatgagatgtatggctagtgtggtcgtgaagtttggttaagccttttgagcccgattcagtgttaaaaatctagaatttcaactaaaggagtacatgagctgaatagatttctaaaaatctatggatttctctagtttaatctcaaatctcttcttaccctacgtcttttagatttctgtcatccatttttttaaaatattaatcaattgcc

SEQ ID NO: 19178 - DNA, 3318 bp, Zea Mays
cgctagtccactcttctggtcctctcgcttttgcgctcccttggtcgtcttcgtcccctgctcgtctcccgtccgttttcggatgcccactccgaccaaaaccctagctacttcgtgaaggtggaggggaggagatggcggcagcggatgggcgcagcggcgacttccgggtcaggggtggcagcgttgggggtcggatcgaccgactggtggtggagaacttcaagtcgtacaagggtgagcagacgattgggcctttcgtcgacttcacagccatcatcggccctaacggcgccggcaagtccaacctgatggacgccatcagcttcgtgctgggcgtgcgctcaacgcaccttcgaggcgcgcagctcaaggacctcatttacgccctcgacgaccgcgacaaggaggccaagggccgcaaggcttccgtccgcctcttctactgccaacccaaccaggaggagctctgcttcacccgcagcatcaccggcgccggcggcagtgagtaccgcatcgaccgcaaccaagtcacctgggacgtctacaacgccaagctcaggtccctcggcatcctcgtcaaggcccgcaacttcctcgtctttcagggtgatgtagaatccattgcctccaagaaccccaaggagctcaccgctctcctggagcagatctcaggctctgatgagcttaggagggagtatgacgagctggaggagcagaaagccagggccgaagagaagtctgctcttgtgtatcaagagaaaaggaccattgtcatggagcggaagcagaagaaggtgcaaaaagaggaggcagagaagcatctacgccttcaacaggacctgaaactgttgaagacagagcattacctttggcaactctataccatcgaaaaagacatagagaaaattgaagctgagcttgtggaggatagagaatctcttcagcaagtgcaggaagagaatcgatccagtgactatgaactgactgcaaaaaagaaggagcaaagtgcatttctcaagaaaatcacattgtctgagaaaagcataaccaagaaaaagcttgaactcgacaagaagcaacctgagcttcttaaattaaaagagcaaatatctcgtctcaaatcaaaaatcaaaagttgcaagaaagagattgacaaaaagaaggatgatcacaaaaaacatcttggagagctgagaaggctgcaaagtgatctggttgaggtcacagaagctattgaggaattgaatgagcaaggacaagatacaagtggaaaactgttattagccgacgaccaactccaggagtatcatagaattaaggaggatgcaggaatgaagacagcaaagctaagagatgagaaagaagttatagaaaaaaaattaaatgctgatgctgaagcaaaaaagaatttagtggagaacatgcagcagctggaaagccgtaaagatgagatatcatcacaagaacgtgaactgcagacaaaacttagcaagattctccattctattcccaagcttgaaaatgagctcacacacttgcatgaggaacacaacaaaattgcaaaggaacgccaatcttcaggatctgaataccaaatgctgaagcagagattggatgaaatagaaacacaactacgggagcttaaagctgacaaacatgaaagtgagcgtgatgctcggttaaaagaaaccgttggacgtctaaagcggctattccctggagtccatggccgcatgcttgaactttgcaggccctcgcagaagaaatataaccttgctgttactgttgccatgggaaagttcatggatgcagttgtagtggaagacgagaacactggaaaggaatgcattaagtatctgaaggagcagcggcatcctccgcagacatttattcccttgcaatcagtccgtgtgaagccgataattgagaagctgcgaactcttggtggatctgcacagttagtttttgatgtcattcattttgaccgagttttggagaaagcagttctgtatgctgttggaaatacacttgtctgtgataaacttgatgaagctaaagccttaagttggagtggtgaaaggtataaagttgttactgtcgatgggattctgctgactaaatctggcacaatgactggtggaacaagtggggggatggaagctagatcaaacaaatgggatgacagcacaatagaatctttgaagaagaagaaaaatctgttggaaaataaaatgtcagaacttggttcccccagggagttgcagagaaaagagcttgccatatctgagaaaataactggacttgagaaaaagttgcactactcgaatgttgaacagaataaccttagagggaaactagctaaattagcatctgagaggagtaatattgagacagagattaatcgtctgaagcctggagaggaggagctcgagacccgtattggtaaaagggaagcagaagcaagaaaacttgagaaaaaaattaatgacattgtggacaaggtgtacagagattttagcatttcagttggtgtgaagaatatccgcgagtatgaagaaaagcagctaaaagatgctcaagcactacaggagaggaagctaagcctaagtaaccaaatgtcaaaattgaaataccagcttgaatatgaacaaaagcgagatatgcatgcaccaattgtgaagttaacggagacacatgagtccttagagaaagagcttaagggcttacaggagagagagtctggtgctaaggctgaagctgaacaaattttggctcagatggaagaactgaagactgaggctgatgactggaaatccaagtcggatgaatgtgagaaggttattgatgaattgaaggagcagaatggtaatgttgcatctacattggcaaagatggatcgccaagtgaaatcaaaggagggacaacttgcacaacttatatcacgccagcgagaggttcatgagaagtgtgaacttgaacagttgaagcttcctactgtaaacgacccaatggataccggaacatcctcacaagaaccaatccttgattacagccagcttagcaaaagccatctgcaggatatacgaccttctgaacgtgacaaacatgaggcagagttcaaaaaaagaactggtgtgctactagctgatattgagcgcactgctcctaatctaaaagccctggatcagtatgatgcactccaacaaaaggaaaaggaggttactgaaaggtttgaagcagctaggaaagaagaacgagagatatctgacaaatataactcagtcaagcaaaggagtatactcgcatgcataattt

SEQ ID NO: 19179 - DNA, 442 bp, Zea Mays
ccttcacatactgacgtacacatctcctcgccgaggttgctccgtccggtggccagaccgtggttcttggcgctcttggttggtcggggtccttggcaaccggacgtctggtgttcctgtttcgaccttgaacttcttgggggtggggttttgggggcgtcacctccctgtttgtttcttgggttgatgtggcggcggcgcttcctgtgaccggaggggccaaggaggtgggactttttcggtgaagggaaaactgcgggaatggaaggcgaggcagcggcggccgaggcggtggcgcggatacggctggtgcggtgccccaagtgcgacaagttcttgccagagctgcccgcctactccgtctacgtctgcggcggatgcggcgccactctccaagtccagcatcccaaatggatttcatctctgagtgactgacatctgc

SEQ ID NO: 19180 - DNA, 616 bp, Zea Mays
ggggaacatgttgttaattctaagggcttgattggggttttgtcagcccagcagacagaacttatgacgcgttaggattagtgaatcgtttaagcaagcacagtgctgctgctgcagtggaggcctgtgagatgctagcaagtggcaacacgacttctgataaggaaaacaaggataatacggatggcaaggaactagtgacaagaaaatcacagattaagatcatggccgaggcgcgagtcctggatttcgacgaatctcccgcacctgcaagaacagcagataagaaacttggcagctgtcaccggagatctgttagctcacccattcttccttcccccaaccttagaagtttccgataggtacaccatatatggcatcatcgtacattacccacctgcatgtattggtgaactctattgttattatgtctccttagagcgcgttgttgaaactattggagcgtttcctttctttcgttactctattgttattactattattatgtctctcagcccggaaacaggcatcagtaccagtgaactgttgaaactaccctaatcattcaaattaaattattatattgcccgatgcatgtagcttcttgtgacaacaa

SEQ ID NO: 19181 - DNA, 3314 bp, Zea Mays
aatgacctgtgctgcatggtctcgctacgcaccaactagtactcagagattcagagctgagcatcgttgtgctagctgacagcgtactgtagtcttcccacccataaacctgagcgtcagaaacggtgctcacaatcacagcgcagggtgggcaccgattcgaacgctttctctcctccgccgctgatcccctctcgatttgttgtgcctccagcccccgattcctactgttgtggtccagtgatccaatcgacgtcgacgactccgcagccaccgctcctctcctctcgtcgcttctgccgtctctcggcgtcgaatctcatccggccagtgaccacactctactggccgcccggaaggagttcttccaggattcgagccgttgctgccgtcacctctgcaggcccagcgtcgagcggagatccaatcggaaattcaactgacttcgtcttttatcctccgattcgaacgctttatactccgccgttgatcccctctcgatttgttgtgcctccagcccccgattcctcctcattcgtcggcgatcgaacgcagccagccagttctcctcgacttcttccagtcccacccaccgaggttcctcttcttcttcggcgcgcccgtctcggtggacgccacaggaattggctcctgacttttttcaacgggtggtttcgctgggcccgatgcccgacgttatggccgcagccctaaccggcttctcgcctcgcggggtgattccgagcagaggcagagcatctcttcccggggtcgctagagcgtatgccgagaggcggttggttgcagaaaacacaagcctgccaaacatgcataaagaacaacttgagactataataaggaatcagctccggaagccccagttgccaccttcttcatacgacacagcgtgggtttctatggtgccagtgcggggctctcatcagactccccgcttcccacagtgtgttgagtggatactgcagaaccagcaggatgatggatcttggggtgtcagccaatctgactcatcggtcagcaaggatgttctcctatccacgttggcatgtgttcttgcgttgaagagatggaatgttggcagagagaacatttggagaggactgcatttcatcgggaggaatttctctgttgctatggacgagcagttcacttctcctataggtttcaacttcacctttcctggtttgcttagcctcggcattgatatgggtttagaatttcctgtaagacaaattgatgtctgtggcattcttcaccgccgggagatggaattgaaaaggctggctgtggatagttcttttggaagaaaagcatatatggcttttatcccagaaggattcggaaatatgctggactgggatcaagttatgaagtttcagaggaagaatggatcattgttcagcactccttccacaactgctgttgcattaatccacaaatacaacgaccaagcccttcaatacctaaatttgcttgtcaatgaatttggcagtgcagtaccagcaatgtatccttcaagggtacattgtcagctttcaatggtggacgcgcttgaaaaaatgggaatttctcagcgctttgtcagtgaaatagaaagcatcctggacatggcatacaattgctggttacagaatgatgaggaactcatgatggacatagcaacatttgcaatggcatttcgccttttgaggatgaatggttacgatgtttcctcagatgagctgtctcacgttgctggagcttccactttccatgattcactacaaggatatttaaatgatacaaaatccctactggaattgtacaagacctcaaaagtcaccttatcagaaaacgatctgatcttagatcgcataggatcctggtctggcaacttattgaaggataagatgtgctgtagtagggtgcaaaaagactcgatttttggagagatcgagtatgctgttaattttcccttgtattccacactggagcgtctagaacacaagagaaacatcgaacattttgatgcttggggttctctgatgctaacaacaaaatcctcatcttttcgtatcaatcaagaattcctagctttggcagtcgaagatttcagtttctctcaacgtgtttaccgggatgaacttcggcatcttgatagttgggtgaaggagaacaagctggaccagctacaatttgctcggcagaaactgacatattgctatctgtctgctgctgctaccgtattttcttctgaattgtctgacgctcgcatttcatgggccaaaaatggtgtcctcacaactgtggttgatgacttcttcgatgttggtggatcaaaagaagaattagaaaacctgatagcactagttgagaaatggcatgggcaccatgcagttgagttctattcggaacaggtgaaaatagtattttctgctatttatacaacagtgaaccatcttggagcaatggcttctgcagcacaaggccgtgatcttacaaaccacctagtagaaatatggctggatttgttaagatctatgatggtcgaggcagaatggcagagatgccaatatgtaccaacagttgaagaatacatgacaaatgctgttgtctcatttgcactgggcccaattgtgctcccagcattgtattttgtagggcaagagctattagagcatgctgtcaaagatgaagagtacgataaattatttaggctagtgagcacttgcgggaggctcctcaatgactaccaaagtttagagagggaaggcaaccaggggaagctgaatagtgtttctctacttgtgctccacagtggtggttctatgtccatagaagccgctaaaaaggcaatgcagaagtccatagacgtgtctaggagagacttgctaagattggttctcaggaaagaaagtgctgttcctaggccatgcaaggagctcttctggaagatgtgtaagatacttcacctgttttactctcagaatgatggatttagctccccaaaggaaatggtcagtgcagtgaatgctgttatcaacgagccactcaaagtccaaaacagtactacgtttttgtctagttcatcaaggtagcgaggatatcatgtaatttatcctgttcatatggatcagaagcaacagcagcaagcttaagatatttgtaagtttgtgactgggctgctgtggatctgtgaagctacaactttgctgtatgtggatcaaggtattaggaagatctggttcacatattgataacataatggataaaccataacgttaaattatgtttgcttaatttcaaccgtaatcgat

SEQ ID NO: 19182 - DNA, 1361 bp, Zea Mays
atcctataatattggtgccatcatgtctctatgggctcctgttctactggtctatttaatggatacacaaatttggtatgccatcttctctacgatatttggtggcatgactggagcacttgggcgacttggggagatacgaacattgggaatgctgagatcacgattccattctttgcctggagccttcaacacatatttggtgccttcagataaaagcaaaaataggcgcttttcactctcaaagcgctttgctgaggtttctcccaacaagagaactgaggccgccaagtttgctcaattgtggaatgaagtaatatgcagtttccgggaagaagatcttataagtgatggtgcagctgagaactttttgttgcatagggagatggacttgttagtggttccttattcgtcagaccccagcctcaaattgatgcagtggcctctgttcttgcttgctagcaagatacctatagctttagacatggcggcacaatttagacctagagattcagatctttggaaacgtatatgtgctgatgagtacatgaaatgtgctgtactggaatgttatgaatcattcaaactcgttcttaatttattggtggttggagaaaatgaaaaaaggattattggtattataatcaaagaaatagaaggtaatattggaaagaatacattccttgccaattttagaatgagcgcactcccagttctttgcaagaaatttgtagagcttgtgtctaccttgaaagaaagagatgcctcaaagtttgataacgtggtgctgttgcttcaagacatgttagaagtgataacaagagatatgatggttaatgagattagagagctggctgagtttggtcatggtaataaggattcagttccaagaagacaactttttgctggttctggtacaaagcctgcaattgttttccctcctccggtttcagcacagtgggaagaacagattaagcgattgtaccttcttttgactgtgaaagaatctgcaatggacgtcccaacaaatttagaagctcgtcgaagaatagcatttttcactaattcactattcatggacatgcctcgtgcacctagagtacgcaaaatgctctcattcagtgttatgactccttactacagtgaagaaactgtatattcaaaaagtgatcttgatctggagaatgaagatggtgtatcaattatattctacctacaaaagatctttccagatgaatggaacaatttcatggaaagaaataattgcaaaagggaaagtgaagtatggggaaacgatgaaaatgtactgcaacttcgtcattgggcttctcttagagggcagacactctgtagaacaggta

SEQ ID NO: 19183 - DNA, 3367 bp, Zea Mays
gaacaaaagtcacctggaatcattccattggcagtaaaggatgtattcagcattattcaagatacacctggacgagagtttcttctgcgggtttcgtatcttgaaatttacaatgaggttatcaatgatttactagatccaacagggcagaatctcagaattcgagaagatgcacagggaacttatgtggaagggatcaaagaagaggttgttttatcacctgcacatgcgctctctctaatagcatctggagaagagcacaggcatgttggatcaaacaacttcaatcttgtcagcagtaggagtcacactatcttcacgttgacaatcgagagcagcccctctggtgaaaatgaagcagaagaagtcaagttgtctcagttgaacttgattgatcttgctgggtctgagagttccaaaactgaaacaactggtttacggcgcaaagaaggttcatacataaacaagagtttgctcacccttggaactgttattgctaaacttacagatggtaaggccactcatattccttatagagactcaaagctcacacgcttacttcagtcttctttgagtggacacggacgcatatcactcatttgcacagttacacctgcatccagcaacagtgaggagacacataacacattaaaatttgcccacaggagcaagcatattgagataaaagcttcccaaaacaagataatagatgagaagtccttaataaagaagtatcaaaaggagatatccagcctgaaagaagagctacagcaactcaggcgtggtatgatgggaaatggtggtattctccctacggatcaagaggatcttgttaatttaaaacttcagcttgaagctgggcaagttaaacttcaatcgaggctagaacaggaagaggaagcaaaagcagcattgatgggtaggattcagaggctaacaaaattaatattggtatcaaccaaaagttcgatatcctcaaatgtttctggaaagactaacttccgccgacggcattcatttggagaagatgagcttgtgtatttgcctgatcgaaagcgggaatactttgtagatgacgatgatgttagtcttgattcagaactttcgcttgaagggaaacttgatctgaacaatccagaggagtcagccaggtttggcagaaggaaccacaaacgtggaatgcttggctggtttaaactaaagaagtccgaccagttatcagggctatcatccagtgtagacggtgatagcactgctagcgtctcaccttcgtgctctaaatcatcacaacaaaaacacttgctgcttgacctgaaggatggtcgaaggaaatctatgactaggaaaggagatgacccatcacttgctgattcttttcttgaaaggactcaagccggtgatttatttagtgctgcgcccagagtacggcaccctctgccgagtggaacaaccatcgtggatcaaatagatcttctacaagagcaggtcaaaatgctggctggggatgttgcactttgtacaagctcactcaaaagattgacagagcaagcagccaacaaccctgataatttgcaaattcaggagcaaattgtgaggttgaaagatgaaatcgcagaaaagaaatcacatatacatatgctagagcagcggatggtacaatcactggaaactacagaaggcccagcaattaagacagagttatcccagaccttttcaaagttgagcacgcagctgagtgagaagacatttgaactggagattatgtctgcggataataggattcttcaagaccagctacaagcaaaggtaacagaaaatgcagaactccaagaaacagttgcacacttgaggcaagaaatcagtaatttatcgaaggctgcaaaaagcgaggatagttttgctagcgtgcagtctagtgaaccatcaacagcaagcactgatactagggatcaaacaaatgaaatctcaaaccgtgcaaatatgtcctctagaacaacggacttaaatgagtcaggatttatatctcaagtgctcaaacaggcttcagaaattgaaagtttgaaacaagaaaatctgaggttggtggaagagaaggatggactggaaattcatagtcaaaagttggcggaggaatcatcctatgctaaagaattggcttctgctgctgcaattgaacttaagaatttggcagaagaagtcactaggctttcttatgaaaacgcaaagctgaatgcagacttagctgcggcaagagagctaaatgcatcgatgtcaagaagtaacatccaccctgacccaaagcgtcgtgatcatgagagcggaattttagttgaggagttgcagaaagagttggttgctagttgtcaaagggaggccgtattagaggacacactatctcaaaaggaccgaagagagagtgagcttctaaagattattgatgatgcaaaatgccgtgagcatgagttgaaaaatgaactggcaagcatgggggcccttctttcgaagataaagaaagaaaactctcaacaggatgtatttgaatttaaagcaaagcaaaacggctttcactcatccaagactgatagtggtagactggtaagtgaaatgcaagcatcggataatgggtgctgggatggcctcagtacttttgaagaagcaagagctgcatacaattttgaaagaatgcgctgcaaggaattggaaagcatcgtgtccaaactaaagggtgaggacctcaggggcctagatgttaaagttcttgaagaactacaaaacttccatgtagaagcactgtcaaggatctgccaagaaaagatggcaagtcaggcgctatagcaaaaacctttcctgagacgagtagccgctttcatgcaggccagagcttatttctcagatgtcccttcaacttcatgcccatctctctgaagttccactcacaatttcacatagttgctgctactgcaaccgggacaaccttgattagtccgcctttggacactgattcctgcgtttaaccgacagaaaacgaagcaaaatgcggttagatagcaggcgctaatggtcactgagtagttagcatgcagatactcccctcctgtacagctttttattaaagatagtagcagtggtattgtaggagtacccggattgtatttatactggtaatatatgagccggtaaaacccgaaggtggtgtttctgttatacctggaccgtgctctgcccttcaaaaactgtagtaaacccgaacggacgctgatgtagctttggcaaacttgctgttgatgtgatgcatgactgccgtgcacctggtgccgtgcccgacgatggttgactccacccaatcagccaagagcacggcacggca

SEQ ID NO: 19184 - DNA, 3055 bp, Zea Mays
cccgtggccgtgattttgccctcccgtggatcgatacaatcacttgaggagagtgctgaattgctgagagagagatgtttgaagttccataaaggttgccgtaagtatactgaaggactaggggaagcatacgatggagatattgcatttgccagctcacttgaaacatttggaggaggccacaatgatccaatgagtgtcgcttttggtgggcctgtaatgaccaaatttacaattgccttaagagaaattggaacatacaaggaagtcctgcgctcccaggttgagcacatgttaaatgacagattactgaattttgttgacattgatttgcatgatgtgaaggatgctcataagcgctttgacaaggctagcctctcatatgaccagattcgtgaaaagtacctatcattgaagaaaggtacccgaccggacataacaacagcaattgaagatgagcttcacagtgctagatcttcatttgagcaagctcgtttcaacctggtcacttcactttcccatgtcgaggcaaagaagagatttgaatttttggaggctgttagtgcgacaatggattcacatcttcgttattttaaacaaggatatgaactattgcatcaaatggagccatatattaatcagattcttgcttatgcacagcaatcacgagaaagagcaaacaaggaacaagcttctctcgtagagaggatgcatgagtacaaaaggcagatagaccgggaaagtcggtcttctataaatggtttgaatgattcttataatggtgatcgaatgcagacaattggcagaagttcacataaacagatcgaggcagttatgcagtcaacttcaaaaggcaaggtagagaccatccgtcaaggttatctttcgaaaagatcttcaaacttgagagccgactggaaaagaaggttcttcgtacttgatagtcgaggaatgctgtactactatcgaaaacaaattactcggccacctgctggttgttccatgcaaagaaacgttaacccccctgaacatggttctgggttgttgagcagattgttctcttctcattaccatatacatgatgaaaagtctgtcgcacgtcatactgtaaatttgttgacatcgaccattaaagttgatgctgagcaatcagatttgaggttctgtttcagaattatttcacccacaaagatctacacattgcaggcagagagtgcagtagatcagatggactggattgaaaagataactggtgttattgcctctttactgagctcacaatcgccagaacagtgttttatgtcaagccctaagggcagtggtcatgataggagtaccagtgatggaagctcctttacaagttcagtggaatttgaaccttccgtaatcgatgatttagtactggagaagtactctggaaatgggcagcatgatgtaataagaggcacacatcatcacagaaccagcatgaaacctgaaaaaccaattgacttgcttaggaaagttgatggcaataatatgtgtgctgactgtggtgctttggaacctgattgggcatcattaaaccttggcgcacttctatgcatagagtgttctggggtgcaccgaaatcttggagtgcatatatcaaaggttagatctctgacacttgatgtcagagtttgggagccatcagtaatcaatctctttcagtcattaggcaacatgtttgtcaacaatatttgggaagacatgttgccagatgataattcaagtgctgatggatcagacacatcacagtacctctctgttagcaagcctaaacacaaagatgtattctctgccaaggagaagtttattcatgccaagtatgtagacaaagagtttatacggaagcgtagcatggatgagaatcaattagctgagcagatgtggaatagtgtagctgcaaatgacaagaaaacagcatacagtctcattgtgagatcacgtgccaatgtaaatttagtttacggagagatgccttctagcccatttttgactcttggaaaggcacttcagcaagagcaaccggtttcaccgcctgatggaagtcctaaatttttcgattgcaattcacatgacaagatttctcctcgggagcccctttcccctgctagcacgagttcacgcacagatgacatggaggacggttgcgaaggtctttccttgctccatcttgcatgccgtgttgcagacgttgggatggttgaattacttttgcagtatggtgctagtgtaaatatgaatgattctaggggtcggacaccccttcatcactgcattttgaaaggaagacatcggcatgcaaagcttctcctctccagaggggctgattcacaagccatggatcgagatggtaggacagcattgcagtatgcaatcgatggtggaacaagcgacgaagacattcttgcattgttagaggatcatagtagatgatcttgcaaccacaccttcagtaaattgaggttctcttggtgtggtcaactcaactaagaccttgttcggttagctctcaatccatgtggattgagtgtgattgggtgggttcaaatcccaaacaagtcaaagttcttctaatttttttccaatcctatccaatccatgtataatgggaataaccgaacaagacctaacagggatccagccccgctcggtcctagcttgtcgtgcagacaatccgaattcatggcatgaaagcaacctatgtacatgtcgttctagggcttcagtatcatgatgcgcatgttgtttctttccccgccgtttgcttgtttagcatcagtggtccttatttagtcatctggcaaacggtttggttttgtttgctgcaggtgatgcatagtaagcttgtaaatggagttgcttctcttaattttctagtcatcttttatcatgaagtagatgtggcattctaatgaaagatggttgtacatattgagatgtgctgttgtggcatatatgaaatattggcatggtgtggatggtatatacgaaagttgtgcttgcttaatcagaatatattgcattgttg

SEQ ID NO: 19185 - DNA, 3847 bp, Zea Mays
ctggctatcaaaacggagccttggcagcgggaggagccccacactccagttcccacacggcggcggccgcgcccgccatttactccgctccggcgtactcctcccactcctgagctgtcgctgacactgacagcaacccccattgactcccgacatccacagccgcacttactcacgtgccaccgacactccggtcccaccctatgaaccccctcccaccgccaccagggccccgccgcgttcccaccctactacctgtcaccgcggccgtcgtctcccccgtcctattcacgaattccgaattccactgcgctgcgcttctgctccccccttctctctccctccgtgttcgctccctcggatcccacgcggctgcgggctgcggcgggggcggcgtccgaggcttagggtttagcgtttggaggagtttaggggtttgtgaggaggaagaggaggaggaggaggaggaggaggagcggatggggacagcggggaagggcgcgtgggtggtgccggcgccggcgtacagggaggtggaggggtgggagggcgcgggggacgacgcgccgggcttcaggtgcgcccactcgctcaccgccgtcgcgcctaccaagggccacggcccgcggctcatcctcttcggcggcgccaccgccatcgagaccggcgcatcttcgggcctccccggcatcaggctcgcgggggtgacgaactcggtgcactcgtacgacgtggagacgcgcaggtggacgaggttacatcctgctggagagcctccgtctccgagggccgcgcatgctgcagctgcagtgggcaccatggttgttttccagggtggaattggaccagcagggcactccacagacgatctctatgtccttgacctcacaaacgacaagtttaaatggcacagggttgttgttcaaggggcggggcctggtcctcgctatggtcactgcatggatttggtagctcaacggtatcttgttactgtctcaggaaatgacggaaagcgggccttgtcagatgcttgggcattggacacagcacagaaaccatataggtggcagaaacttaaccctgaaggtgatagaccttcagcaagaatgtatgctaccgccagtacacgctctgatggcatgcttttactttgtggtggaagggatgcttctggaatgccactgtctgatgcctatgggctactaatgcatacaaatggccagtgggaatggactctagccccaggggtatctccatctcctagatatcagcatgcagccgtttttgttggtgctcggttgcatgttactggaggtgtccttagaggaggcagagctattgaaggagagggcgcaatagcagtcctggacactgctgctggagtttggttggatagaaatggcattgtgacctctcgtactttgaagtcatccaatgaacatgatgcttcttcggatctacttcggcgctgtcgtcatgctgctgcctcagttggttctcagatttacatttatggtggactcaggggagatatcctcctcgatgatttcctggttgctgagaatgcacccttccaatcagaaatcacttcgtctatgtacaatgttgatagagtccctaggggggaaactcaaaatagaaacaataattttcattcagattcacctgtccatcaatctacaaataacagtgcggacaagaagtcaattgacatgttgatagaggcctcaactgcggaagctgaagctgtcagcgctgtatggcgagctgctaaggaagcatctgcagcgtcttcggaagacagtctttcggagggaataggatcagaatccccattgagtgaaacttcaccaatgcctgaagatttcgatgatggggggtctctagaaccagatgtgaaactacattctagagcagttgtggttgctaaagaagcagtaggagatttaggatgcttggtcaggcagctctcactggatcagtttgagaatgaaagcagacggatgcatccttcaaacaatgaccaatcttatccaggccggagaacattaaatagacaacgatcaccacaaggtttgcataagaaggttatttcgttcttacttaagccaagaaattggagagctcctgctgatagaacattttttctggattcttacgaagttggcgagctatgctacgctgccgagcagatttttatgcaagaaccaactgttttacaattaaaagcaccaattaaagtatttggtgatcttcatgggcagtttggggacttaatgcgcctttttgatgagtatggttttccgtcaactgctggtgacataacgtatattgattatctcttcttgggagactatgttgaccgaggtcagcacagcttagagacaatagctttgcttcttgctcttaaaatcgagtaccctgaaaatgtacacttgatcagaggaaatcatgaagctgctgacatcaatgccctttttggcttccgccttgaatgcattgagagaatgggtgaaagtgatggaatatgggcttggacaagattcaatcaactgttcaattatctcccactcgctgccatgatagaaaagaaaataatctgcatgcatggaggcataggaaggtcaataaacacagtggagcaaattgagaaacttgagaggcctatcacaatggatgttggttccattgtcctcatggacctgctatggtctgatcctacagaaaatgatagtgtggagggtttgagacctaatgcacgagggcccggcttagtgacatttgggcctgatcgagtaacagaattctgtaaacgaaacaaattgcagttgatcataagagcccatgagtgtgttatggatgggtttgagcgtttcgctcatggacaattgatcactttattttcagcaacaaattactgtggtactgcgaacaacgcaggggccatacttgttgtcggcaggggcttagttatcgtgccaaagttaattcatccacttccacctcctgttaattcacctgagtcctcccccgaacgtggggatgccacatggatgcaggagcttaacattcagcggccacctactccaaccagagggcggccacaagctgccggtgataggaattctcttgcttacatatgatacttgacacgacagagccacctccatctgctggatatgtttgtttgtaatcagaaatttctttaccagtttcaaggtacatatggtatagccaagaagaacaatcaaccaacaggacatcatggatacacttgtgatcagttccctggtaatcctttgtgatgcatcggttttaactgtagttgtgtgctaccgtgacttcagctcctaactggggagctgcataatcagcatttcagatctcaagcaacattgtatgattgcgataccagtggacaataatcaagtctgatgtagttgtaatagctaatctgtaatttcagtgtacatggatagattgttctttcgtcagagtaggaaggtttccaaatgtttgcatactatgcatgctgcagcctgggacgcggtttaaacaggacagctatacaagttgccagatctgagctagattgggcagagaagatttgaaccattttatttgctctccgcggagcgcgaatgtaagaggttgtgttgtgttgtgaaatactgaattcgttataggtatttgtgcaataaattaagttttgcttaaatcagtgaatgctttggtttagtgacctgagttacaacgacaacaaagccctttagttagagatggcaacaagtacataccttatgggtattgtcatcctatgcccgtacgtgcgggttgcatattaccg

SEQ ID NO: 19186 - DNA, 3361 bp, Zea Mays
cgctgcgggtgaagttcggctatctgatttgccgcccgcgatacggcgaaaccctagctccacagcgccgttgcatggagtcccagcgatacaactacggcagcggcgccggcaccggcggcaaaatccgccgctaccctccctctcgcgccgtggctgcgtcaccatatgctcgaccggccaccgccccgacccacgctcctggaaccgccacggcggcggtttcgcatgagggcgggtggctgtcccggatcatagccgccggcacctcgcgattccttccctccttgttcagcttcagcacgtctcaacctcagcaagccgcgccggccccgtcgccaacgcgcgaccagctgccagtcgtcgagccgccttcgccgcttcccccacctttagtggatgatcgtccagaatgtgaagaaaacggtggagtggctgccaataatttgtgtactgaaaatcctcaaagttgtaccaaggaagaggaagaaaacatgctaagaaattctgatgaccatggtggaacggctcttgaagaattattgaagcagagaactttcacgaggagtgagtttgaatatttggccaatttgttatggtctaaaactattggagcaaattcactgaagctagaagatggtaacgtcaggaaaatgattgtttatgacaaagaaaatgcctcggaatactccaacttacctcttaatttttccactacaacattcagcgctgatgatcaagttgccacgcctgcagaaattgcaaaagcttatatgggtttaaaatcttccaagggttcccctctacgccttagattgcacgatccctcctctatgcctatcacatctatggaagttagtatgtcacaaaaagctaagcctcccacaatcccacttgcccaaggctcaagattgcatacttccaaaacttctgattgtcttgaaagcaactacacaacaccgaatggagtaatctgcaaaatgtcatcatctccttatttcaagagtggtgtgtcttcaaaggagctatttggttctgtatcttcacattaccagacctcaaatagtgttcatacttttggcagacaggttttgaagaggaagagtactgtcagcaatgagtttgtatctgctggtccgatacgcagaattcatcaaagatacaacagaacatcaccactgttggaaacacagctgggttatcgtagataccctgtgggctatggaagcaaactcgaaggttctgagcaattggcacggactcaaaaacgccggtgtctggataaagttggtgatgccagtctcggtagcgtagaggacaaaactaatgtgaactatcctggtcaggtgccagagaagtcagctgagatggcaactaagatactgaagcagcttgacacattagtaccttcacagaaggaaaacacatcagaaacaaagcagaaacatgagagtgccatatatttcgaggaagatgtttctcgacaaaagaaagtacaagcagagagagatcttttggaaccttctccatcagaagtacctgatggtattgcatcgaacaaatcaatctcacaaattaccttgaacaaggaaaagcctccagccttttcttccagaggatttcaaaatcagttttgggaggaccagttacacagaaattagaaagcaagttaaatggagataatcaacgagtgccttccaagaattctggacaagttgcatctttcacaagtaatcctgtatttaaggttgatggccctgggcatgcgtcaaactctgttctctcagctgtacaatcttataatacatcaactggctcagtttcatttcaaagtgctggctcttctaccatctccactaacttaacttcaaacattacacagagctgttcaactggaggcagtttcactttctccaatactcgttttggtagtttatcggcaacctcaaatatgtttgcagcaaaatctttagcgttgtcttgtacagcaagccccggtgcttctttgggtttccctccagttcatactgcaagttctccagctgctcaccgcaaatctgaagcagcaaatagcagtatcagttttagttccatgcagcagtttggcattgcaggttcttccacagtgcaggacaaatccaaggcagtagacagcagtaccccttttggctttccccagaagtttgacaccgtgagttccgcttcagaggatatgtccaaggcagactctcctgagccgacatttttttctgggaatcataatgtgcaatcagaaaattgcagttccctgttcacacagagtccaggaaataatttgagttccaaatcttcagaaaatttgaactctggaagctcgcatagttttgcagattcaccagttggttcagcaacaatgtgctctagcccttcgaattcaaactctctgttttcttgggctgctggctcaggtgcaagaactgctccaccatcttcccctgctacaagctcatcttttgcttttagttccagtccagcattttcagcacaaccagtattcgccagcaaattgactacacctgcttcactttcatatggctcaccaaatactggccctgctacatcaccattcagctcaatgccaagcgctgtattttcattcacgtcagctactccttcaataccaaatccatcacccacaacaccaatatttggtgaccctactgtacagatgaatggagggaacatagttattgacaggaatgggtccccttcccctgcaacttcgccatttggcttgccaagcagctctccatcgactccaactttcagtacgcctgcaactcagtttgcttctagtacatcaggctcacctggagtttttgaaattggcaagtatagtcaagcttcttcaggtgggttctcaatgggccctagtggtggcaacgacaaatcaaacagaagaattgtcagagttaagagaaggaaatgaaataccaatatttttcaagttgctctgagcatttataagactaaggcaatcagcacgtagaactttttgtttcacatcatttgtctgcggtggcaatgagaatgagatgccattcttaaattgatgatcacaattctggcacagtagcagcaatggaactagccttttcgcgatacggtcgcccatgacattttgttgtacggtttgtcacaacaatgctataatgaaatatataggtacttctccaacttgtattaaacatgttcagcgatcaagctgccctttttttgtgcaattggatcctgaaactaaatttcatcctaataataataatttaggcacgccaattattattattgattatgcaggtgagatttatgtactatatttttt

SEQ ID NO: 19187 - DNA, 1990 bp, Zea Mays
ctcttcggtttcagtgacgcagtacatgctagcttgctgccatctctcttctctatatatatgtgcatcgccgcgcgcatacatacatgcatagtaaagttagcaatgtcgatggattacttggctgctgctgtacccgtgaccttggctctgggagtgggatctatcttgttggtcttacgatggacgtactgccgccgccgaacaagcgccgaacaagtgagactgccgccggggtcaaggggcctcctgttcctaggggagacgctccactacctggcagcgtcctccaccccgggggtattgccaccattcttccagcgacggttggaaaggtatggccccatcttccggacgaacctggtcggggaggatctcgtcgtgtcgctggacgcggagctgaacgcgcacgtgctgaagcaggaggagcgcggcttccagatctggtacccgccctccttcatgcgcgtcttcggcgccgacaacatcaccgccaagctcggcgtgctccaccaccacatgaggaccctcgtgctccgcctcttcggccaccagaccgtccgctccgtgctgctgcacgacgtgcagcggagcgcgcgcgacgagctgcgctcatggctcggccgcccggacgtcgaggtcaggacggccacctccaggatgatatttggcgtcactgccaagaagctgatcagccatgacgacgcagcatctggagaaacgttgtggagatgcttccacgactggacttcggggctgctctcgtttccggtttccattcccggcacaaccttctacagatgcatgcagggacgtaagaaggttatgacgatgctgaaacagcagctcgttgagcgtcgacggaacgcagcggagcgcgagacgacagaggatttcttcgatctcgtgatcgatgaactgaacaagccagaccctatgatggacgagagcaccgcgttggacttgctgttcaccatgttgtttgcgagccatgagacgacgtccatggtattaaccgtcatactcaagtatctaacggacaaccccaaagctttgcaagaactgacagaggagcacgaaagaatcctggaaagtagggccaatccaggctctgacctcacgtgggaggagtacaagtctatgaaattcacatctcatgttatacatgagtcgctaaggctcgcaaacatcgcactggccatgttcaggaaagcaaatcaggatgtgcacataaatgggtacacaattccaaaaggatcaaagatcatgatgtgtgcactagcatcgcacttgaatacggaggtctacgaggacccctcagtgttcaatccatggagatggaaggatattcctgaaccagtcggcacctctaaggactttatggccttcgggggtggtttgcgcctatgcgctggtgccgagttttccaagatgcagatggctatgttcctccattacttggtcacaaattacagctggaaacccgtcagcggtgggacaatgttattctatccaggactgcaatttccagaaggcttccacatccagcttcttccaaaaatcccaaacgtggttccataaaccctatgaagaaatatgaatacgaataatttaagcaaatattctaaatgtaccctggggaattgaagttcgataacgatgtggtacgggctgatttggtaaccatggatcacaggaggatgggagaggattgatggagaaattagttcatttctccctcaacctctttcaatcctcttatgatccacttatcaccaaatcaaccctaatgatagcaggtcgaattgtcggaacaaataatagtttcaccaaacagaaggggagtatgcatgtgtgtaactttttatagttataaataatagtagagtaaattctgctcgttgtgtaacaactatgcaggtgagtaaaaattggttcagcatattgtgtatattatgcccagttcaatggaaaaaaaactttgttgttt

SEQ ID NO: 19188 - DNA, 1464 bp, Zea Mays
atcgttttcatccattctttaactgtttcgaggagcaggaggaggcaccaccagaggcaaaggcaggcgcgaggcattccagcctcgtcaacttcctgagcgcctccatctcggagtacgtgcccaagatctcgtgcaagctgtcggaggacatcctgggctgcatcgccgccgtctactgcaagctctcgggcgcggagggggagtgctgcgtggcttcgccgagcccttcggtctcgtcttggagcaccttctctccgaggcgccggaacgatagctggagccctcggtctcggtgcaacaacttcgatagctggagcccgcggccgtgtggagtcgagaaggagagcggtgagcagagcccaggcgtgatgatggtcgtcgttccgaggatacgcgtcgacgctgacacgtttgagtacgcgtcgaagatgctcgagactaccaggtctctgatacagcgcctggagaaagtcgacccggtgaagatgacgcacgaggagcagctctgcttttggatcaatatccacaatgctctggtcatgcatgcttttctggcctatggtctgcacgacaagcgcatgaagagcacggacatgattctgaaggctgcgtataatgttggcggccaatcagtaaatgcgcagactattcagaactcgattcttggatgccgccagtcccaccgtccatcattggtacgtgcatttgcaaacaaaaacgaatgagagcaaacaaaacaaactgacgtgaatgaaatctgcagtgggtccgcgcgctgttcacgccggcgaaaagatccgcggcgaggcacccgtatgcgctccagcacccagaacccgttgcgcatttcgcgctgtcgaccggagcgttttcggacccacctgtgcggctgtacacggcgaagaagatacagcagcagctggaggcggcgcggacggagttcatccggggcagcgtggcggtgcggaagcaggcgctgctgctgcccaaggtgctgcactgctacgcccgggacgccgcgctggagctgcggcacctggtggagctggtgtgcgagaccttgtcggacgcgcagcagaagcagctgcagctcggcctccggcggagggccgtcgacaagtgcgtcgagtggatgccgtacaagtcgtccttcagatacgttgtacatagggatctggctgacgactaggcgggagccagccacgtacggtttgctctgtgtgattgcttgcttggttggttggtttacaaagtgtacaagtagtgggggtgggggtgtacatgcatgcatgtaaatacaggtgtgcatgctcactacttttgagctagtgagctgtggctttgaaacactgtacattctctctttgtgggctttgcgttgaggaatttgggatttgagactgaatcttgatgctagtgccgtccagtggaaaaatcagcggttcaaaatccgaatggctc

SEQ ID NO: 19189 - DNA, 991 bp, Zea Mays
caccaatagattcttggtggtgtattcagttgatcaaagacagatgcaaaatcacgtgtggaggacatttggaagaaaatgaacagtggttttcctaataagatgcccaaacctgcaatgacaaagctcagtacaacagaaaaacaaaagaaaaataaaccaacaaataattggatgactgttctaggcctttcaccaagcaaggcacatagtgtcgatcaaggatccaaaaatgggctacaacagacacaacatgaaatgagcgaggatgctaaaaaacttgcagccaaggcccttgcagctgccaaaaatgctgctgctgtggcatctggacgagggaaagtggagatcactgaggtaagggactttgctgggaaggacatcgaaatcaagaaactggttgatgctaattcaaaggaggcaatcgagaaggccagggcaggtggtgccgccccatcagctgtcgataacatcctagagcaaatacggaagaagcagaagctgagcgtcctggacaagacgaagaaagactggggagagtacaaggaagagaaccggggcttgggggaagagctggacgcctacaagaagagctcgaaccagtaccttgacaagcaatcatttctgcagcgaaccgattaccgcgagtttgagcgcgagcgggatgcccggctgtcaatgatggccaagcggaggacagatacgcgggaggactgaaatgtttccctgtaactccgttgtagacattctttcgagataatggtagacactaaattgtcaatgccttccagccccgttaaatcttcttttttagaattataatgtgctgattataatttacaaagatgcaccgtgcatgtgcgtaaattgcatctggtggttttggcaaacatttctgagctgcataaaatgcagtcatgattggatatttctgaaaccgggaaactttgacgaaccagcagcactaagctctgaaagctcgaaaaactaa

SEQ ID NO: 19190 - DNA, 4793 bp, Zea Mays
tctcgtatcgagtgctactttctccgtcttgctacatcagctccggaagcgtgggcccaatgaatcccaagtccaaacatcagtcagattttgacatttccgcagcgtttcaccgagagccacaagcccgcaagcaacaaatccgcgctccctgattcgccatcctcttcaccaagttaggcgacgactggcgcccatcgtcgattccccgttctccgtttccgtctcgcgtgtttggtgctttcgatctccccaaggcggcaggcggcagcgccgtacgcgttgcgggaagattttggttggtggattgttggtggcggctccactccgtcccagtgcactggtccaatccaaatggcggccaataatagcgacccgatccaggatcagctgggggaaggaggggcgggcgtgaggcacgaggctgaggaggaggaggtgggggaggagacgtcttctgccgcggcgcaggcgaccgcgacgacgatgctgccccggtcgagctcgcggccgcagctggacctcagcggcgcggcgatccacgggacgctggaggaccgtaaccctaccatccttttgcccaaccagtccgacgacatctctcacctcgcccttgacatcggcggatctcttataaaactggtgtacttctcgcgacatgctgagctctccactgaagataagcacaagatatccacaaagagaagacttgggatgtttaatggtggcaggagaagctacccgattcttggagggaggctccacttcgtaaagtttgagactgggaagctaaatgaatgtttggacttcatttcttccaaacaactacatcgtggtggaattgattcaccttcatggcgctctggggctcagtctgatgacattgtaattaaggcaacaggtggtggagcattcaagtatgcagatgtcttcaaggaaagattgggagtcagccttgaaaaggaagatgaaatggactgtcttgtggctggagcaaactttttgcttaaggctatacgtcatgaagcttttacacacatggatggccagaagcaatatgttcagattgatcagaatgacttgtttcccttccttcttgttaatgtcggatctggtgttagtataatcaaggttgatgggcatgggaaatttcagcgagtaagtgggacaaatgttggtggtggtacgtactggggattggggaggctaatgacgaagtgcaaaagttttgatgagttgctagagttgagccagcgtggagacaatagcaccatggacatgcttgtaggagacatatatggtggtctggactactccaagattggcctttcagcatctacaattgcctctagttttggaaagataatttcagaaaacaaggagctatcagattatagacctgaagatatatcgctctctctgttacggatgatttcatataatattggccagatttcctatcttaatgcacttcgttatggactcaagaggatattttttggtggattcttcatccgtggtcatgcctacactatggatacaatttcttttgcagtgcatttctggtcaaaaggagaggcacaagctatgtttctgcgccatgagggctttctaggagctcttggtgcatttatgagttatgagaagcatggtcttgatgacttaagggtacatcatttggttgaacgcttcccaatgggtgctccatatgttggtggaaagattcacgggccacctcttggagatctcaatgagaagatatcatggatggagaagtttgtgcaaaagggtactcagattatagcccctgtacctatgggagttccagctacgacaggtatgggaggctttgaaaggccgactgctaagggtgacatcttgcggtcagatgcaagtgcagcgctaaatgtcggtgttctccatcttgtacccacattggatgtatttccattgttggaagatccaaagacgtatgaaccaaacacaattgatcttgaccaggatgagttcaagtactggttcaagattttgtcagatcattcgccggacctcgtggacaaggcagttgctagtgaaggtgggactgatgatgccaaaagacggggtgatgcatttgcacatgccttttctgctcatctggcaagattgatggaggagccagctgcttatggaaagtttggtttggccaacctgttggaattgagagaagaatgtctgagggaatttcagttcgttgatgcatatattagcatcaagcaaagggaaaatgaagcttcactggctgttttaccggatcttctgatggaacttgatagtatgaatgaggaagctaggctgcttgcactaattgaaggtgtccttgctgcaaatatatttgattgggggtctcgagcttgtgtagaactttatcacaagggaactataatagaaatctatcgcatgagtcgcaagaagatgcaacgtccttggcggattgatgactttgacatgttcaaaaagagaatgcttactgataggaaggaccaatcatacaaaagagcactgctttttgttgataactcaggtgctgatgtggtccttggaatgcttcctttagctagggagcttttacgccatggaacagaggtagttcttgttgcaaattcgttgccggctttgaatgatgttaccgctaatgaacttccagaagttatagctgaagcctcaaagcactgtggtatccttcggaaagctgcagaagctggtggattgatagtcgatgcaatggctggcatccaagatgatctcaaggatgagacagtgtcagtgccactaatggttgttgagaatggatgcggcagtccatgtattgatttccggcaggttagctcagagcttgctgctgctgcaaaggatgcagatttgttaattttagaaggcatggggcgatcactgcataccaacctcaatgcccgttttaagtgtgatgctctaaagcttgctatggtcaagaatcagcgattggcagaaaaactcttcaatgggagtctatacgactgcatctgtaaatttgaaccagttccttaacaacatggtagcgactgcggaggcaactagcagaagcagcttgattggtgtagccggtgagacagaaacaatcatacagcgtacggcataaccgatccttccatgtacggggtacaagaaacgccctttcaataaaacaataacagtgttttctgaaacgatataataaaggctctaaaggctctttccagaaatattgaagggaaaagtttgagccagcaactggagttcgtgtttaagccagaactagttagcagcctaccatggcgaaagtaacatactcgaaccaatcttggaaagatcctgtcattcttgtgccatgctcgaatcaatccataaattgttcagacactgccgggacaatgccatcactcaaatgctaagaatcagttattagtcttcgcatgtgggcaactataataaatcaataaacgacacagtagtcacgagacatgtaaaacaagaggggatgtgaggcattttttcttcagcatacaccagttgatccactaatcaacaagccgtccatcgctccagaaactaccagctctaggcaaagttgatgtcatacgccttactgccgtccgccctgaagatgccaaagtggcgctcgaactcggggccgggcttgccgtcctcgtcgtacaagtcgaacaggaacacctccacgggcacgccgggccgcttcggcgtgccgacgccgcgcgccgccctctccacaatcttggcgttgtacgctgcggcgttctgcggggtggcggccgggtgccccgcggttggccacccggtctcggtcaccgcgaccggcacgccgtcgaacccctccttctccagcgcggccaccagcgcgtctaccgtggcgtcgaacagggcgcaccggtgtcggccaggaaccgcagcatggggcggaggacggggagggaggcggcgtcgaacgcgccggcggagggcgggtacgaggcggccagcaccgaggaggcgtgcgcggaggagaccttgaccctgccgtccagccccagggtggcgagcgcggcgtgcaggttccgcatggccggcacgaggtgaggcgcatagaactggttgttgtacagcacctcgttgccgacggcgaggcaccggacgcgctcggcgggggcgtgggccaggaccgcggaccgcagccactgcgccgcgccctcgggccccgccgcggccaggaaggtgaggttctcgttgggcacgcccaccatgaggtcgatgcccgccgcggcgaaggccgggagcacggccgggtccggcaggaagagccgcgccttggtgatcccgttccgcttgagcagtgccgcggcggccgacggcggcgggaggttactgccaacgcggccgtggcagatgccgatcttgcccgcgtcaccggccgccgccgccactgccatcgacgcgacggcgaggaggacgtggccgagaagacacaaggctattctcgtggccattggtgaaggaaagaaggaaggaagaatgccacgctttggttgtgttgtcgccgttaaatagattctgctttggcaagaattgtatggttctggttgcttgtagttgtagttgtggcagatcgaggaagttaaggttgagacttgaggatgggctttgtggcagatccacgtgggtcactgcttggttatgatgcttatggtcttttgatgggctgtttggatcgggttggtagtggccgttgacacacatagccg

SEQ ID NO: 19191 - DNA, 11055 bp, Zea Mays
aatcaaggacaagaaacacggcgacgaaaaggctaggtagagtcaaatccccgggagaccaaccacccccgcaccgccacgaacacgcccaaatcggagagccataccaaaccaaagccttcgcatccctccggaaccctagcatcctccctcctcgctcctgggatgccccagtagctccgatcggcgcctcaccgccatggatccgggcggcgggggcgggatgctcctggaggacttcggccagcgcgtggacctcacgcgccgcatccgcgaggtgctcgccaactacccggagggcaccaccgcgctgcgggagctcatccagaacgccgacgacgctggcgccgggcgcgtccgcctctgcctcgaccgccgatcgcacgggagggcgtcgctgctgtcccccgcgctcgcgcagtggcagggtcccgcgctgcttgcttacaacgacgcggtgttcaccgacgaggacttcgccagcatctcccgcattggagacagcaggaaggtcgcccagacgtggaagactggccgcttcggggttggttttaactcagtttaccacttgactgatttgccatcgttcgtgagtggcaagtatgttgtcctattcgacccccagggtgcttatctaccaaatgtgtcggcatcaaatcctggaaagcgcatcgactatgtcagttcgtcagcaatcacaatgtaccatgatcagttttcaccctactgtgcgtttggctgcgacatgaaagcatcatttcagggaactctgtttcgttttcctttgaggagctctgagcaagcatcttcaagtcggttatcaagacagtcatacacagaagatgatattttatctctttttgcccaactgtaccaagaaggcgtatataatctgctgttccttaaaaatgttctatcacttgagatgtatgtgtgggaatctggtatgaccgagccaaaaataatatactcttgctacttagggccacagagtgaaaagctgtcctggcatcgccaagcccttgtcaggttctctggcactcctgttgaatcttctaagcagaagctggactctttctcgatggattttatatcagaagcattcttgggcaacaagattgagaagaagagctctacctattttatcatccagggaatggcatctgcatcaagtaaaattggtatttttgcaactgcagctgccaaggaatatgatcttcacttactgccttgggcttctgttgctgcttgcatctccaacacagggcttgaggatactgttctcagacagggtcaagctttctgttttcttcctttgccagtaaggacaggactatctgtgcacgtcaatggttattttgaagtttcatccaaccggcgtgacatttggtatggtgctgacatggacaggggtggtaagcttcgctctgattggaacaggctactgttggaagatgttgtcgctccgttgttcagagaactgctgatgaaattgcggacgctttctgactccacaatatcatattattcactgtggccaactggtttatatgaggatccctggagtatccttgtggagcaaatttacaaggttatttacacctcgccagtcttgcactcagagattgaaggcgggacctggatatcaccggctgatgccttgcttcacgatgagggattctcaggaagcaataatcttaatgaagccctcgtgttggtgtggaaccatggtcttccatggtgaggaaactctatgtttctattgcagaacttggaattcacgttttatatacaaaagctcgaggtggtcactggctgtcaacaaggcaggctatttttccagatttcagtttctcaaaggcaatggagctggcagaagttctctctcaagctggtttgcctgtggtatctgtaaccaagccaataattgacagtttcattaatgcatatccatcagttcatctactaaatcctcatttgctgagaaatttgttgatccgacggaagcgtggcttcagaagcagagaagaggctatacttgttcttgagtattgcttgagtgatatgggagatccttccttttgcgataaattgcaaggtttggctctccttcctgtggcaaatggatcattcacaacattcaacaagcgaggggagggtgagagagtattccttacttcacaaatagaatttgaacttcttaaggattccataccacatcttgttattgacaactctttaccagatggtgtttcgaagaagttatatgacatagcttattctgcgtgcatgaacatatatatattcacaagtaatcttctcattgagctgttgcctaggatcttgccacctgaatggcaacatgctaagcagttgtcttggtttcctgagcagcaaggtcagccaagtatggaatggatggtatcactctggaattttttgaggcattcctgtgacgatatttcagtttttgcaaagtggcctataatacctcttgtagatggcaaggttgtgcaacttgggaatgctgcaaatgtaataagagattatggatggagtgaaaatatgcattccttgcttcaaaaactgggatgtttatttctgcgatctgatctgcagatagaacatccccagttagcgaattttgttcaggaatccactgctgctggtgttttgaatgctgtgcagtctgtagcttctaatctccaggatatcaaggaattgtttatgagcacttcattggcagaagcacacgaactccgaagtttcattttccagtcaaagtggttttctggaaatcagatcagctcctcccatatgaatacaatcaggaacctcccaatatttgaatcttataaatctagggaacttgttagcttgacgaatcctagaaaatggcttaaaccagaaggggtgcatgaggatttattggatgcaagctttataagaactgaatctgtgaaggagaggtcaattttggtatcatactttgatatcaaggaacctcaaaaggttgaattttacaaggaccatgtccttcctcgaatgtcagagtttctattgcagccagctattatttcagcagttattcgtgatgtgaaactgttgatagataatgatgattcagcaagagctgcattatgtgagaccccttttgtcttagcagccaatggagcatgggtccagcccttcaggctctatgatcctcgtgtgcccgagttactgaagttgctgcaccaagatactttctttccttcagaaaagttcatgatgactgaagtaattgaattgttgggtagttttggattgaaaagaaatttcgggtttagtactttgcttgacatggcaaggtcagtttcactggtgcagaattcaggacaaggtgatgcgtttgattatgggcaaaagctacttgcctatctaaacattcttgagtccaaaacttcaaagatggagggcggagaaacttttcttgaggatgggaatctggaagcatctgaaattagtgaaactttggaacctaacaatcacggggatgtgtgtgatccaagcgaccaaactagtgtatctttgttctcaaatttcgattatgatatgccagaagatttattttggtcagagctgaaaaatatttcttggtgtccggtgcatgttgcaccattgctcaaaggacttccatggttcatatccgaagatatcatagcacctccagtcatcacaaggccgaaatcacagatgtggcttgtttcatcaaaaatgcgaattcttagtgcagattcctgttccatgtatctgcaaagaaaactaggctggtgtgatccaccaaatgtgagcacattgtcttcccagttagtcgagctctccaagtctcatgatgaactcaaaatgttttctgcagacacagacattgatgctattctgcaaaaggaggtccaagtaatgtactcaaaattgcaagacataattggcactcccagtggcaacgctctaaaaaagtatctggatggatttcaatgggtttatgtaggagataggttcgtggcaccacaggcacttgcttttgattcacctgtaaaatatcatccctatctttacacagttccatccgaactgtcagaatttaaaaagttactctccgagttgggtgtaaggcagacatttgatggaatggattatctgaatgcgcttcgccgtttagaaggagatgtcaaaggagagccgttgtccacagatcaactcagttttgttcactgtgtattggaagcatttgttgactgttaccctgacagtcaagcacctgatgtgttactgaactcattggcgattccggattcacttggggttctgacacctgctagaaaccttgtctataatgatgcaccctggatgaatgctaatcccacttcaaagaattttattcatctcagcattggcaatgaactggctaataggcttggtgtacgatctctccgtggatcatcattgttggatgatgagttaatgaggaatttgccctgcatggaatatgctaaaataagtgagttgttggctttgtatggtgagagtgactttcttttgtttgatcttatagagctagcagactattgcaatgcaaagaaagtgcatctgatttatgacaaaagagaacatccgaaacagtccttactgcagcagagtctaggtgacctccagggttcttcgttgacagtggtctttgaaggaaccataatgaaccgcgaagaagtttgcagcttccaacttcctcctccctggaaactgagagggaacatccttaattatggcttgggacttcttagtagttactttgtttgtgatgcattgactattctttctggaggttacttttacatttttgatcccttgggcttgactggtggtacgacttccactgctacctcatcagcaagatacttctctttgttaggatgcttctttatgtactgcgaactccacgattatccgaatgccattatcgtcaaaatgcctcaaagaacttgaagcaggttgcaatatagtacagcgggtttttgaccgatttacacagaatccatccagtactctcctattcttgaggtcaatcattcaggtatctttatcaacatgggaggatggggcctctcagtcaactctgaattattctgtacttgttgacccatctgttgcttctttgagaaacccattttcggaaaagaaatggagaaaatttcaaatatccagaatattttcaagtacaagtgcagctatcaaaatgcaagctatagatgtgcatgtgattgagagtggctgcagttatattgacaaatggtttgttgccctttctcttggatcgggtcaaacacgaaacatggctcttgacaggcgttatcttgcctataacctaaccccagttgctggagtagcagcgcatatagctcggaatggagtatcaaccaatatacatccatctagttgtatattatctcccttaccactatctgggtttataagcatgccagtcacaactttggggcatttcattgtgaggcacagtggtgggcgctatatttttgacagtccacgtgatgcatctctgccagaacttaaagaggacagggtcaggttggttgaagcatggaataaggaacttatgttatgtgtgcgtgattcatatgttgagatggttctagaatttcaaaagcttaaaacagaccctctatcttctgctattgaaccaaggtctgcacaatctgttagtgctatattacagacatatggtgatagggtatactctttttggccaagatcgaagcagaatccaacttcgttcactgggcgtgtttctactggaactaatatggattcaccaagggcatctaaagcggattggcaatccttaatagagcaagtgataaaacctttctatgtacggttagctgatcttcctgtttggcaactttaccatggaaatcttgttaaagtggatgagggtatgttcttagctcactcaggaaatggagatgacgataacctcccatctgatagtgtttgtagtttcattaaagagcgctatcctgttttttctgtgccgtgggagttggttagtgagattcaggcagttggagttaccataagagagatcaggcctaaaatggtccggggactactaaaagcttctccatccattttacttagatccattgaaacatatatagatgttcttgaatattgcttctcagatatggacccttaccgcttctcggatgatctacctgatgaatcaagagttaacagccaacatgttggaacaacgaattcttcaatatcacattctatgccttcttcgagcagctcactgtcttaccaatcaagtactcagatggcaggtacttctggaggcgatgcacttgaaattatgacatactttggaaaagccctatatgactttggtaggggggttgttgaggatatcagcaaaaccaatagtccagcattccacaggactcaagctgctgaaactaatgtgttgtcatccatcatttctgagcttaaaggtgttccatttccaacatcgacaatgcgtctaacaaagttgggaatggctgaactctggatagccaatgagcagcagcagctattgatgagccctttgctggatcaatttatccattataaatgtctggaaaaacccttcttggctctgctgctttccactcaggttatccataggcctctgaaactgaggagcttttctccccacttactagcaggttatttgaagcgcatacttgatgagcgttggatacggattgtactagagaacaaatcctcatggattccttgggacaataatgctgaatcatcaactactccaactcccaaatggattagaagtttctggaaaatttttagttctttgaacggtgacctctctcttttgtctgattggcccttagttcctgcttatctggataagccagttctctgtcgtgtgaaggaacgccatctaatatttgtgccaccaattagtgattcaccagaccctcctggagatgatgtagctggacagcttgatacaccggactcccccagagaagatactagagcagaacagaatgcagtgcttgatactgcatttaggtcaatgaactcggaatttccatggttaacttctctgcttaaccagttgaatgtaccaatttttgatccctccttcccagagtgtggcgcaatgtgcaatttatttcctccaaatggtcgtactcttggacagacaattgtttataagttggttgcagccaaaaatgctgcacatttaccttcgctaattagcctatcaagtgaagattgcgataaactatttgggttatttgtttcggagttcatattaactaacaaccacttgtatcagagagaagaattggatgtcttgagaacacttccaatgtataagacagttacaggaacatacaccagtctgttaggttccgatcattgcattctttctcctacagcattctttcacccgagcgatgcccggtgcctttcttgctcatcaaatgcacatttgtttcttcaagctttgggggttgaacaattaaatgatcatgaaatactagtgaagtttgcgttgcctggatttggaaataaaacagctcaagagcaggaagacattttgacctacttgtatgctagctggaaagatcttcaactgaactctgctgtagtagaaaccttgaaggagacaaactttgtggcaaatgcaaatgaattttgtaaagagtttttcaaacctgaggaattacttgacccttcagatgctctgttgacttctgtgttttctggggagagaaataagttccctgctgaaaggttcatgtcagatggttggcttgttatactcagaaaagcaggccttaggacatccacagaagctgatatgataatacagtgcgcaagaaaaatagaaaccatgggacatgatattatgtcgtctttagaagatgctgatgactttgaggcagatttcacagacagcaaaaatgaaatcccttttgagatatgctctctggcagaatctgtagtaaatgtgctttttgcaaattttgctactttgtatgatagtgctttttgtgaaaagattggaaaaattgcatttgtgcctgctgaaaaaggttttccaagtattggtggtaagaggggtggtcgaagggtacttgcctcatacaatggagctatcttattaaaagactggccattagcatggagttctgctccaattcttaccaaacaaacaattgttcctcctgagtattcttggggagcatttcggcttaggagtccacctgccttcagtacagtttttaggcacttacaggtgaatgtcacaaaaaaattgaacaagtaatgttagaattatatcccttaactttctgtaatgaaacagattgttggtagaggcaatggtgcggacacactagcacactggccaacctcagcagagataatgacggtggaagatgcctttctacaggtcttgcaatacttggataaaatatggggaacaatatcttcttcagaaaaaaaagaactggagaaactggcatttataccagttgcaaatggtactcgattggtcccagtgaagtcactttttgctcgtctgacaattaacatgtcaccttttgcttttgagcttccaagtcggtatcttccatttgtttcccttcttagagagattgggatgcaggaaagccttacaaattcatatgcaagagaacttcttttggatatccaaaaggcatgtggttaccagcgcttgaacccaaatgaactccgtgcagttatggaaatcttggaattcatgtgcaatggaatcaaccaaagtatcacagatggatcagatgggccttttgattcagtaataccagatgacggctgtaggctggtcactgctgcatcatgtgtgtatgttgacccatatggttctcgtttactgagtaacataattacatcaagactaagattcacccatccagaccttcctcagaatatctgcaaggccttgagcataaaaaagctctctgatgtcattgtggaggaacttgatggaaaagaagaaattaaagttgtcaatagcattcactcagttactctagacagaataaaagagaagctgcgaagtaaatctttgcaagatgcattaaggattgtgatgatcagcgtaaccaatcatttcccttcatttgaagcccttgctttggttcagatagaacggacactagaggatatatcacagaaactgcaactggttcaacgtctccatactcgctttctcttacttcccaatctccaagatgttacaagaaccatccagcgtccttctattcatgaatggtcaagcaacggaatgcaccgaagcatttgtttcgtcaacaaagctacgggttatattctaatcgcagagcccccaagttttttgacgatatatgatgttatcgcaattattgttagtcacaggttaggggcaccaatgatcttgccgattgcctcagtgtttgcatgcccagatggttcagagaaagaagtccttcaaattcttcacctgggttcagactttggagtttcaaaacgtgaagggagatacgacgcttcccttggagcagaattgttatctcaggatgctcggcaggtgcaattccttccattaagaccgttctatagtggtgaaattgtggcatggaagacaggcaaagagggggaaaagctcaggtatggtagggtccctgaagatgtaagaccctcagctggccaagcactttacagatttccagtagagacagctcctggcgaaactcgcatgatgctttccagtcatgtttactcatttaaaagtgtttcaatggctgatcttctgtctgcaccttcccaagtgaatggtgatgtggcattaggtggccaagagaacctcttggccaccaacactggcactgaagtcaccaaggatgcggatgctggacttgaatatggaaaagtatcttccactgaactggtacaagcggtccatgatatgctttcagctgcaggagtaaggatggatgctgagaaggaaacactctttgaggctactctttccttgcaagatcagcttaaagaatctcaagttgctctcttggtagagcaggagaaggcggaggcggctgtaaaagaggctgatgtcgccaaagcagcatgggcatgccgtatctgcctgaatgctgaggtcaacatgaccatcataccatgcggtcatgtcctatgtaaccgatgctcaagttcggtttcgcggtgcccattttgccggacgcaggtggccagaatgatgaaaatattcaggccataaaaaacattgaaggacgtttggtctgactaaccgcttcagcctgtgaatgtgttacgatatcggggctcggctcccttctggttgtgcgttgcattcctttctggtctgatgcatctcattattctccatcggtgatgattggtaatccgatatggggggtgcaagtatagttacgttgtacaggaacgatgcattgcagtgtacatattccaaaatgaaatcattttacacacttcgaagggcatcgatgtctgaagctggttttctcgtgcaatactttcagagtcaacactacactgccctggttatccattcagcatgtatggtggtgtccaacaaagacccattccttgtgaaaaaatcttagcactggctccttcaatacgaaagaaacgacatactgaaatcagctacgatgataggctgctagcctacgggctaaacgtggtttcgttactgagcagcgggtaaaattgtcaattcgtacaataaactggggcacctcggccctcagtcataggctcatagcatttgatgcaaccaggtgaccaggctactgttccatttgcatgtttctttttccagacttcctcgaatcatgctttcacagtcgactacaacttaatcccgttacccatgaattgaatgtgattggaaaaaattaaggagtttgacct

SEQ ID NO: 19192 - DNA, 1726 bp, Zea Mays
gccgcagcccagaaatatcaaagcccactttgaagacggcagcagccggagcgcggcagcgcctgtgctggctgccgcggccgcaccccgccgcaccctgcgaggcgatcaacaaccagcaaaaccctaaaccctagtggatgtttctagagccgccgtgcaccctcattcgtctcgcctgcactgtttctaaaatcaacccgtcccccacctcctcgccgcctcgcatcctttccccctccgcaagaaagaaagcgaagcaactctccgccgcctccattcctccacagcccacaccaaccaaacctctcgccgacaacagcctcggtccccgcgccaccatccgcaatcatgtaccgcgcggccgctagcctcgcctccaaggcgcggcaagccgggagcagctccgccgctcgccaggttggaagcaggcttgcctggagcaggaactatgctgccaaggacatcaagtttggtgttgaggcccgtgctctgatgttgaggggtgttgaggagttggcagacgctgtcaaagtgacaatgggtcctaaggggcgcaatgtggttattgagcaaagcttcggtgcaccgaaagtcacaaaggatggtgtgactgttgcgaagagcattgaatttaaggatagagtaaagaatgttggtgcgagccttgtgaaacaggttgctaatgcaactaatgacactgctggtgatggtaccacatgtgctactgttttgacaaaagcaatatttactgaggggtgcaaatctgttgcggctggaatgaatgcaatggatttaaggcgtggaatctcaatggctgttgatgctgttgtgaccaatctgaagggcatggccagaatgattagcacttcagaagaaattgcacaggtgggtacaatatcagcaaatggagaaagggaaattggtgagcttattgccaaggctatggagaaggttggcaaagagggtgtgatcactattgcggatggcaacaccctttataatgagcttgaagttgtggagggtatgaaacttgacagaggttacatctctccgtacttcattaccaactcaaaagcccagaaatgtgaactggaagacccattgatcttaattcatgacaagaaagtgacaaatatgcatgctgtggttaaggttttagaaatggctctaaagaaacaaaggcctctactgattgttgcagaagatgtggaaagtgaagcattaggtactctgattattaacaagcttcgtgcaggcatcaaggtctgtgctgtcaaagctcctggttttggggaaaacaggaaggcaaacttacaggacctcgctatccttaccggaggagaggtaataactgaagagctaggaatgaaccttgagaatgttgagcctcacatgctgggttcatgcaaaaaggtgactgtctctaaggatgacactgttattcttgatggcgctggagacaaaaagtctattgaagagagggcagaccagattagatcagcagttgagaacagcacttcagattatgacaaggaaaagctccaggaacggttggcaaagctctctggaggtgttgctgttctgaagattggaggagccagcgaagcagaagttggtgagaagaaggatagagtgacagatgcactgaatgctactaaagctgctgttgaagagggcattgtaccagtatttgtgttagttattcctgatttcctgttgcgtc

SEQ ID NO: 19193 - DNA, 2521 bp, Zea Mays
caaaagcacggcaagaacgaagccggattcggaaggaattcgcatgtattccgggcggatcacgtcccgacccaactcacgtctcgtcgccctccttccattttttttttccttttcactcgtggcggttgtacccccgtgcatgtttgtgtgactgtggtgtgatctgtggctgactggctgtggtgtcaagtgtgatacagagagagagagagaggcaggcagctgcgtctgcgtcgtggccggcgcggcgctgcgctgcgcggaaaccaaatcctcagctccggtgttctctccaatctccatccatccatcctcctcgcggctcgcgccccgaaaaatggcgccaacccctccccagtctcccgcgcggcgctgccccagctatttccccctcccctgaattgaccccagccgcgcctcccaaaccctaacctaacccccgccccctgggccccggccatggcgtcactgcccaagccgccgccgccgccacgccccaagacgcggggcaactacaactgcggccgctgcggccagcccaagaagggccacgtctgcgtcggccccggccccggccccggcggcgctgcgtcgccctcctcctcgtccggggccggaggggagcacgggctgcgccgcgccctctccttcgacgaggccggcacgccgtcctcgccggagaagaagcccaaggtggaggacgtcgacgaggcggagctggacgaggaggccacggtggacgtgggcgcccgcgcggtgtccagggaggtcatggcggaggttctgcaccgcctcggtccccgcggggtcatggccgccgccggggtcagccgaggctggcgggactgcgcgggccgggtctggcgcgcggccgaggagctccgccttcgcgtcctcgcctcctctggcgccggcctcctcgccgcgctgctcccccgctgccccgcgctctcccgcctccacctccggatggaaagtgatgttgatggcactaccctggcttgtattgcattttcctgcccaagtttaagaactctcgagattaccatggctgctgatgctgtcaacaggatgactggggaggatctaagtcgttttgtttcggagaagtcttctctctcagccctcaaaattggtggttgctctaatttggatattcttaatctgtgctcttcaagcctttcaattctttggttgtcagatctttgttccctttcgaaatcggttatgaactgtcctaatatgagcgagctatcactgtgcttcacagaacatagtagtgattgtaccaatctgattactttgatggatggcctaggtcgtacatgtcctaacttggaaaaaatgcacatatcatcaaaacaattatctaatgaagctgtatgtgctctagagaatgctaatctcaggggactgttcatgctatccctgattctaggttcaaaaataactgatgcagctgttgcatctattgttcggtcatgtgcaagcttggagttacttgatttaagtggatctagcattagtgacaatggtgttgggatgatatgtaaagcataccctcgtactttatcaaggctgctccttgctctttgcccaaatgtgaccacacgtgggatccagctagccacagcacagttgccatgtcttcaactcatggactgtggaatgagcctatgtgctaatgtgaagaatgaaaaagagggtccatattttggtgaaatcaatggaggtattagaattattcgaaaactgtccatcttaaagaggcaacctattcaccaaaagcttattataaagcatgggaatttgaagaagctcagcctgtggggctgttctgcattagatgctctatatctaaattgtccagagttaaatgatctcaatcttaactcttgcacaaatctacatccagaacgtctgcttcttcagtgcccaaatttaaagaatgtctatgcatccggatgccaagatatgttgattggagcaatcagaaatcaggttctgaatgagttcgctgcagttgaaccatctcttccatgcaagcggctagcggatggctccaaacgggttcaactccctcagttcctaaagcagcagccgtcgaaggacaacaaattaattgaattgagccagacccagtgcactgtgcatcttggttcataataacaccaccagagccagttaacggagcattgtacacaccgaattatgtgaatcatgcaccacataacattatcaattcgttgtatacttctgtattgcatcagaacctgtagtgattgttgtataagctgctaattgctgcatggacatgtctgaatccatcatggatttcttgcgaccgttagtctgttctaggaaacattatataggaataattcgtaaccatgacccgtattctctagggaaaaaaaataatgatcctaggtcactcattttggttggtgttattctgttattcttccgcatgagctatctatggactttggttcttcaatctctacttttaaatagg

SEQ ID NO: 19194 - DNA, 1307 bp, Zea Mays
gtatttgaagacagtgttttaagacacggaggaaaaagaaactgacaatcccaagttacagtgttacacatggccccccaaatatctcgcctagatcatctccctacccctcaaaatttcgactataaaactgcactgctcccttggtcctccaagaagaaaggaacaaaggagagagatctcgatccgcacacctcacgcctctcttcctctcgccccaaggacaacgaaaacatcaaacaagagaaccaaaggaaacagagcaagagcatcgctctcgaagcaaaacgcgcaccacgccgtcgccggccggccacttcgcacgtacgtaggacgcgcacgcaccggtgcatatatggggctcctgaaccagctgtgggacgacacggtggccgggccgcgcccggactccggcctcggcaagctccgcaagtacgcctccttctccccctcgtcgtcgtcgtcggcggcggtggcggcggcggcggcggcgggctccgcgccgcctccgggcgccgtgacgcggagcttgaccatgctgcggcggccggcggcgctgtccgtcgtcacgtcgccccgcagcgagtccagctccgcgccgtcgtccccgtcgcccgcaagcggcgctccggattcgcccttcggcgcagctgcagcgacgacgcccaggggagagggctggacgaagaagctgcgcgggaaagccaggatgggcggcggcggcggtgacgacgcccccggcacgccgaggagccccaccgtgtacgactgggtggtgatcagttcgctggacctctgaagcccaagccaagacgagaactgcacaaggaaacccaccaccaccatcaacacagctagcgaactgaaggagggagggggcagaggggccatggccatgtaatgtaacgaccaatctctttcagagcttctggtgacgtgtccagttactatatacatacatacgttaacggtgtactatgtgtcttgttgtaaatgtcacccctgcgaggtgttgccgattttgtaagctactacgtactactacgctcggcatgtcaccgtgtgcaagtgcaacacaagtttgtaaaaatgactagctagtagtagcaatgctgttgctgtacgagtaggcctccctctgctttgtacaggggtagtccaacaagtatatggtttgctggtgccatgtaaaaatgtatatagaatcctacgttcacgcccagcaaggatgcgtggttgagtgttctggactctggacaatactactatccaataacagccataccgtgtttttttcctgggccaat

SEQ ID NO: 19195 - DNA, 1016 bp, Zea Mays
ttccaatacctagcaagagtgtctgtggtattttttacagcaagaggtcaaattttcacaaggtacagagatgttgaacattttcaagaacttcacgtgtaaagcatcaatactggatgactttgacttctacgaaaatcggcagaaagtaatgcaggatagaagaggcaagccacttacatcgtttggtcacccattgccaaaagctgaaaaaactgcagaagttaaaaggcaaacacaattgataagtgccacggaagttggtagagccgatacaaccaaggaaaatgaggagaagagcagcagtgttccagaaatactcaacgcagcatgtagtaacaaggagaaacccaacaaaatcgcaacagacggatgatgccttggctagttgactgggaaaatgagatagcttctggaacggacttcaacttgaattcctgaaatcataagttcgatgtgcgcaatgtcaagaaaccacaattggtcatgggttctcttgcattttctcatggaagtgaagaaacgaaaaaagtgaagcaacggaactgtcttcccacgagaaatgttcaatgactgggaaaaaggttctaggacgcatttaggttgaggcccctggtgctaaggcattagagcgccctccttgtctgtttttcccccatattggagggtcgtttcttttcttttgtcgtgcccctttttcccctcttcttttgcctattattctgcagctgagattttgggaagcagtttgcacttaggtccaaagaaagggaatgtctgttgctttgtgggttgtcctctaggatgtggtaggtgttgactgttttttagaatctgtgcacgttctagaaactgacagaaaaaaagagaaaaaaggattgtgagggattagaaataaaaaggatcttaaaaagatacatggtatcttatgtttactgcttcttccattatcaagaaaactaacaatgggtctagatgctttcaatagtaagactatatttatataaagttcaatt

SEQ ID NO: 19196 - DNA, 1028 bp, Zea Mays
ctccaattcaacaagaaagaataaaaagtcagcttttattcatctgtagcaagtggaacttgttaaagggagcatctgattcattgaacctaccggtggcttttatcagtgttattttgcttcctattgtgggcaatgcagctgaacatgcaagtgcaataatgtttgccatgaaagataagcttgacataacactgggtgttgcaattggttcatcaacacagatatcaatgtttgtgattccattttgtgttgttattggttggatgatgggacaaaggatggacttgaattttcagctatttgagacagcaactctcttcataacagtgcttgtggtagcatttatgctacaggatgggactgcgaactacttgaaaggacttatgctgatcctatgttatctaatagttgctgccagtttctttgttcatgttgatccacaatcaagtgatggttgatgccgtagatgctgtaagtaatgcgtcaaataccttttgaaacttgttaatcctttcttgtggaggtgctactccatagcaacgttccacctgtttcaagcagcatgctggcaaaaaaaaaaggcgggaagatcacacattgtcggttccttcatgaaccgcaaaaggaattcttgtattgtgtggataatgaggtgtactaggggtagtctcaatgtatacagaaacaagaagtgccagcatgttacattcgattaattggatgggtgagtccctctttttttttctggttccctttgagatttgggtatatgatttgatgctgactgaggctaagatctctcatccttttttgtggttgatgatgtccgcgcactcatggttctacatctacgtttctttttcttccctagtgattatgtgtacatttgtggttgaccatgtccgcacagtcacggatggtcataccccatgtgaggatcttaatactctaacgccgcgcaaaaattctagtattccttaaaccaaacacatcttgatggcaaatcaatttgtatggcttgtcct

SEQ ID NO: 19197 - DNA, 1836 bp, Zea Mays
tgactctgagaccgagagcctccagaaacccacgcgacgcgaccgaccaccatggccgcctccgcgctcctcctctcgccgcggctcgtgtctttcccgcctcacccgagcctcgccccactcttcaccaagagaccaccgccctaccccctcggcggcgccggcgcgaggctccgggccgtcggggacgggcccggcgcggggctgccacccgagcaggccacggtctacgacggcgcctacggtccctggaccctggaggactccgacgtgcgcgaggtcctgctgtaccggtcggggctggtgacggctgcggcgtccttcgtggcggcgtcctccgcggcgttcctgccggaagggaaccccgccgcctccgccgtcaccggcgccgccgacctcctgtacgccgccggcgccgcggggctggggctgtcgctggtcctcatccacatctacgtcaccccgataaagcgcttcctccaggcgctgtgggcggccggggcgctcggctccgtcgggacctacctcgtcgccgcccgcccgctggatgagggcctcgtgcagtacgtgctggaccaccccgccgcgctgtggttcgtcggccccacgttcgccgcgctcactggcctcgtcttcaaggaaggtctctgctatgggaaactggaagctggcatcttgacgtttcttatccctgggcttcttcttgggcatttggtcttttaggactgtggatgcttcttttcacaatcttcgccgctagaaaattccagcagcccatcaaggatgacgtcggagacaaatctgttttcatgttcaacgctctccctgaagaggaaaagaaggcttggatccagaaactcgagaggcaaaaggggcaagagttgtttgagtagaaaagagtagcttgtcttggtgcagccaatagttcgtccgtgaatgtttgtagctcatgtatatgattatggctccagaaatttgacaaatacacccaaagacatgaagacgagaacacgttccaatagagatgtaattacaaatctgttagatcacaggtaagatgtaactaaataaagcagttttgttgttatagtcgttgacaatattttagtttgttgctcccatgccttaatcaagtaaatacaaaattcactacttgattggaaggtggaggaaacagaaaaagttatctatgaacgtacatatgatgagcaaacagataatggtaacagaaacagaagaccacattcgcttgcatgataatggaccatccaccgagttcagtctaaaactaccaaacttaatcaccacaatacaactcaatagttctcacatacaatacaactcagatacatataagccttggaatgccttaaacatgtggcagatccccaagacattggctactacttggtagcacccaatcgcaaggtataccatgcagactgttctggtaataagctcttaaaacatcaagaaaatttgcaccaacatgactgatgccctaaataaatagctatgaatcaccaccattcaacctaccaatggtacacaaattttgaagaaatcagttgcagagtcgactagtttccatagacagcgccatttgagttcagagaggctccgttctggggaacgtcagctccctctacctccgacaagaagccattctcaaagaacgctgaatggagggcttgtacgcactgttttgcctcactgtcattgactaccaaggaaatgttcaccttggacgccccttgtgagatcatctggacattaacaccatttcttcgcagaacgttgaatgcctggcatgcagcaaaacagggtcagccattc

SEQ ID NO: 19198 - DNA, 2382 bp, Zea Mays
ccaccatcggccatcgcgccctccccaaatcgcctcgtccgcccaattatgctcctcaaaccgcacgcgcgcgcgcgactcaccgccgttgtcgtcgtcgtgttcgcggagatccgcggggctcgcccatccccctcctccctgctctcctccccagcacccacggcccgctgctgcccctccgcgcgccccctcgccaaaccctagcttggccatctccccccactgccccggcgccaccacctgccctgccctgcgcgtggccggcggcgccgaccgccgccattgtcttacggaggcgtccgagtcccgacgcgttggaatgcgctgactgaagtgtgatcattgaggttctggttaaagaaacttctagtatcgattggcttccctcccatggacaagatacaatctgattgcccttatcctggatgtttcttttgtgtcatgaaggaggcgaaccctagtaaacgaagagcaagtgtgttaaagtactttagggaacttccttcccaagacgatgatggtcaagttctccctattagtggtctctggaacacagcaatggctcacccaaatgatcccgagttcatcaacttgggcatatttgaatgcatggcatctcttatatggaaagggttgaaaaacaggcgttggcttgcacatgatcagaatatttacatcccatattatgcagctcacataattggatcatacacaatgaatatggaggagtttgcagagcgtgctgttcgtgctggtgtaatacctccattagttgaattattaagaggtaggttgacatgggtcgagcaaagagttgctgttagagctttgggtcatttggctacatatcctagtacatttcctgcagttgccgatcatggggaagtacttgaacttgccattcaacttgcttcgagctcgctagaaattgtgtactctcacttttaccagtttgtggatcgaagacttggctaccattgcgaccttcttactcgtggcatgggtggtgtggaaatggagtcccgcaaagctgaggaatgggcaagtcaactgcagtgctggtctttgcaactcattaactgctttgcatttaagcctgaattcctccatgatatttgcaagcctgattttctagtcaagttacctggaatgtggggtggacttgtaaatgagaactcacctgctggtgttggtttgctaagaacaatctgccagagcaaggttggccgaggtcatgttgctaacattcctgctactattgatgctttatgcaacattgctcgttcttcagatgactggcaatacatggcagttgattgtctgatctggttaatgcaggatgcaagtacttgtcataaggttaaagatatagttgcgccaacactgatagatttatcagatatttcggcactgggtgattataaaaagcttggtgacacaattgtcacagtcctccaagaatgtatgcaacagagtgggaactcacgtggtgcaattggtgttcagaccaaatcagaaattgatgagcttttgagatccaagcaaagtctgaaattggaaaagagtatgccaaaggaggatcttcatataaaacaagctgcggcattggttgtcaagttggaaggcaattcactgttctcctcagggaacatcgcaggagctgcagagaaatactctgaagcgcttgcgttatgtccgatgaaatccaagaaagagcgggtggttctctacagcaatcgagctcagtgttaccttctcttgcagcagccattggctgccataagcgatgctactcgagcattgtgccttcacagccccgtgaaccgtcatgccaagagtttgtggcgaagagctcaagcgtatgatatgcttggtcttgcaaaagagagcttgttggacgcaatccttttcataaacgagtgctctcagtcgaacgatcccgacttatccctgaagcaaaacaaagtccctgactatgccgagcggttggtgaagaagcagatgcgctccgcttggctattcagggaagcagctctgaagcacgggggcgtacactgtgaaggagatgctagcgacgcgtttggccaggatgctgacgactctgagtgggaaacggctagcgaaagcgacgccgagaatgatgacacgggagaagcggatgatggaactgaatggaagaacgatggacaccgggaagatatctgtgagaaaagctgaggagcagggcaagctgaacctattcagagggagtcaaactgagcagtgacagaagcagctgctgggccttatgaagtctgctgcgctatcagcctatcaagcatcagatctttctaatgcagcgatctggtaacattcaagcgcgttgtagtaactgcactc

SEQ ID NO: 19199 - DNA, 831 bp, Zea Mays
cgacgctacgcgagagtagatcacgatgggtgttgcgaagcacgaagagaccagtaaagtcgagaaagacagtgttctcagagtaacacgggaaggaaaggaacggaggaaacgttgggcccaacgaagaacatcctctaaaccagataagaaggcgccaaaggaagtagaagatgaagatactaaaaaaagcaaaccttcgcatcagattccgaggaagaaaatgtaaagcagaaggtccagaggagaaagaagagaatgaaaactgatgggcctgaaactattctgctgaaagatgtccgttcaacgcaacacgtgaagaatgcccttgatttcttggagcataggaaaaatcgtgtcccaaggtcaaatgcagttttgaagaatgccagtaaggctttgcgtctcctgtcttcgaaaggtaattttctaagttaagcgtgtggtagaatagcacattttctgaatctgtgcttagaccatcctctcgacatcagacatggtcaagagacttaggaccaatgtgttggaatggaatctacctggcatgtgaaatgtaatgcagcatatccttttgtgtgaatgtgatgattagcacacatgttccttgtaagaaatccaaggtttgtaatcattgaatatatttgagtttgagttatctatttatatgtttgagttttggttaactattccatagttagttaagttgacagatccatttttaacttttaaacagtcaagcgaggcgaccccttaaatttattttaaaatagaaaaatatttatatttaagaaaacatttaggataaaaataataataaagaagagaaaa

SEQ ID NO: 19200 - DNA, 623 bp, Zea Mays
agtcactcggtcgccagcctagcagccagctaccgcatctccgggcgttgcacttgcacagggcggcctccatagttccatactacgaacatgcccaactgtccgctgggtctgggtcagacagaatctgccacccaccccacctcctagtctcccgccgcggccctctggtcagaggcccacatagatagaggggaaccagcacacgcagacgcaggaagccaagtcgcctgacttgcgtcttcttgcttcctcctgtgccgtgtttcatttctttgacacaacgacgtccgggcagccgcctcctgtcgccagttcgccactctctggttgctgcacgcctctagtcggcggggccaagaggtggaaaagggcaggatgaagtccggcgagcggccgaagcagatgcggggcgtccggcaggaatctcggcggttccggcttctggtcatcgtcgccggcttcttcctcgtctccctgaccttcgtcgtcatctccaagcccgattccatcctgtccagcctggacgcgaacggctctggcccatgccacaagcagggggtgaaataggcgatgttggatctgctgaagacatggggtgcatagtttgtagttatagctag

SEQ ID NO: 19201 - DNA, 599 bp, Zea Mays
cctggttccgccgatggtctgtatgagtttggttcgttcatgtcagccacactgagctgtgaccacagggttatagatggtgcaatcggtgcggaatttctgaaagcattcaagggctacatcgagaacccgacttcgatgctgctgtgaagttaggatcgatgacctaacacaattcttgtcaagttgtttaaataaccaggccacccaaaggtggcgtctccaaagttccaaaccaatagcacagagccgttatgatattcccagtgttaattaggatcaacgtatagaggcctgaagtcatttttgggattgttctcacgggcaattgatgggaataaatatgaaagcagccaacatgggaaataacttttgattttttttctttggaacatcgctatgcgatttaaaaaaattgtgtaaatctgttgagcttctccacagtaagcgtgatttgatgcgttgatgatatcttgataagagtggtaatcatggattgggttaatatgttatgatgcatggtctaataccatcaaagggcctgcctaatgacagcgcctgggctgacagattcataggaaaaatttattaagtttgct

SEQ ID NO: 19202 - DNA, 2537 bp, Zea Mays
tgcatagcctatcgagcgacggcctacgctcaaaaaacacaaatcgctttccgcgccgccgccgcgccgccgaccggcgctcctcacctctcccgccgcacccatcgtccccccgttcccggctaaaccctgcttgagccctagacaccgcccgcctccgggaggtagagagcatgcacgccaggttcctcagcgcgccgtcccctgcctccgccgccccctccccgtacgttcgcttggccttcacgggcgccctcccgcgccgcgcgtgttggaagccgcgaggccccgcgtccgcgtccgcgccgccgcctcggcctctccactcgctgtgcgcccgggcctccatgcagcccgcctctcccgcgcacgacgggcatggtggtccgccggtgcacggcgtctccaacaccgtcatcggggtcctggggggcggtcagctcgggaagatgctctgccatgcagcgagtcagatggggattagaattgtcatcctcgaccctcttcccggctgccccgcgagctcggtttgcgatgagcacgtcatcgggagcttcaacgatggggacacggtccgggagttcgccaagaggtgtggggtcctaacagtggagattgagcatgttgatgccgccacactggagaagctggaaaaacagggcgttgactgcgagcctaaagcctccacaatcacgattattcaggacaagtacaggcagaaaaagcatttctcaagatacgagatcccattgcctgacttcatggaagtagatactttacgcagtatagaggaggctggggaaaagtttggctatcccctaatggtcaaaagcaagagattagcatatgatggtcgaggaaatgctgtagccaagaacaaagaggagctatcttctgttgttgcttcactgggtgggtttgagcggggcttgtatgttgagagatggactcctttcgtaaaggagctttctgtaattgtggcaaggagcagagacaactctactgtctgctatcctgttgtggaaacagttcacaaggaaaatatatgccatgttgttgaagctcctgctgatgtatctaacaaaataaagaagttagctactagcgtggctgaaaaagctatcaaatcattagaaggagctggtgtctttgctgtagagttgtttttaacagaagatgatcagattttattgaatgaggtagcccctaggcctcacaatagtgggcatcacacaatagagtcatgctacacctcacaatatgagcagcatatacgcgctattcttggccttcctcttggtgatccctcaatgaaagcacctgcagcaataatgtacaacatcctgggcgaggatgagggtgaagcagggttctttctggctcatcagcttatcagtagggcactaaccattccaggcacatcggtccattggtacgcaaagccagagatgcggaagcaaaggaagatgggtcatattacaattgtggggccttctaagataagtgtaaaatcacgcttggacaacttgctgcaaagaaactcgtctgatcccaaggaagccctcgtgttgctattataatggggtcccaatctgatcttcctgtgatgaaagatgctgagagggttttgaaagagttcgacataccttgtgagttaactattgtttctgcacatcgtacaccagagcggatgtatgattatgcgaagtctgctaaagacaggggtttcgaggtcataattgcaggtgcaggcggagcagctcatttaccagggatggtggcttcattgactcctcttcctgtaatcggagttcccattaagacttcaacactatcaggatttgattccctcctatctattgtgcaaatgccaaaaggtattcctgttgcgactgttgctatcgggattgcagaaaatgcaggtttgctggcagctaggattctggctgcaagagatcctgagctccaggacagggtaactaagtaccaggatgatctgagggacatggttttggagacggcagaaaggctggaggaccaaggcccggaggaatttctgaagggaatggattgaccccttttgaagccctggctctggggcctgggaggaatacgagtgtattatgggtcggcgataactcactgtccactcgattatggtttaagatggggagtcatcaagaagatactttaataggctcggctgcattcgattttccttacaattcttttttgataattgtgctatcttaacccatctcaacatgcccttttcccttctaatatagggtatgaattttgggtttagagggggaaaaaagaatgggagtaaacgttgtacgtacgaaaaataaaacggttcgagtaacgtaaaaaacatgcctggatttttcagccgcacaagttgctttgagtcaagtaattgtacatattccctccgttctaaataaggccttgtttggttattaccattgttcatggattggatttggttattatcattgcacatggattgaatgagattataaaaaattaag

SEQ ID NO: 19203 - DNA, 3999 bp, Zea Mays
cacacacaaaagaattatggcggcagccgttgccgttcttcgcgccgccctccgccggggccgtccggcagctgcgtcgctactgcaccgccttcccaacccctctgctcggagcctcccgccaccgcctcctctcggtcgagcgcttcgtcccctctcgcggcttggtttctccgccggattcgggcactcctcctccaccgaggattttggcttcggctactcccccgccaccgaggattcagcggccgccgcgaagcccaagaccaagaccaaggccaggaagcaccccatgaagcagtcgcgcttcgacttcaccaaggtggacgccgcgcttctccccaccgtcatcctcgtcggccgccccaacgtcggcaagtcagccctcttcaacagatttatacggaggagggaggcgttggtgtacaatactcctggggaccatgtcactcgtgacatccgtgaaggagttgccaagcttggggatctccgtttccgtgtgcttgactcagctggacttgagactgcagcaacatctgggagcattctcgctcggacagcagacatgacagggaatgtattggctaggtctcaatttgccattttcttgattgatgtgagggatggtcttcagccgctggatcttgaggttgggcaatggctgcgcaagcatgcatctggtatacatacgcttgttgcaatgaacaagtccgagtcacttgatgagcatggatttctgactgctgctgctggagaagcacacaagttggggtttggtgaccctgttgcaatatccgcagagacaggcctggggatggcagaactctatgagatactcaggccattgtttgaagaatacatgtttcagcttcgaaataatgacctcaaccaagatgatcctatctcggaggttgaaactgaggcccatgatggtgatgagagcaagttacctttgcagttggcaattgtgggacgtcctaatgttgggaagtccacccttttaaataccttgttgcaagaacagagagttcttgttggtccagaggcaggcctaacaagggactcgattcgggctcagtttcaatttgatagtcgaaccgtgtatttagtggatactgctggttggatggaaagatcagggaaggagaaagggccagcatctttgagtgttgtgcagtctaggaagaacttaatgagagctcacattgttgctcttgtgctggatgctgaaaagattgctaagtccaaaagtagcatgaatcatccagaaatcgtgatagcacggcaagcaatagaagagggccgtggactagttgtgattgtcaataaaatggatctccttagagataaccaaacactgtttaacaaggttatggacgctgttcctagagaaatccagacagtcattcctcaggtgacaggaataccagctgttttcgtgtcagcgctggaggggagggggcggattgctgtgatgcgccaggttatagatacctatgagaagtggtgtttaagattgtcaacatcacggctcaaccgttggttgcgtaaggttatgagcagacattcctggaaagattcagctactcagccaaaagtcaagtacttcactcaagtgaaggcacgaccaccaacatttgttgccttcatgagtgggaagactcagctttctgatacagatactaggttcttgacaaagtccctcaaggaagatttcgacatcgggggaataccgatacggatcatacaacgttctgttccaagaaaagcttatgctaagcgcaacaacacaaggaacactggccctagggttgtcaggatgaaaacagacaaacggacagcggtatctgacccagccctgtcatagagggtgagcaccagtatcagccgcctaacctgaagaagggaggtcatgtttcgcgtttgagctatatatatatgcttctcatggggaaacgggaagtgaatgtttttctgactcgggaagttatacaaagctatgagctagccggtccggctgcctgcaccgcatgctcaagaagaagaatgactgtaagaaacaagcccagcaattcgaaggacagcatcacttctcaacattgggtgcaaggtggtattgatgagcgtcaagcactcaagttcaccccagaactccagatcagatgaagaggactcctatgtggttcaaaaggatgctatcaccgtcgaagaagactgaaaatagtccagtatttaggttttttatggatctgaatgatgcagtatcctatgtaaagcgactaaatgtgccaagcggcatggtgggggcttgtcgccttgatgtagcatatgaacatttcaaggaaaagcctcacatgttccagtttgttccaaatgaaaagcaggtccaggctgccaataagctattgaagtcacttccacaaaggggcagaaggaaaaaacttgatggggttcctgtttttagtgcgcaaaacttgaatattgcagtggcaacaaatgatggaattagatggtacacaccatacttttttgataaaaacttgttggacaatatccttgaagcttctatggatcaacatttccattcgataatgcaaaatcgccatacacgtcgtagaagggatattgtcgatgatagtttaacatcagaaataattgaagaaagtgctgaaagcttgcttgagcccccagaggttcaagaattaatgaatgagattggcccagctggtataccattaaatgttgtaacgaaagctgcagagattcagtttcttgatgttgttgataaagtccttctaggaaataagtggttaaggaaagcttctggcatacaaccaaagttcccttatgttgttgattcatttgaagaaaggactgctgtttcaattgccaatattgctactaccagcagtttaactgcttcaaacgacgacagcagttgccagaataatcaagaaactcaatcttccgagccaagtggtgataacagcagctacagaaatcacaataatgaagatcataatcactttccgtttagcaatctgcttccaaatatatggccagggcatgacagaaagttcaaatcacaagagagtgacaataagtttagcagatatgatgccgacgtgaagagtaagttacaagcaaaccctcttcttccgaaaatcaccatggttggcatctcaatgggtgatggtgcacagatgagcaaagccaacttaaagaagacaatggaagacttgacaaaagagttggagcaaacgagtgaagaaaatatgttcggtgatgaaaaagacccactttttgttgccaacgttggtgactactcaaggataacaaagattagctctgcatgaggctcgttgaccaacaggcgacagcaagggtgttgtactgaactgctaacgaagtctacagtccatgatactgatcttagagggctctactgatataatgatgcaaatcggaggtcatcagatcatatggacattcgactgtcgaccgttctgactttagaggctatccaacgtcaacagttacaagccaatctaaattttcggatatgatttgccaaaaggatgattgtaaatagaaaagtttgcagaatgtccaccatgcagttaggcgtgaagatctgaagcaacatgttgttggatttctaagatcttagctcgtaacagctgtagagtatggtggtatatagcttcaggattgagatgggggtcacaggagtctgtcaggtgagcagagtcgaataaattgatgtgggtagcatttttcttcactagctgcgtatcggatctgagtgtgtatggcgagagttacggtaaatgttggttcgcatataggtccttggattatttattgtacgcgatatggtgaaaggaggttgtagctaacatgttgtgtctccgatcatcatactgacattattgtctctcatgatcttatacttgcttataaatagaacttaaaactttattttgagttgacagcatg

SEQ ID NO: 19204 - DNA, 3036 bp, Zea Mays
gggggggggggggcgcctcgcccgcttccccggagaagcgggaggaggaggaggaggtgccgggggaggtggcggcggcggcggcggccgtggagcagccgaccccgcggaagacgcgccttccgcgtgcttgcaacaacaagcccaaacctcctcctccgccgccgccgcccgagcgtccgcgccgccgtgccgcggcggcgggcggcgcggacgagacgccgcaatgccgcgtggtcacgccgctcgtgtcggagcccgaggcgcccgcggagctgccccgctggcggctccgctgcatgtgggagctcggctccgtcctcaacttcctccacgtgttccggcctctgctgaacatcactggtgatttcacggctgaggagctcgaggtggcgcttatcactcccaacgagattctagatgatgtgcatatgccactgctaaagtcaattcctcctgtaactcgcatggctatgggacgtggaacctgggtgactgtcctgtgcagaaagctgaaggattggtggcattgggttgcagaaggtgatctgccaattgttgcatctcatggaactgaaattgagacgtacaaaactatagaaccagctattcgtttactaatcttgaaagcgatatgtgatatccgtgttgagcaagaggatattcggaacttcattgacagttctcttaagcatggacagaacttttctacctttcgtaaagatcggattggaggggattcccttggaatctcatactggtatgaagatgatgagattctcgggcatagattgtatcgtgaaattagacgagtagagcaggtcaagaaggagccaggaaagaggtctaggggaaaaggaggatcttcagctatttcagtcgtgtcctaccagtgggaaactgttgcgtccactttcgacgagtttgatgatgtggcagaaaaactcttttcaagtcggaacaggacagaggtttcacttggaaagaagctgaagattgaatatcttccagagatagaaaagatccataaaaagaaagagaggttgctcaaaaagcaacagagagaagctctccttcttgatagctacttgacatcagatggacttaccaccggccgttctctccgtgatagaaagcccgtgacttatacatttgatgactatgatcgctcaataaatgaagccatcaaaattacgaaaaaaagagaggagaactcagctgagcctgttgctactactgccaatagaagggtgcttcctccaagagcggaggcagcaagcaatgggaagctaaataatggtccctcaccaacaaccaacgactcggatgatggaaattcttcaaaatcagatgacgaccgagacagcgacggtgaacaagaaaatgaggcacttgatcgcagcaaccggaggaggaaaagatctcagagatacacacaggactttgttgaggctgtctcggatattgatcctaactttgacagtgacgacgatatcatgggagaagcagtgtatgatgaggaatatctgagaagtcgcaaacagaataagacatcaagcgcttctgaagaggatgaggagttccggttggaagaagatggtgaagatgatgatgaagaagaggaatattcattgagtaccagtgaagatctagaggagccgcaacggcataaaaaattggaaactcgtggccggcgaggtaccaagctgaggtcagttgatgaaatccaaacaggtctcagacgcagcaagcgttcttctcgtcctcgtattaactatcaccaatatgatttttctgactcggatacggggcctggaaaggcaaagaaatctgatgcatcagattctgaagctggctctgatgccgagaatgatatggagctctcgacatcgagtcaagagggagaggaagaagaggatgatagtcatgatgaagaaaatggtaataatgtgaatgataaaatggatgaggaccacaccgtggcagaaaataaagtagaaccagaggaggaggagcagaaggagcagccgcctatagagaagatggatgctcccagcacggaaagtagacgtgtaggaagaacattcctagatctaaacgagcttgcacctggaggtggctttgatgagagcccaagcttgacagtgaaagatgacatagacaacatttagggaataaagttttttttgatacatttgagtgctgttggtcagttttctgacttcgaagcaagggtggcagatcgatgggtttgagcttatggctgttttcattgatttgcagtaacaggacaagcgaggttccacttgaagtgactttgagcttcttcggtgcttatgtcatactcggaggtgcttatgttatacttggaggccatgaggagggtagttttgcttttgattatgtatactacatgacggtcgcaatcgatcacagctgtattatggccaggctgatgctgcgttgaggccggtctgtaggatataaatttattgcctccacttatttagtcttaggcatggtgatgtcaatgagatcatggagggaaacctgtactccgagtgcagtgcagttcgtccgtcggcattcgcgagaccttttccacttgtagattgtaggttttgagaccgagcaggattagttctgtatctaaatctgacagtctgattttttcccccgtcacacctgtgacctgtgtagctgacactgagctgtccttgatggagaagatgctgcatgtattgagctgatgttgtagcctatggacatgtccattacactgactgagagtggctggcctggactggagattgctaatttgctgtgcgcttcatgttcccagtgatgattcgtggaggctactcattactggacaaagaagcctgcttgatgactgagttgtagtgtccccaaacccaaaaccgatgatgattcgtggcggcccgtgatccatatatctccattaatatctgttatttttatatcaaaatgtattgaaaaaaaatcaaaatgtattgaaaaaatattatattcaat

SEQ ID NO: 19205 - DNA, 528 bp, Zea Mays
ccattgcagaagtggcactcatagctggctgcaaggcaacttgcttccgcactgccactgtcggcagtcgttgggaagacgagagctcgcctgctatataaacgccgatccttttagggcgcggaaattagcgaaattgcctttggttccgggagattcccgtcgaaaataagcggaaggccgcgtccagcttctcggttctgggaaacagatccaaaccgggccaaatcgtctgaaaacaaaagagagcaacagacgcgcgctgtctttgtatgggcgccgccctcccggctggatctgcggccactccccgtcgcggcgattccatgagaggttgacaactaggcactggagaagtggatactctgatctactctgctgaacgagtttaatatttgagtatggcggcggcattgacatggcggttcaatggaagcaatggcggcacccatggcagcgccgatctgtgcagctatggtcttctcttccatggaagacccatctgtagcattaggggaagccgaggca

SEQ ID NO: 19206 - DNA, 2228 bp, Zea Mays
caatttaaccatgtctctgttgtagaatgtaagcaatcctaatgcttatcaagaaaatcatattcaagtactaatccagagtccgtctttcagttttattgcggcatctgaattggtgagcgacatcactgttcgtatagggactacaaagttttaccttcacaagtttccgctcctatccaagtgtgctcgcttccagaagttgattccaactactggcgatgaaaatattgagatccacatccatgatattcctggtggtgccaaggcttttgagatctgtgccaagttttgctatggcatgattgtcacactcaatgcctacaatgtgattgccgcccgctgtgccgcagagtacctggagatgaacgagactgttgacaagggcaatctgatctacaagatcgatatcttcctcagctcaagcatacaccggagctggaaagactccataattgttcttggtacaacaaaggctcatttaccttgggcagaggatcttaagctggtcagccactgcattgactctgttgcttcaaaagcctctattgacgtttcaaaagttgaatggtcatacacatacaaccgtaagaagctcacagttgagaatggtcatgattcgccatggaatggagtcaagcagcagcagtttgttccaaaggattggtgggtcgaagatctgacagatctcgacattgacgcctacaagcaagtcataacagcagtcaaaaccaagggtacggtgcccaaggatgtgatcggtgcggcgattaaagcctacacttacaagaagctcccgtcactaagcaaggtctcgatgatccatggcgacgcaaaagttcgggctatgctagttaccatcacatgcctgttgccatccgagaaaggttcggtttcgtgcagcttcctcttgaagttactgaaggcaacaaacttgctcaagtgtggagagatgtgcaggaaagagcttatgaagcgcatcgcacggcaactggaagaagcgtcagtgtcagatcttctgatccctacggtggatggggataccaccgtttacgacatcgacctgattcttagcattgttgaagaatttgtcagacaagatagcaagaatgcccagagacataacggtggtgaggtgaacgaccacgtatctgctcctagtgcgtcaatggttgcagtggccaaaactgtcgatggatatctcgcagaggttgcaagggacccaaatataccggtctacaagtttttcagcctagctgagacggtttcgggaggttcaaggccggttcatgatggactgtatcgtgccattgatatgtatctgaaggagcacccaagcttgggcaagagcgacaagaagaggctatgtgccctgatggactgcaagaagttgtcgcccgacgcgtgcgctcatgccgtgcagaacgagcgcctgcctctgaggatcgtggtgcaggtgctgtaccacgagcagacaagggcctgtgccgcagccaccgccatccgagccgacagcatcggcatcggctcctacgagagctcaaggtcaggcgccacaacgaacacagaggacgagtgggacggcgtcatggccgtggaggacctcagcctgtccaagacgacgaagctggtggacaaatgcgacacggcggccagtacggtcgtcgtggggaaggacaaggaccacggtggcaacaagggcgccaccggcagggtggccaaaggtggcgctggcgcggcgacaccaaagaaggcgctcgggaaaacggtgtccggcaaagggcagaccggggagcgcagcagctcggactcatccgacagcgccgtcgccgtcgcagtcttgaccagccaggagcatcccaagaggacgacccgcgcaaggaacgccgccaagtcggctgctgcgtagcccttccgctgagagaaatgctcaaggagcactagctaggttttagcagtcgtctgttctttgttattacgagtgttgcatagaagccaggaccatgttttttacacgtctgtagctgcctgtagggatggtgtaataccaggtacgtgcgttgttaggtgatgctgttagcacgtaggttccaaacctatgagaccttgggctctgctgggtttatgtcgaactcgcagttgtgttataagaatcctactttgatagacttaaactgttctgcagctgtgagatcttttgaactcatcatcctgagcatgggtaatct

SEQ ID NO: 19207 - DNA, 973 bp, Zea Mays
tcttctttctattcctttgaactgagaaacgccaagaatctgggaatgtgcaaggagatcagatgaaagttctacaggaactacgcagcctgaaggaaattatgaaggattcaaaacagtgcccaaaatgcaggatggccatatctaagacagaaggatgcaataagatgcattgtgagaactgtggggagtacttctgctatcaatgcaaccgtgcgatcactggatatgagcatttcaggggttcgtgtgtgcttttccctcaagaggaattggacagatgggaaatgcaaatgaatcaaagggtcggacgccaaattgttgcacatgctcatgctgcaatacatgggcagaatggtcaagctcatccttgccctacatgtcggcaaccgtctccaaagatcggaaacaacaaccacctcttctgttgggcatgccagaagcatttttgtgccctgtgccataaggctgtccaaaagcccgcacagcattatggccccaaaggatgcaagcaacatacggcagatccctgaatgaggttttcccatatgtgcatcaacaccgtggtgccagtgcagtttcgaagtgttctgtgcaagtacagataaatacttgtcctgggacgtacttcactcctggattccattattgttattattttttttgctgcaagcatgttttgaagtttccgtcgtcgttgtacctacagtaacagttgtgcagtttacattcgggaacatgaacaggaactgttcattcattcgttcagtaccagatggattgttgagaatactcgggtgttgaagttgagaatactcgcgtattaaagatgcgattgaacacaagtccaaaaccgatagaaccttgtaaaattctaaaagggaagattatttgttgtactgttggattgatcttatgccaatacaaaggaagctgtcattgtttggttatatggtttcaaattttaacttgg

SEQ ID NO: 19208 - DNA, 1271 bp, Zea Mays
  misc_feature (1)..(2): n is a, c, g, or t
nnatcgttgagaagtattccaactccaacattgaaattcatactttcaatcagtatcctcgcattgttaccgaggacttcttgccacttccaagcaaagggaaatctgggaaggatggctggtatcctccaggccatggtgatgtgttcccctctttgaataacagtggaaaactcgacatcttattggctcagggcaaggacacagagatcctgaaccatctgatcaataaccagaatgaatactgcatggaggttactccaaaaacattggctgatgttaaaggcggtactctcatctcttacgaaggaagagttcagcttttggagattgcccaagtacctgatgagcatttcttgcccaacaggtgggtgaaccttaaagctgtcaagagactagtagaggctgaggcacttaagatggaaattattccaaaccccaaggaagttgatggtgtgaaagtccttcaacttgaaactgcagctggtgcagctattcgtttctttgacaaagcgattggaattaatgttccccgctcaagatttctcccggtgaaggctacatctgatttattgcttgtgcagtctgatctttacaccttggttgatggctttgtcatccgcaatccatccagagcgaatccagctaacccttcgattgagcttggacctgagttcaagaaggttgccaatttccttgctcggttcaagtccatccccagcatcgtcgagcttgacagcttgaaggtttctggtgatgtctggtttggttctggaattacgctcaagggcaaggtgacaatcaccgccaagtctggagtgaagttggaggttccagatggagctgtatttgaaaacaaggatgtcaatggccctgaggatctttaagctatgcttgccgtcaccagtttttcccaaggatttgtcaataggagcagccaacccaaatcactcccactgagctctaccttttgtaattctcgtgccattccgctcccgctgtgagggtcctgtgagcccgctagagaatatgactgtaatcttctttggtgcgtctgcccttctgtttttgtgcgccagggacgtatattttgctgaaatgatactaccatagctttgcgtgccggaggtgctatgtggtgtttctgtgcgtttggttgcaatgataggacgggatgagatgagaccctcaaattaggttgtttggttctgggtcaaagattgagacaagaatatcctagtattgtttcatgttgtcctttaaaattggag

SEQ ID NO: 19209 - DNA, 2728 bp, Zea Mays
gaggattttgaggtgcaccagctcacagtcgtcggtctgtcaggtgtttgtaggatctcctaggtgagcccctgctgcttggagacagccatggccaccggcgtggctccagctcctctcccacatgtcagagtgcatcatgggggcgtcgggttcaccaggagcgtcgattttgcgaaggtcttgtctgctcccggtgccggcacgatgagggcaagctcctctagaggcagggcgctcgtggcgaagagctctagtactggctcggagaccatggagctcgagccatcttcagaaggaagcccacttttagtacccaggcagaagtactgtgaatcaacacaccagacaaggaggaggaaaactcgaactgtgatggtggggaatgtgccacttggcagtgatcatcccataaggattcaaaccatgacgacttcagataccaaggatgttgcaaaaacagtagaggaggtgatgaggatagcagataaaggagctgatcttgttagaataacagtccagggtaggaaggaagctgatgcctgctttgagatcaagaacactctggttcagaagaattacaacattccactagtggccgatattcattttgctcctacggtagccctaagggtggcagaatgttttgacaaaattcgtgtgaacccaggaaattttgctgatcgtcgtgctcaatttgaaaagctggaatatactgacgacgactaccaaaaagagctagagcatattgagaaggtgttttctccattagttgagaaatgcaagcagtatggaagagcaatgcgaataggaacaaatcatggtagtctttctgaccgcataatgagctactatggtgattctccacggggaatggttgagtctgctttggaatttgctagaatatgtcggaagttggacttccacaactttgtattttcgatgaaagctagtaaccctgttatcatggtccaagcatatcgcctgcttgtggcagaaatgtataacctaggatgggattatcccttgcacttgggtgttacagaagctggagagggtgaagatggaaggatgaaatctgctattggcattgggacactgctaatgaaccaccagaagaagagattgatccttgccaaaggttggcaaatcttgggacgcaggccgcaaaccttcaaattggggtggccccatttgaagaaaagcacaggcgttattttgatttccagcgtaggagtggtcaattgcctttgcagaaggagggtgaggaagttgactacagaaatgtcctgcatcgtgatggttctgtactgatgtcagtttccctggatcagttgaaggctcctgatctcctttataggtctcttgcagcaaagcttgtggttggcatgcctttcaaggatctggctactgtagattccattcttttgagggagctcccccctgtagaagatgctgaagctaggcttgcactcaaaagattagttgacatcagcatgggcgtactggcccccttatcggagcagttgacaaagccactcccacatgcaattgtacttgtcaacctcgacgaattgtcaagtggtgcacacaaacttttgccagaaggcactagactagctgtcactcttcgtggtgatgaatcatacgagcagctagatattcttaaggatgttgatgatataacaatgttgttacataatgttccatatggtgaggagaagacaggcagggtgcatgctgctaggaggttatttgagtacttacaggccaatggcttgaacttccctgtaattcatcacataaatttccctgaaaccattgacagagatggtcttgtcattggtgctggggccaacgttggtgctctcttagtcgatggtcttggtgatggtgtattccttgaagctgctgaccaggaatttgagtttctgagggacacatctttcaacttgctccaaggttgcaggatgcgcaacacaaaaactgaatatgtgtcttgtccttcctgcggccgaacactctttgaccttcaggaaatcagcgctgagattagagaaaagacctctcatctgccaggtgtctcgatcgctatcatgggctgtattgtcaatggaccaggagagatggctgatgccgattttgggtacgttggaggcgctcccggaaagatcgacctttacgtcggcaagaccgttgtgcagcgcgccatcgccatggaaggtgccactgacgccttgatccagctgatcaaggaccatggccgatgggtggatcctcctgccgaggagtagggctgtaggctgtagccaagtctgtagtttatatattctgtaaagcgaaacacgcaatgcagtaactgagcatacgatgtacatccctacacattttgtacatttattgagatctgagaaataaactagaaaccgtcggtgacggcatgtctgcagcaccccaaatgaagcacatacgatttacatattagtagtagcccatgtgagcaagacataatcctatacaatcttgaagtctgcattatatattttttccaacagaggtagcttagaaagtttttcgagcaatgcaattttgttcgttactttccgtttactttttcttttttttagcgttgagggttatataaatagatttataatacaaagagaaaaacggtcgtgattacacaacaccaaaatttttattgtggtcttgagagtttgtgatgatc

SEQ ID NO: 19210 - DNA, 2802 bp, Zea Mays
agatgcactacggatgtgcatgggttcaattttgagaactaagctgacaagctacgctggtggtcaatcttccgagaaccggagcatgaacttgtgggtcgtatacagctatatatccactatacaactgctgctgatgagaacaatatgaagtatggttctgttgcagaaactgtagcatatgatattgttttggaagttgcaatgaaagcacaacgcattcaacaaaggaaccttgttgtgcatggctcctggaagtggttattgacagaatttgcattgtattatggggtttcagatgcctacacgaggttgaggtacctgtcttatatcatggatgttgcaactcctaccgctgattggctcaatctggttcacgggcttttgttacctatactgatgaaaagcgatggtactgctactttgagccaccaagagaaccgaatactgggggaagttgaagagcaaattgagcaaactctagctatggtttgtgagaattacaagtcgctagatgactctataccgttgggtttggcggaagattttaggcctccaactggattggctgctgctgctctggaaccagctattaagttgtacagtcttctacacgacgtcctatctccggaagctcaactaagattgtgtggttacttccaggcagctgccaggaagcgtacgaggcgttacatgattgaaactgatgagtatgtatcaggaaattcagaaggcttcagggtagacttggtaaccgttaccacggcttaccagaagatgaaatcattatgcaacaatctacgaagtgaaatttttactgatattgaaatccataatcagcacatacttcccagttttgttgatctgccaaatttagctgcctccatctatagtgtagagctgtcaaatcgtctacgcgcttttcttgttgcttgccctcctgctggtccagcatcacctgttgctgatttggtggttgccacagctgattttcagaaggatctggctagctggaatatctgcaatataaaagcaggtgttgatgcaaaagagctgttccatttgtacattgtattgtggattgaagacaaacgcaggatgttactggaaaactgcagactggacaaggtcaaatggtcaggagttaggacccagcatatgacaacaccttttgtggatgagatgtatgatttgctgaagaagacattgacagagtatgaagttatcatttgtcgatggccagaatacatatttgttctcgagaatgctattgcagatgttgagaaagcggttatcgagtctctggaaaaacagtatgcagatgttttggctccactgaaggattgtattgcaccaaaaaaatttggcctcaaagttgtccagaaactcacaaagcgcaattcaacggtgccctacactgtacctgaagatcttggcattctcttgaatacattgaaaagattacttgaggttttgcgacctcggattgagagtcacttgaaatcatggagttcttgtatacctaatggaggaaattctgcggccattggagaaaaacttagtgaagttacagtgacattgagagctaaattccgaaattacatgcaagcagttgttgagaagctttcggagaatacccgtatgcaaaataccacaaagctcaaaaagatcattcaggattcaaaagagttggttattgaatctgatatccgcagcaggatgcaggccttgaaggatcagctaattgaggcaataaatcatgtgcacaaagtatctgaagtacatgtttttttagccatatgccgaggtttttgggaccggatgggacaggatgtgctgagtttcctggagaatcgcaaagaaaacaaagcctggtataaaggtgcacgagtcgcaatctcagtattggatgatacttttgcatcccagctgcaacagctgctaggtaatacagtcccaccgaaggacctagagccacccagatctatcgtggaagttcgttctattctctgcaaagatgcaccccgccagaagaattctagtttctattattgatgatcaggcttaactgtacatagtagtcatgcgctgcgcgtgcagcttttctcttggagagaaaagctccaaagtgcccaaatagccggatctttataaagaaactagaggaggctcaatggtatctgagaagcttgccttgtgttacaccatatctttttgctagttaaattggctatgttcccattgcctgtggatgtggactacattcggaaagtggattgtgcttcagagtgtagtccaattgacattgtaggttagcttcattggtaacacttacctgtggttaagcagttgctctatttgttcttagggatttttttgaaacaacaaaaaagaactttctggttactgatgttccagttcctgtattgtatagctagtgaggaaagaaaacaatggacgcttcatgttgccaacgactgaaaaagctcagtgtcacttggactttatgcccacgacctagctaccgcatgcaaaacctgctcccgtatcaatgtcagcctaattacaaacacctagacagttcacgcatgccccttggtattgtctcccaactctccgttctccatacccgcacgtccacatgaccatctctctcagttacggccgaggcagttggcagctccgcccctacgcgatcactagaatggactgagaaatttccaccatggcgaaactgataccctggtacgatcgagccatctaccgtttccactggaacatcacaggttcacaggattcgac

SEQ ID NO: 19211 - DNA, 1642 bp, Zea Mays
caaatttctctcaacggtcctagcaatcgcgtcaccgtcttctccatcgccggtgctcccttactctcgatggcatcctcggccgccgctcgccgccttctcctcctccgccaccgccatgggaaccttctccccaaacgccacttctcttcctcatccgctcccgacggcctcgacgacggcggtggccgcgtcaagatcttcgaccgcgacctgaagcgccggcaccgggaccgcgcggcgtgggtgatgcgtgagaccgatgggctcgtggatgcggtcgctgagaatctcctagaccgcctcgaggactgcaggaaagccttcccctccgcactctgccttgggggctccgccggcgccgtccgccgcttgctccgtggccgcggtgggattgagaggctgatcatgatggacatgtcagccgatatggtgaagaagtggcgagagtcagagaatgccactggtgatgggcctgagacccactttgttatcggcgatgaggagtttcttccaatcaaagagagctcacaggatttgataatgagctgtcttggacttcattggacaaatgatctacctggagcaatgatacagtgtaggctggcgttgcaacctgatggcctttttctggcagcaattcttggtggagaaacactgaaggagcttagaattgcatgcacagttgctcaaatggaacgcgaagggggcatcagtcctcgaatgtcccctttagcgcaagtccgtgacgcaggaaaccttttgacaagggcaggctttacccttccaggagttgatgttgatcagtataccgttagatacaataatgctttggaacttgttgaacatcttagagcaatgggggaaacaaatgctctctttcaaagaaatcctgtgttgaaaagggatacggccttggcaactgcagcaatttaccagtcaatgtttgggttagaagacggatctattccagcaacctttcaagtaatttacatgactggctggagggagcatccatcacagcaaaaggctaagagaaggggttctgcgaccatatcattcggtgatatacagaaacaatttggtcccagtgagaactgagcctcactgcttcagaaatgtgttcccaaaccccactcaggctttgtttgggtaaagaggaactgaagtggattgaggtgtattgaaaggactgaaagggaaattagttcatgttacacttcaatacaccccataccacctcaattcactccaataagagattacccaaacaggcctcatgtgagagcctccggagctgggtctaaccattttagtattcccaaacccttgatcgaaaattaaaaaaaaaaacaacatttgaggaaagaaaagaaatcctctggtggttccacccaacggctttgtattcctgaaggttgatgtttgtggtgggcttctgttgcctgttgtatgaacatactgagtttgatggaatccagcaattgtgaaattcatctgtagtgttactccacccacaaggttcgctagtggcgtgctgcaatgttacaagacaccaccactgttgtggtagacctgtgagtgcaaagaaacttagaaatttatttactcccttaacaaatgtgttcaagttttcgctggt

SEQ ID NO: 19212 - DNA, 3302 bp, Zea Mays
cgacccgcatcgtcttcctctgttttgccagggccaaccaagccaacgggtcgagttgaaccaacgccattacgagagaagaggggttggggaggtagacgagtggcgtagggaactcggtcgtggggcggtagagtgagcgagtgagagagaggcagggctgtcacgagcgtgggcaggcgatcgcgggagcgatgacgacggcggccggcatgccggggttgccggtgggctcggccgccgcggctggggttcccgcggcgcccgaggtggcggccagggacgcggtgatcggctggttccgcggcgagttcgcggccgcgaacgccatgattgacgcgctgtgcggccacctggcgcagatcggcggcggcgggcccgagtacgatcccgtcttcgccgcgatccaccgccgccgcgccaactggttccccgtcctccacatgcagaagttctaccccgtcgcggacgtcgccgccgagctgcgccgagttgcggacgcccgcgccgccgcagggtcctgctgctactccgaggaggccgcgtccacggtgatccacgagcccatggaagaggctgaggctgaggctgaggctgagcccgaacccgagcaggagcacgagcaggatccggcaccggcggccgagctggctgacggcgccgtggagtaccacgagccggacgtggaagttgattcatcgggagattcgtcggagcggaagcccccctccaccgaagatgacaccgtcgcagacggacatcatactgatcaaggatctcaaggggaacacagcctaccagagagctatcccatctgctctgaccacgaggagtgcattgcccgtcctgagaggatcaagatccagaaaggtttcgtggccaaggaatccgtgaaggggcacatggcgagttccaactttacaccactcggcaatctttctgtacagaaggactaggagatgctgttaatgtcgtgaaaggcttgaagatatatgaagatgcgtttacgacatcagagatcatgaaagttgcagatttcatcaacgaaattcgtcaggctggcagaaatggagaactttcaggtcgtgccaagccatggtaacgtccgtccaaagtcgtgcacaacaaaatgttgatccaagtaagacctcaactgacctcttaagttcctgactatgctgacccctccttaagaattgacatagaacccactaattgggtactcttccattgggttttggctgaaatcatcacatccaagtaagctacctgaacttggaaaccacgacttcttttcttagctctggtcagtgtgttcatctattttatctcttgaaatgtgaactgtatgtttacgtgttcagtaaaatgagtatcttgcaattgccttggtgcaatttccttgtccactccggtgcttattatatatcttttttcttttcaattttaggtgagactttcatattcttcaacaagcagatcaaaggaaacaagagggagatcatacagcttggtgtaccgttatttcaacctaccacagaggatgctaattgtcacacagaaccaatcccccttgtcctgcaggctgtcattgaccaccttgttctttggcgtttaataccagaaagcaggaaaccaaatagtgtcgtcatcaacttcttcgatgaggtcacttgtcactgacagcaacggtaactacaaaggacctctcacactttcactaaagcaagggtccttactagtgatgcgtgggaacagtgccgacatggcgcgacatgtggtgtgcccgtcgtccaaccggcgcgtgagcatcacgttcgcaagggtgaggccatcgacgccggtggacatgagcccactcccgtcccccaccaaggccatgacaccctggcagccgcagccggtcacggcctcccaggtgccgtcgcccgtgagcatgacgcagaagcccccggtcagcggtgccataatcggttatgccccgaccccgcaggccgtgctggcgcccgcagcctggggcatggccatgcgcgcgcccgtcatgatggtggctgcagcgcctgcgaggcccatggtgatggcctcatcgggcaccggcggcggcaacatcagcaagcggatgggccgcagcggcaccggcgtgttcctgccttggacggtcggcccgaagcggtacaacaagcaccttccaccgcgcatccagaagcgccggttctcggcgatgatgtcgcccatcgaggcgcagggctgaggacccgcccgacgtcatgtcgccgtcaaaccgaacggccaagatcaagtaggacccggtgcaacgagccaccgtttaattcctagggttcttggagtgttttttttttctctctcgtcgtcgagtcaaaaaaagaaaaaagaaaagaaatggtcaaaacgcgcggacagtgagtttggacgtctgtgtatttcggtgacctgtgtttttttttttctctggagggcttttggtccgcatgtaatttagccgggtttgtgacttgtgactttgtgagtgagtagcggagtttagaagcggtagaagaatatgggtctagggataggtgaagtcagaatcaggacaaggtttttcgtttgttttcatccttcttttttcagttttttaagatgatgcttttagttttgctatatcctcgtcttttccttttttttttcgtaccctatttttccgtaccgagaagaatgttgacatgcatatatgcatttcatgctgagtttgaagttctataagcaaaagatgcatcttgtgttgcccacttactggacgtcaatctttttgcttatatctttaatcttgaggtcttgtttggttatttcgaattgaaagaaaaatgatctcaatattttttaaatcgattttggtgtttgacgtccattataaatcacatggactaactaatttggctaattgctatttttctcatgtgcataaagttcaacataaacataaataaaaagagttgaatgaattctataaagtttggagcataaaagaatgggtgcagccagtgtcgcaccggacaaatgtgcactggacactattcggtgccccaggctgtagccctcgctaggttttctcatagcctctccactaaaactcatcggactgtctggtgagccaacggagcaatggtcaactttgccaacgatcgactgcgctgatgaaggaacagtgcagaagtcagaaatcagaactgccaagtcagaacgcaccgaactgtccggtgccgcaagaggacaaaggacttcaacagtcaacagctccaaac

SEQ ID NO: 19213 - DNA, 172 bp, Zea Mays
ccccaggagatgatcaggtggttcaggaggagccgcctaacactgaggagttcgatctgatctaggtggcgtttccagtcgacattggcgccgacgatccttagttcgttttatctttattatgttattttgtaataagtcttccgctatgtaataaattctctgatgtttt

SEQ ID NO: 19214 - DNA, 2332 bp, Zea Mays
ggatagacagcgcggcgagacaagcgaacctctgcggcccgcaggctccagcgctcatccacctctcatggccaccgccaccgcttcccgcctcgccgtcctcgcgccgcggccgtcgcgccccgcaccggggcgccggcgacatgctcctgctaccggtcgtggtcctcccctccctcgcagtctctacgcagcgccccgcggccgcgttctctgcctcgcggcccccgcgcccgctgctgcctccaccaccgacgccggccaggaccgcctccagaaggtgcccatttcgaatatcaggaacttctgcatcatcgcgcacattgaccatggcaagtccacactggcggataagctgctggagcttactggcacggtgcagaagagggagatgaaggagcagtttctggataacatggacctggagagggagagagggatcaccataaaattgcaggcagctcggatgcgctacgtcatgaataatgagccttactgcctgaatttaattgatacaccagggcatgttgatttctcgtacgaggtttcccgctctctagctgcctgtgagggcgcacttcttgttgttgatgcttctcagggtgttgaagctcagacgttagcgaatgtgtaccttgcattggaaaacaaccttgaaatcataccggttctaaataaaatagatcttcctggtgctgaacctgatcgtgtcgcacaggaaattgaagagataattggattggactgtcgtgatgcaattcggtgttcagcaaaggaaggtataggcatcactgaaatattagatgcccttgtgaccaaaatccccccaccaaaagatacatcaaaagatcctctcagggctcttatatttgacagctattatgatccatacagaggtgtaattgtgtacttccgtgttattgatggcagtatgaagaaaggggacaagatatgttttatggccaatggaaaggaatatgttgctgaagaaattggtgtactatccccaaatcagatgcaagtttctgaactatatgctggcgaggttggttatctctctgcttctataagatcagtagcagatgccagggttggtgatactattacacattattcaaaaaaagcacatcatgctttaccaggatattctgaagccactccaatggttttttgtggcttgttccctatagatgctgatcagtttgaggagttgcgggaagcgctggaaaaacttcagctaaatgatgctgccctaaagtttgaaccagaatcttctagtgccatggggtttggcttcagatgtgggttccttggtcttctccatatggaaatagttcaggaaaggcttgagagggaatacaacttgaacttaataattactgcaccaagcgtggtataccgtgtgaactgtgctgatggtgaaactgttgaatgttcaaatccatccttgcttccggagcctgggaagcggaggtctatagaagaaccatatgtgaagattgaaatgcttacaccaaaagattatattggttcaataatggagctgactcaagacagaagaggtgaattcaaggaaatgaacttcatcacagaaagcagggccaaacttatttatgagctaccactagcagagatggttggcgatttctttgatcaactgaaatcacgaagtaaaggatatgctagcatggaatattcagttgttgggtacagagaaagccaactagtaaagctggatatacaaatcaacggggatcctgttgaggcgttgtcaacaattgtgcacagggataaggcatatgctgttggaagggcacttactcaaaagctcaaggaacttatacctcggcaaatgtttagagttcctattcaagcatgtattggcacaaaggtgattgcaagcgaagccctgtctgccatcaggaaggatgtcttatcaaaatgctatgggggtgatatatcaaggaaaaagaagttgctgaagaagcaggctgaaggaaagaaaaggatgaaggcaataggaagggttgatgtccctcaagaagcattcatggccgtgttgagactggaaaaggaggtgctatgaaagtgctcatgaacctttgtgtctccgtaaattaaagacctcttcctgtgcgccactcacaagtatagtcagacgagagctttgagacaacaggcattcactatggttcaacctgtccgctctggaccataggaaccagtcaagcacagatcactcccagaacaaaagcagagacttgtttctacagttgaatataccttgtaaggctgggaccaacagatcgtgcatatgcaaaacaagaggttt

SEQ ID NO: 19215 - DNA, 1698 bp, Zea Mays
cagttctggagtaaagaatgattgctagcctccatctagctgaccctaaatcacaagttattttacagcagatcagtatgccatagaaattgtttagcttttttacttacacagcgtcctacaaagctaatgcacttagtatggagagcatggataaggaattgaggtcatcaaggttatcggagcagttgaacaagcactatgctgcaattgctattcctaaaggcctttattgcctttcattgcgtttaactgatgaatactcctcaaatgcccttgcaaggaaacaactaccacccccggagttggtgcctagtctttcggacaactcctattaccattttgttttagcatcagataacatccttgcagcctcagttgtggtcagatcaacagttagatcatcactgaaacctgagagaatagttttccatgttattactgacaaaaagacctatcctgccatgcactcatggtttgctttaaattctctcagtcctgctattgttgaggtgaaaggtgttcaccaatttgattggttaacaaaagaaaatgttcctgtacttgaagctatagaaactcagcgcactgctagagatcgttaccatggaagtcaccgtccaagaaccagtgctagtgataacccaagggtttttgcggccaagctgcaggcaggaagtccaacatacactaatgtactcaatcatattcgaatatacttgcctgagttgttcccaagcctcaacaaggtcgtatttcttgatgatgatgttgttgtccagcatgacctatcaccactttgggatatcgatctagctgggaaggttaatggtgctgttgagacttgcataggtggagacagtcgggtgatgtctaagaggttcaggaattatttcaacttttctcatcccctcattgcaaaaaactttgacccttcagagtgtgcttgggcatatggtatgaatatttttgacctgaaagcatggaggaagacaacaatcaaagatcagtatcatcattgggtcaaggagaacttgaagtcaaacttcacactttggaggcttggaacattgccaccaggccttattgcctttaaaggccatgttcacccaattgatccatcatggcatctgttaggcttgggttatcaggaaaagacagatgtcagtagcgttgaacaagcagcagttatacattataacgggcaaagtaaaccgtggctggagattggttttaaacatcttcagccattttggacaaaatatgtgaactactcaaatgaattcataagaaactgtcatataatggagcctcagtttagattgtcttgacaatatatataaaagcatatagtaagtgaaattaaattcgttattttggaaatcaacagcagggagtttatcaagtgcaactggggagctcagtaatcccttaacatggttacatgcgctgtggagaatattcaatgaacagaaaggaaatgttattttttccccatttactgtagggcccttttcctttaatttattccatttgtatcatagctcatgaaattaagatattgcttaggatggttcttttgtattttatggagcaatataagttgggttgatggtagtcccatcgttattgtaattgatgaagagcatacacatttcaccatgtgaaaagcatggattttgattatgcaaagcaaac

SEQ ID NO: 19216 - DNA, 2452 bp, Zea Mays
cgccagcgcagcattgttcgtagagattcatcctcccagcttcgttaattactatcaatgatgttgctgcatatttctttggcatcttctttgggaaaacaccgctgatcaagctctctccaaagaaaacgtgggaaggctttatagttaactatcttctgaagcatttccctatgtttagctactcctgctgaaaatgtactaaccacaccttccatggtggagtgcagggcctccctgttggggcacgagatcgcccacccgtcgtctacaccagattatttctatcataccatcagatagtggatggacaaccaagcgtgcaccgtttcatcatttctgattctttcttagatgactaagataagtgtgaggtctgtactcatattctttccttttcttttcaatgcaggtatgatcttatacgagtggagattggcaacaaagatataaagcttgaatacttagtggaggcatttacaacttcaaatgagtaacattccttgatctgaaatgtgtacaataatcctgatgaactactaaaacacttgccttaatctgaaatgagtacaataaaacatatataaggaaactcaaataagtaaagtcttgcttgtccctcacaccataacatgactgatgaactactaaaacacctgcgaggtctgtcagcgtagcctcctcgacaccttctgcttctgctaactccggtgcaaggtagatccttgctatacttgacaaactaaaggaggaaagggagcaacaagaaggaaaatatggggaggaagatgtggatggttcatgtatatcagaagaagaagatggtgactgggatgtagatgagccagatgaggaggacatcatttacgtaaaatagcccattgtcttctaggaacttggtcatcattcatccagaacacagcaggttgcgttctgcatacataatattgcctatcaaggtagatttgccagagcagacttcgatcttcttaatctacctgacagtttcttaccatcatttgattttattgatggacatgttaagcctgttctagggagaaagattaactggatgaagacagggatcgttgagagtgatctggttctaacagttagtccacattatgttaaggaactcacttatggcccagataaaggtgttgagttggatggtgtccttcgcacaaagcctcttgaaattggaattgtaaatggcatggatgtttatgaatgggatccttcaacagataagtacaccagcgtgaaatatgatgcaacaacggtaactgaagcaaaggctctcaataaagagaggttgcaagctgaagttggattgcctgtggactcgagcatccctgttatagtttttgtcgggcgtcttgaagaacagaaagggtctgacatactcattgcagccattccagagttcgtgggcgagaatgttcagataatcgttcttggcacgggaaagaagaaaatggaggaggaattaatgcagctggaagtgaaatatccaaacattgctagaggcatagcgaaattcaatgttccattggcacatatgatgtttgctgggtctgacttcattattgtcccaagtaggtttgagccatgtggtctcattcagttgcaagggatgagagtttctagctcgctttgttacagttcagatttgagtgcgcattcccatctgttcatcacctggaggacttgttgacacggttgaggaggggtgtcaccggattccacatgggttctttcaatgtcgagtgtgaaactgtagacctagctgacgtgacggcagtagcgtcaaccatcacacgggcctagaacagtacggcaccccggcgttccaagaaatggttcagaactgcatggcgcaaaacctatcctggaaggggcctgcgaagaagtgggaggaggtgcttctgggccttggagtcgaggggagtcaagctggcatcgacgacgcagaggagatcgctccacttgccaaggaaaacgtagctactccatgacgcttggtgcctcggaaacacgcgttggtgataggaagcatcttctaggatcctcctggccttgtggctggagtgagttgttcagtcagacacagtttcgcctctacaacatcttcctcctcctggtggtggtccgaactccgaagcaaattccagtgataaaggatgaactaagaggtccatgtttctattgctagaccttttgcctcctaaatagacgatgtactgcgcttgtaacaagaacctcactttcgtgtcaagtaatatcaacaggtttcataatggtagtgaactgcactggaaaaacctgtaaacaatgcaaacaggattcaaaactaaaacaaatctgctattaaaagctgttattcaaaattgaaaaaaacaaaacctgttaattcagtattataactcagcaaacataaataaaaaaaaca

SEQ ID NO: 19217 - DNA, 816 bp, Zea Mays
ccggagctgagcttgtgagacggggtgacatcccgttctgtaccgaggagtgcaggacggagcagatcgaaatggacgaggagatggagcggaaggagagcacccagaagaagaagttggcgccgagagctccctctcccaaggacgtggagtccgcgccgaggcctcccaaggcccgggccgggtcaatccttgccggctaacaccgtgaagacgaaaagctcacaaacgagctagagctcgcgtgtgtgctcctccccctccccgaaaccaagagagatcagaacccccttgataccaccacctggaactaccgctacaagacgggcggagaggagaggagagcgctggtgtttaggaccgcatgcattcagaagctctctgtgctgctggccagatgtgtcgttcgttgtatcatgtatgggtgtttctggctttcgttctgggagatttttgtgagaatcttctgtgtgttacgtagtactcatagacaaatagctggtgttggtgttagggttaatgtttttcttaatgctcatgagagaaaattgaaaacgtatgcctacagtagaaataggcatgtgaagtgaatggacccttgtgctcataagtcatgacataacttgctcctgtatcatcgtgaatcctgctttcctttctttaaggatcttctgattggcaccagtgtcagtgtgctgcctgtgagaaaccttaaacacatattagtgttgttctttatgggagctaattagtgttggaccagcaataatggtttttatggccggtgacgtgaacagtttcccgtccagcttttaa

SEQ ID NO: 19218 - DNA, 5928 bp, Zea Mays
tctcccccccgtgcgtttcccttccccttctctcctctcctgcctgttcggctccccacactgcagcttcccttccctctcacctcggtgaccgcattgggtgctcgcggggcggaagaggaggcgcgggtcgaggtcggctagcctaacccgtccggccgtaccgaggctggtgggatccgctcgccggccggcaccggggaggtgagccacccccacgtgctcgccgcgcggttaaactcactggtggtcaccaacgcccatgcttctatgaccgagagactccgggcttgaccaggacggatttgagcgaatatcttgaggttcatattgttgctggaggggaatggaaactccatcagaggccttgaagccggcggaggctaaaccggcgaagccacggccagtggcgcccacgggcaggttcgccttggggactgcttcgtccattaaaaagcgagctgatggttcggctccggcggaggtgggtgtgccccggtcttccttgatgaagtctacctcgtcgctgaacgccagttcggcgacgagaagaagcagcacggggactgctgggaagcaacaggacaatgggagctcagctgctgctaagaagtctagtcctacgctgtcggatggcgcgaggaagactaaactggtgtcagctcccgctgctggctcaaaaccagcagtggagaagaaaacatccttggtcgagaggacaggtgccgatttggccaggaagcctgctgttaaggcatccccaacttcaacactgaagaaggtccagtcaaagacagagagctccaatggcagcagtggcagcaccaggagagtgtcctccaatgcttctgtgccatcgccacgttccgtcacaagcaatgcagcaaggaaactgggtactcaagcatcatctgctgcgtctaatcggcggaagagctcaaccgcagatagccgtgattcgagattcatgatgctgccacaggtggatttgaaggctagcgatgaagtgaggctggattcaagaggtcatcgagttcgtagtctcaagcagctgaggttatcacatgctcttgagtttgtgtatctgagggacaaccttttatcaagtttggagggcattgagattctcaagggggtaaaggttcttgatttgagttttaatgattttaagctccctgggtttgagcctcttgggaactgtgttgtcctccagcaactgtatcttgctggaaatcaaataacttcacttgctagccttcctgaacttcctaacttggagttcctttctattgctcaaaacaggctaaagtcagtttgtatggctcgacagcctcgacttcaagtgttagcagctagcagaaacaaaatatcaactttgaagggatttccacattttccttctctagagcatttgcgtgttgaggagaatccactacttgagatgccacacttggaagctgcttctatcctacttataggtcctactttgaagaagttcaatgaccgagatctgaaccccaacgaggctgaggtagctaagcaatatcctgctcatacagctatttgcattcgggatggttgggaattttgctcccctgaacttgctgctgattcaacattttctttcctacttgagcaatggaataataagctgcctcaaggttacatggtgaataaagcttatgttgaccatccgtttgaagaggatccatgccattgccattttagattcacaaatcttggtggtgagggtgagctagtcctcaaataccaatggtttctgggtggcaaaacaccaacagattttgttgctatccctggtgcatcgagcgaggtgtactggccaaaacgtgaggatgttggaagatgtttgaaagttgaatgcactccaatagtaaatggtgcagaattttcgcccgtttttgctgtatctttacctgtttctccaggtactggatgtccaaaggtcatcaatctggcagtcagtggtgaagtagtggaaggaaacatactcagtggagttcctgaaattgcctggtgtggtggaacacctgggaaaggcgttgcaagttggttaaggcggaggtggaacggcaatgctgtagtaattgatggagctgaggggatggaatatcagttgacagtcaatgatatcaattcaagtttggtatttatgtacacccctgttacagacgagggtgtcaagggagagccgcaatgtacaatgacagattttgtgaaggctgcaacaccatcagtcagcaatgtgcatgttctgggagatattgttgaagataacattatcgtagggaaaggaaaatacttcggtggcagagagggactaagtaaaatccggtggtttagagagaaggaaaatggtgaatttcttcttgtgctatcagacagcatggagtatacactaaccaaggaggacgtggggagacacctcaaatttgtatatatccctgttaaccttgaaggtcaggagggtgaatctgcttgtgcgataacagatgtagttaagaaagcccctccaaaagtattcaatctaaagattgttggggaatctatggaaggaagcaagatatctgccagtgctactgttacaggtggaactgaagggtccagcagggttcaatggtacaaggcatcttcctctgaatttaagaatgaacatgagcttgaagcccttactccgtcacgagtttctaagacattccgcattcctcttggtgctgttggatattatatcgttgcaaagtttacacctgtggcacctgatggtgaagtcggtgaaccagcctatgctacatcagatggccttgtggaaacactaccacccagcctgaacttcttaacagtcactggtgaattctctgagggtcagatattaacagcatcatatgggtatatcggaggacatgaaggaaatagtttatacagctggcaccttcatgaggctgaagatgacgaaggcactccactttcagaggcaaccggtttgctacaatactgtgttacaaaggaagctgttggaaagtttgtttctttcaaatgcacccctgtcagagatgatgatattgttggtgaggcaagatcattcataggaaaggacagagttactccagggatgccgacattactttctcttgaagtaactggtgatgcaattgaaggaacaactatgtttgccagtaaaaggtattggggaggagaagaaggggacacaatgttccgctggatactgacaaattctgatggaaccgagaaagaaattgaaggagcaacaagttcatcatacaccttgaaatgcaatgacattggcttctacatatctgtcttgtgcaagcctgttagaaatgatggagttgatggttctttagtgtcgactgaagcgattggtcctattataccagggccaccaacatgtcaatctcttgaactagctggctctatggttgaaggtggccgtttgacctttcatgctgtgtatacaggaggtttgcggggaagttgcatccaagaatggttcagattacatgatgatgggcacaaggacaagttgactgctgatgaatgtctagaccttgatctagctgatatcgattgccggattgaacttatgtatacacctgtacgagaagacggagtgcacgggttaccaaggagtgttacttctgatacaatcttacctggggagcccaagggtgtcaatcttattctacctgagtgttttgaggacaatgaaatttctcccatcaaaacctatttcggtggcaaggaaggcactggcaaatatacatggtttcgaaataaagagaaacttgataacttggaatttgatctggttgctgaatcatcagaagttgttggagaaaccttaaaatataagccttcattgaatgatgttagttcctatctgattctttattgggttcctacacggcgtgatggaaaggttggtgatcctttgatggctatctctgatgatccggtcatggcagcttttccatctgtttcggatgttcacttagagcagaaaagttcagatgtatattgtggactaggcatctattatggtggatatgagggattaagcttgtatagatggtacagggaatctagtgatggaactaggcttcacatagatggtgctgattcagtcacatacgaagtgacagatgctgattacagctgccgtctactgtttggttatactcctgttcgttcagatgggataagtggagaagaaaaactctctgaaccatctgatgtaattttgccagaactactcaaaatcgagacactcaatttcaaggggaatcaggttgaaagagaaacactgactgctgctgaacaaattccgtacagtgagattcaacaacatatatggaaaaattataagaaagagatgaaatatcaatggtttatttccaatgaatcaggaggcgatcagtcttttgaaccattggcaacccagtgttctcgctcatacaaagtgcgctttgaggatattggtcgttgcctgaaatgcgaatgctttgtcactgatgtatttggacgatctagtgaattggtatccgctgtgactgctcctattttgccaggaaggcctaaaattgaaaagctggagattgaaggaagaggtttccacactgacctatatgccgttcagggtacctatagcggaggcaaagaaggcaagagtaaaatacaatggctcagatcgatggttggaagccctgatcttatctccatacctggcgaaactggaagaacgtatgaagctaatgttgatgatgtagggtataggcttgttgcaatttatacacctgtaagagaggatggagttgagggacaacctgtttctgtttcaacagaacagattgcagttgagcctgaactttacagggaagtgaaacagaagctcgatgatggttcagtcaaatttgaggttctgtgtgacaaggaccgaacacccaaaaaggcacaagtaatgggccatttggagcggagggttttggaagtcaaccgaaagaggataaaagtagtaaagcctggatctaagacatcattcccgagtactgaagtacgaggaacctacgctccaccgttccatgtcgagctgtatcgcaatgaccagcaccgcttcaagattgttgtcgacggtgatactgaagttgacttaatggtgcaaacacggcacatgcgagaccgcatcatcctcacgatcagaggcctcgcccagaagttcaacagcacctccctcaacacacttctcaggatcgagtcatgatagacctgacagtgtaaaaaccaactattacgggaagctgtaccccttgttccgattggttagagtgcgtggttttagtaggattcgtgacatgccagccttttgtgtgtatgggtgtgggacgggccgagcgtgttggattacaattttttccctgacacatctctcaaatcagagcagcatcagctggttgctctgactggtgccgtcgtgcgtcatgaaatgtacatagggtggttagagcgagaaagagagtggtgtttcttggtgctgtatttattatgcactggttgggttgggttttttcgactgccattctcatactaagtattggttctttcttttttcggtcgttgggtttgcatatacttgtaccgacaacacagcttggggtgattgggcgagtgctgttcagaatgcctggtccacacttgtgtacgactggaatcctacggtggcgtattcacatgctgttttatggtgcaaatgtaaattcatctgttcataaacgagaatcaaaatcgtcggccacgtgtattcgtcgtattcgtaccgatgtatactaccttataaaccagtactaatctcacggtggcatcaattatcttcctctgtttcacaaggcacacgtt

SEQ ID NO: 19219 - DNA, 904 bp, Zea Mays
cgaattcgcccttgtttcataaaggtcagttggaacttagacacgcttggtgatttcgtgattatgagaagcaatggacagcctgtgtataacttttgtgtgacagttgacgacgctaccatgcaaatatctcatgttatcagagctgaagagcatctaccaaacacattgcgacaggctttaatttacaaagctcttggattcgcaatgccttcatttgctcatgtttcgcttattctggctcctgacaggagtaaactgtctaaacggcatggagctacttctgtcgggcagtataaaaatatgggctatctacctcaggcaatggtcaattatttagcactactgggctggggtgatggcactgagaatgagttcttcactattgatgacctagtccagaaattcactataaaccgtgtcaataaaagtggagcagtctttgatgcaacaaaattgaaatggatgaacggacaacatctaagatcatttccccatgatgaactcatcaaagcttttgaagatcggtggacggacacaggcattctccaggaatctgaaagtggttttgctaaggaagctgccgagcttttgaaggatggtatcgatttgataacagatgcggacgcagctcttacgaatctgttgtcatatccccttcatactactctaagcagcgaggaagctaaacctgtggtgcaagacaagatctccgaggttgcttggagtcttatttccgcgtacgacagcggcgaactcggccaagcgctagctgagggccgtgatggctggcagaagtgggttaaaggtttcggcaagtctatcaaaagaaaggtgttcatacgcatgataaaactgttgggcactcgggcgctgcccgtgatggacatagattgttgggcct

SEQ ID NO: 19220 - DNA, 659 bp, Zea Mays
agtgcacgtttgctggatgcaatgttaggaagcacattgagaggtgttcatcagaccctaaggctgtcataacaacctatgaaggaaaacataaccatgaaccaccggttggtcggggcggcaaccagaacgcaggaatgtcatcacaacagaaagggcagaacaacgtatccagcaatcaagcttcattctcgagaccagacttgagcaacgctaaccagatgccaattggaatcttacagttcaagagcgagcaatagtaacatgtatttggatgacgttcttttggcaaatacaagatgcctgcaattcgtacagccatatggcatcaaaagtttcttaaagcctgataatttcaaatggtatcagtttgcagtttttccccgtagatacacaggatatatagctgatacggcctcatcgtttctagtttgtacatgctattaagttggggcatgagggatgcaatactagctaggtgaggttacttatatgtggttatggtgttctatagatggatcgatggtatacatgttctgattttgttcccaacacccgacaagattttgtatgtatttgtacagatgtttttgagttacattttgccttttgtaactttgaagatgttctagtttgctatgtcatttccttttttttct

SEQ ID NO: 19221 - DNA, 1294 bp, Zea Mays
gatgtctccctgttcgaaagttcaaagctcatgtctataaggcaatagatgctctcccagtaactgcacatcctatgacacagtttaccacgggagtaatggctcttcaggttgagagcgaatttcaaaaagcttatgacaatggattgccaaaatcaaagttttgggagcctacttatgaagactgcttaaacatgattgctcggcttccaccagtggcttcttatgtttaccggagaattttcaagggtgggaaatcaatagaaactgacaattctctggattatgcggcaaatttctcacacatgcttggttttgatgaccctaaaatgctggagctgatgcggctctatgtaacaattcacactgatcatgaaggcgggaatgtcagtgctcatactggtcatctggttggaagtgctctgtcagatccttatctttctttcgcagcggctctaaatgggttagctgggccactacatggccttgcaaatcaggaagtgcttctatggatcaaatctgtaattcaggaaactgggagtgatgttacaacggatcaactcaaagagtatgtctggaagacactaaagagtggaaaggttgttcctggatttggtcatggagttctgcgtaagacagacccacggtattcatgtcaaagggagtttgccctgaagcatttgcccgaggatccacttttccaactggtgtccaagttatatgaagtcgtacctccgatcctcactgagctaggaaaggtcaagaacccgtggccgaatgttgatgctcacagtggagttttgctgaaccactttggactatctgaagcacggtattacactgtcttgttcggtgtttcgagaagcatggggataggatcccagctcatctgggaccgtgcccttggcctgccacttgagaggccgaagagtgttaccatggagtggctggagaactactgcaataacaaggctgcctgaagattttaacagttgctgttttttcccaaccatggctgataataattaaacatgcgttatagagttttttcccccttttgactgttggataatacaagagcaacatgctctagaattttgtatcttccatcacttagtcggcatccagattgttgatctgcggcaacactgcagaagagattaggacatgctgattaatctttgcagagttaattggtaattacagaattgggcttttgcatgtatcatgtatgccaattatctcgttgtggcagttctgttttaagttgatccgcgacatggctggattgctg

SEQ ID NO: 19222 - DNA, 1181 bp, Zea Mays
ccatgccacggaaaacatttctgaccagtaaagggctggctggcaatgctggagaagtataggaactatgacttcgggcggtgcccgcgtgtttactgctgtggtcaaccatgcctgccggttggacaatcagatattcatcgatctagtaccgtgaaaatatactgccccaagtgtgaagacatctactacccacggtccaagtaccaaggcagtatcctaaccatactcttattatactatctttatgcgtgcgtttcaaactttgatctcttcgtgagaactcaaacgtatggtatttttgtaccaagtctgacacagctaccaatgttctcatgtcttagcacccatttacctacagctctttgttggttgatacagaaaactattaaacatgaaaacagtccactgcgcccaccaatcaccatgttttttcaactcccatagatataatattgtttagtgcctgagatgcactagctcttttctgtgttactgtggttccttagttgtagaatgtttgtcattttgttatatgctgctattttcttaaccttgtttagacatcgatggcgcatattttgggacaacgttccctcacctgttcctgatgacatacgagcacctcaagctacagaagcccttgcagcgctatgttcctcgtgtctttggcttcaagctccacaagccatgagcctcatgtatttggcttttaagctctacaggatgtggctcactgggggaaaacccagagttttgcgagatcaaggtccttgaagactacatataagagcgccattggctacatataaaagcgctattgacagatcagtggattgataaaactccaccatgcagcggagcgcttttaccttacctggctggcacctaccaacatttgaatgtagctctaaggataacgatgttgttgtaacctaactgtaattgtttttttgattagtaaaccaggaccccgtacgatgtagagtatgggcattatttatggcttatgcaaaaaaaatcgttatgctgtcccaggctcccagcaaccctttacctgtttttttagatcctttacctgcttggttctcgtaagatggcctttgaatttgataacaaaattctatattgaattgtgatatgtgaagggcgcaccatcttcattgcctgcgctctcattt

SEQ ID NO: 19223 - DNA, 2380 bp, Zea Mays
taacttcgctccagtaaagagagggggatcgaagggcacgaaggatacattagagtacttgaggatatacaacagtttcttaattgatggaaggttgaaggactgcgtggatttgttagaaagcatggaacaaaatggactgcttgatatgaggaagatacaccatgccagctttttcagtatgtgtaagaagcaaagagctgtcttggaagctcttcgcttttgcagatttattgggaaccccaagataagtaccttcaatatgcttttgtcggtgtgtgctagttcactagattttgacggagcgctccaagttatggagctcctaaaggaagctgggctaaaacctgattgtaaactttacacaacgctgatatcaacttgtgcaaagtgtggaaaagttgatgccatgtttgaggtattttatgagatggtcagtgctggtatagagccaaatgttaacacatacagtgcattaattgatggctgtgctagagctgggcaagtggctaaagcatttggtgtttatgggattatgagttcaaagaaggtgaagccagatcgagttgtcttcaattctttgatcagtgcatgcggtgaatctggagctctggctcgggcatttgatgttttatcagaaatgacagcagaatcctctgaatctaaaggatggaaaccaatcgttcctgatcatgttactgttggagcactgatgaaaacatgtattttggcgggccaggctgatagagctcgtgaggtgtacaaaatgcttcaggagtataatataaagggtaccccagaagtttacacaatcgcattaagaagctgtagcttgactggtgatttagggtttgcactgaagatatatgaagatatgaacaggattggagtaaaacctgatgagatgtttttgagtgctctagttgatgtagctggccatgctaggagggcagatgctgcctttgaaataatgaaagatgcaagagcaaaaggtttactcgttggaacaattgcatacagttcgttaatgggggcttgctgtaatgcggacgactggaagaaggcactgcagctatacgaggagatcaagtctatcaaattgaccccatcggtttcaatgatgaatgctttgatcacctctctgtgtgatggtgatcaggtcttaaaggctgttgatatccttaatgagatgaacatattaggggtccatccaaatgagataacatactcagtcttatttgttgcttgcgaaagaaatggtgaagcacaactaggtttggatttgtttgaacaattaaaaatggatggcattgacatcaatccgaccataattggttctcttactggtttgtgccttcaaatgttcaacattgatttttcgcttgggaatattattgtcaacttcagctcagggaaaccacagattgacaacaaatggacttcctcagcagttatggtgtatcgtgaggcagtttcagctgggctactaccctcaagtgatgttttatctcaagtgttgggatgtctgaggcttcctcatggcagttctctgaagagtactttcattgaaaacatgggagtaagttgtgacattccacaatacccaaatataaattcacttttcgaaggattcggtgaatatgacattcgagctttttctatattggaggaggctgcttcattaggagcagttgcaagcatttccataaaagaaacccggattgttattgatgctagaaagttaaagatcttcacagccgaggtatctcttcttagaaccttaagatctttgaagcatcgattggctgcaggttcaaggttaccaaacgtgacaatcttgttacctacagaaaagaaacaagttgacattgatgaaaaggagaaaacacttaaacttgctggaagaattggtcaagcagttggctctctcctgaggcgattaggaatttcataccagggggaggaatctcatgggaggatgaggatcaatggcctcacgataaggaggtggttcaatccaaaactgaatagcaaatcctctgctgccggcccagctgacttgcttccactaccttcgcggttagccaaagggattgctggtcagcaacgcgatattagaaacctttcactcgagtagtagactagtactacacggctatcctggaagcgatctcagtaacccgtgtgataagaagcgtagtatagtaagatgtgcaaacgtgtgaagagtttgttcggtagaaggaaatacataatccatcaatctgtaatgacagtagtcgaaggaaagatatgcacgatgcatcaaacttttgtaatcatgtcaggtaaagggattttcccctgaacataatatacatatagagttacatatttggac

SEQ ID NO: 19224 - DNA, 3679 bp, Zea Mays
caaacccctcttctctctcccagtctcccccaaaccgccttgcctccgttgccctccccactcccctctcacctcctaaaacccctcttgctctcccttgcccgcgcgcacgagcacgcgcatcgacaccttcagctcgtgtgtccgtgcgagcgggcggtttcctcgccaagaactgtcgcgcgggtcgggggattgaggaagagagtgtcggcggcggcggcggcgacgacgacggatttttctggcccgagattcctggtcaaggcaatatgaagtacgtccttgtcaccggcggggtggtgagcggcctgggcaagggcgtcacggccagcagcatcggcgtcgtcctcaaggcgtgcggcttccgcattacgtccattaagatcgatccttaccttaacaccgatgctgggactatgtctccattcgaacatggtgaagtgtttgtgctggatgatggtggcgaggtggacttggatcttggtaattacgagaggtttctggacattaaacttactcgggacaataacataaccaccggaaagatctatcagtctgtaattgacaaggagaggaaaggggaatacttgggaaagactgtccaggttgtgccacacatcacaaatgccatacaggagtggattgagcgtgttgctatgataccagttgatggcatggagggacctgctgatgtctgtgtgatagaattggggggcactataggtgatattgaatccatgccatttatagaagctttgggtcagttctcttatcgtgttggtcctggcaacttctgcctggtgcacgtcagtctagttccagttttgaatgttgttggtgaacagaaaacaaagccaacccagcatagtgtacgtggtttgaggggactcgggctcactccaaatattttagcttgccgcagtactaaggaattagaggatagtgtgaaggagaaactctcccagttttgccatgtgccggcagcaaatattatcactttgtatgatgtttccaatatctggcgcattcctttgttgctttgtgaccaaaaggctcatgaggctatccttaaagttctgaatctggaaagggtggatagcattgcccgagagccgaagttagacgaatgggttgcaagagctgctatatttgatacccttcatgacactgtgaggattgctatggttgggaagtacactggcttatcagattcatacctctctgtgttgaaagccctcttgcatgcatctgttgattgccgtaggaaacttgttgttgattgggttgcttcgacggatcttgaggattccacagcaattgaggcacccgatgcatataaaacatcatggaatttattgaagggggcagatggaattttggtacctggtggctttggtgacagaggtgttgaagggaaaattttggctgctaagtatgcccgggaaaagaatgtcccatatcttggtatatgtcttgggatgcagattgctgtcgtggagtatgcccgtcatgttatgaatttcactgatgccaacagcactgaatttgatccaaataccaagaccccttgtgttatttttatgcctgagggttccaaaacacatatgggtgcaacaatgcgcttaggatcaaggaggacatttttcaagattgctgattgcaagtcttctaaattgtatggcaatgtcacttatgttgatgaaaggcaccggcacagatatgaggtgaaccctgatatggttccagagttcgaaaaagctgggcttcagtttgttggcaaagatgatactggaaggaggatggagatgattgaaatacccaaccaccgatattttgttggcgcacaattccatcctgagttcaagtcaagaccttcaaaaccttctcccctatttgtgggactaattgcagctgcatctgggcagttggatagggtgctgcaagaccgctgcaatggtcatgttggttcagctaaacatgttctgagcaatggctcatatacatccgcagtacaccaaaatgggaacccaaagaagctcaccaatggtctctcaaacggaacatactatgccaatggcaatggtgtgcatgcttagaccatcagatggatggatcaaggattttgcaactctttacttcaattatgcggttcctaatgcatcagttttgtccgttcgaggaagaaaaagttcttgcgctcgatgcagactgtctgctgggaatagtgctcgttcggtggtttttagttaaagaactaagctggatctctttggaaggcacgagactggtttctgtgttcgtctctaccctattgtgtaagctaaaggagcagatttgggacggaagagtttacaagttgtatatcctcaaagaaaagctgaatatttttattaacttaaattaggtcttcagtgaggtcgagagctgatgcttaaaagtgggcagcagtgcaagtgcaagagagagtatttcgaaatcaggcaactctgtattttgattttggacattttttttgtttcttgtgcgcaaataagttgatgcactgttgcatgatcatatatcagttttgactttagaatccatcttgagcgcttgcttctcataattcctgcgacttgcattgtggcaatctaaaacctatttaaaccgtgataaataagctagtttatttttaactaagctgtgatataaattaaaaagaacgaaaggggagggagtgtctgatacgcaaaatcatcctatatcacaacaatttcgagttttttttgccgagttgatcgaaattccttgcggtgcaaaaatacacgagcataaaactttgccatcaagaatctatctatgaaaaccgaaagctcaatccgtgaccgtgcaacggctcagggttcccactctgagagaagcttgtcaatcagctccaccagcttccctgtctcctccggctggcgcatcgcctgctccagcgcccacgcttcctcgatcctggcgtcctgcagcatcgcgtcccgcaccgcctcccgcagctcccgcgtggcctgcaacccgtccgttgccatctccctgagcgcagccagcgcgcccctggggtcctcaaggcggcagagcccctcgacggcgtcagcgtaggtggcggcgtcgggccggcgcggggagtccgggcggcagagccagcgcagcacggaggaggcgtcgcgcgcgcggcgcagggagaggaggctgccgagcagcggcgacgccagcaggagcggcgagggccgggccgggtgatggcgcagcgcggtgaggagcgcgaaggcagcggagagtgtcggaagcgaggcaaggtgcgcggcgagggaatcgagggggaggccgtcctgggagcccgggaggaggagcgccgcggagaggaggcggccggcggcggggacgtggcccgcgtagaggaggcgcgggaggagcgcggagatcgcgtccaggtcggacggggagaggggttgaggtgggggcttggattgcggcagcgcggtagcgcagatgccgcgaaggacgccggcgagcggcggcgcgaggcggatgggcaagcggggcagcatcgtcttctgggctcggctcactcaggaacgattctgagtcttttttttctttctgcaggagggcgcgccgccgtcaaatggacgagcgatatctcagatcgagc

SEQ ID NO: 19225 - DNA, 4071 bp, Zea Mays
cgaagatccacttccaagtgcttcctttgagggtaattcctcaccggctttccaggccaatggagtatagactctaccttgagctcttgaaaagacatgggttcaacttccatcatcagatgaaagcagcaaatttcagaaagatcatggatataatagagcggaatcttagactttccaagatatttggcatctctacatgtgaaccaggggtttttgttgtgcatttcattctttgtattatatggcagttgattgatgttgttctggatgatgagggcctactagagttaactccagagaagaatgctcaatggccaacaaggcctgaagatgtgagcacatttgaaggaacttttactgaacaaagaactgagaagatcaaaaagttacagaagatgaacactgtaacaactatggagctcattgagcatcttcttcgcgataaagtaattactcgtatcctatcattggcacgcgaaaacatgcaatctcactggggggcatttactaaccggttgcacttgcttgcaacaaactcatctaccttgcaaaattcagcaatatccttggaaccatttcagcatttgattctaggtgattgtgatgcatatggtgaaactaaacataatgtgcataaaagattccaccaaatagtggcttctaaccctctatcttcaccaaatggacgatgtcttggtgctagctattctgcactatggattcctattgatatgtatcttgaggattgtctcgattgttcaattgctgcaacaaattctattgagattttaagtggtttggtcaaggctcttcaagcagtcaataggtcgacttggcatgatgctttcttggccctctgggtagcttcacttcgccttgtacaaagagaaagagaaccaattgaaggtcctgtacctcacctagacacccggctgtgcatgttgttgtctatcacaacacttgcgattgctgacataattatggaagcagattcactttgcaatgaaacagaactcaacagtcatgtgaatgagaagaaagcaattggtaatctacgcaatgaattgatgctaagcttacagatacttggtgattatgaaagcttgctggttcctccttcatgtgtcatcccagcagctaatcaagctgctactaaagctgcaatgttcatttctggaatcagtataaacaatggctacatggataatgtcaatgggatgaactatactggaaatatgcgacatttgattgtggagtcatgtatctcaaggcagttgctggatacatcagcttactattggcctggttatatcatgaatcatgccaactctacatctcatacactccctagtcaacttgctggttggtcatccttcatgaagggtgcaccactgactcaaccactggttaatatgttggtatcaactcctgcttccagcttggcagaggtcgacaagttatttgaagttgcagttgatgggtcagatgacgacagcatttcagctgccactgttttatgtggagccacccttttacgaggttggaattttcaggagcatacagttcggttagttgttaaactgctctcaccatctgatccaattgataattctggaagagagagccaattgataaagcttggtccaatgctcaatgttattctttcaggaatatcggccgtggactatgctccaatcttctcgttccatggcctgattccagagctggctgcttctcttatggcaatctgtgaagtatttgggtgtctttctccaagtgtttcctggacactgagaactggagaggaaatatctgctcacacagtcttctcgaatgcatttattcttctgttgagactttggaagtttaaccatccaccacttgagtattgcataatgggagatggtgctccagttggctcgcagctaactcctgagtatcttctgctgttacggaattcccaggtcctatcttccagcagtttgtcaaaacaacgaaacggacaaaggcaatcacaagtatcaacttcacacccatcatctggaaatcctatttttatggactcgtttccaaagttgaagttatggtaccagcagcaccaagcttgtctggcctcaactctctctggacttgctcatgggacacctgtacgtaacaatgtggatagccttcttaatcagatgttcagaaaagctaataaaggaggcacatcaataggttctttatctggaagtagcagcataagtaattcttccagtcctggtggggatgattcacatctttggcctcagttgccagcttgggagatactggaggctgttccttttgtggttgatgctgctcttactgcttgttcccatggaagactatttccacgtgaactggccacaggcctgaaggatctggctgatttcctccctgcatctcttgctacaatagtaagctacttttccgctgaggtgacgcggggtgtctggaagcctgcatccatgaatggatcagattggcctagcccctctgtgaacctatccatggttgatgagcacatcaagaaaatcgtagctgctaccggtgttgatgttccaaagctagttacaggaggaagctcttcaggtacacttccgttaccattggctgctttcgtgagcctcacaatcacatacaagcttgacaaggcatcagagtgtttcctcaaccttgctggtccagctctagagaacctggctgcaagctgcccttggccaagcatggcaatcgttgcagcactgtggacccagaaggtgaagcgatggagcgatttcctaatattttcagcttcgcgcactgtgttccaccacaacaacgatgcagtcgtccagctcctccgaagttgcttcgccgctacccttggcatgtcttcgacatcagtatgcagctgtggaggtgtcgccagccttctgggccacgggtactgccctggtggtttctcgccagttgcgccaggaatcctctacctccggatattccggtgcatcaaggactgctccatactcgccgaggacatactctcccttctgatgctctcagtgaaggatatcgcagaaacaactgtgcccagacaaaggccagacaagctaaagaagaccaagtacgggatgaggcatggccaggtatctctttccgctgcaatgacgcaggtgaaggtggcggcatctctgggggcgacactcgtctggctatccggcggcacggctctcgtccagtccctgatccaggagatgctgccgtcttggttcctgtccgcgcagaacctggatcagggcggggctagcggaggcgtggtgtacaagctaggcgggcacgcgttggcctacttcgcggtgtactcggggatgttggcctggggcatcgaccagacgcccgtgtcccggcgccgcgagagggtcatgcggtcgcacctggggttcctggcgagcgcgctggccgggaagatcttcctcggctgcgacctctccctgtggcgagcctacgtctctgggttcctaggactggtggttgaatgcaccccgtgctgggtgcaggaggtggacctgagggtgctcaagcgcctgagcagcggcctccggcactggggcgaggatgagctcgcggtggcgctcctccgccgcgccggtcccgaggctatgggcacagccgcggagatgatcttgggcagggagttgtgacgccgatgcgcgcgcgcgccgcgcggcgtatgctgttcgtcagcgatgatgcagtttttgtatataatcggttaaaatctggccatgtgtatgctcacgggtaatatttgaatgattttatctgtaaaactgttaagacgttttgatctctctaatactaaccttcatctacccgtttgcaaaaaaaagaaatgatgtaccagaatgtaaaacctaggtttatgaacggacatgtttggcacagttctcatgcagcttccactgagttgattaaagttagaccatgttccaaagctatagagttaattgtcagccagctcataagagcaacttcaatagagaccctaaactcataaacaatttc

SEQ ID NO: 19226 - DNA, 3354 bp, Zea Mays
atggcagaggagaggtgggccttggttggaggacaaggccttgatggggagaagcagacagaggcaggagaaaaaatgagtgcagggtggaaaaaggcgcgtgtcaaagtataccgtttggctgatggtgggaagtgggacgatcaaggaacaggttatgtttctattgattacattgagggttcaaaagaactaggtttgactgttttagatgaagatgacaatgatacactacttatgcacaacatcacatctgacgatatttacagaaaacaagaagaaacaatcatttcatggagagatcgtgaagcagcaacagacttagcgttaagctttcaggaagctgctggatgctcctacatatgggaacacatatgcgatattcagagaaaccttcagttcagtaaccttggtgctctggaagttggtcctcgtcaatcatcagaatctctagaagcctctagaataatgcattctaatgatgattcattccgctctgccaacggcggcgaattcagggagcttcctcctgttgagttgtctaatcttccttttattttgaagactgtattggaggctggcattacagatcagatgcacgtggcagagttgataacacaagataatgactttttcccaaagatagtggacattttcagaatgtgcgaggatttagagaacatagatgatcttcacatgattttcaaattggtcaagggaataatattgttgaacagtccatcgatctttgacaagattttctctgatgagtttattcttgacataataggtgcccttgaatatgatccagaggttccaagagtgcaaaatcaccgtgcttttctgaaagatcatgtagttttcaaagaggccatacgtattgaaaatgtttctgttgtttcaaagattcatcaaacatacagaatcggctatcttaaggatgttatactaccacgaatactggatgatgccactctagcaagtctgaacacaatgatacactcaaataatgcttcggttatttccctgctaaaggatgacacactctttattagacgactatttgccaggatgaggtcatcagatatttcaatggaatcaaaacgagaattggttctgttcttgcatgaattttgcacacttagtaagagtctaccacttgttcagcaactgcgactgtttcgggatctttcaggtgaaggagtttttgaaataatttctgatgtgttgcagagtcaagatagaaaaatcatttcagctgggacagatatccttatactttttcttaatcaggaccctaacctattgaggtcatatattgtccaacaagaaggaaattctcttctaggacttctggttaaaggcatggtaactgacttcagtgaggaaatgcactgccagtttctagaaattctacgcatattgatggattcttttactacgtctggagcacatagagacgtagttattgagattttctacgaaagacatcttgactatttggttgatgtaatagcatcctcttgtcccccgaggagcttgtctcgatcatcatctaactcggtacatgttggtggaaatgctgaaggacactgtatcaagcctgagattttgttaaatgtttgtgaactgctgtgcttttgtgttgttcatcatccctacagaattaagtgtaattttcttatgaacaatgctatcgagaaaatccttacattgactcaacgaagggagaagtttttggttgtagcagctgttagatttatgcgtactattatatccagaaatgatgaccatctcattcgccatgttgtgaagttcaacttgctgaaaccaataattgatgtctttgttgacaatggggagagatataacatgctacattcaggagtactcgaattgttggaatacatacggaaggaaaatataaaaactctcattatctatgctattgagtctttctgggatgaacttgccatctttgaacactttggaagtattcaggccttcaaactcaagtatcaacagtacctggagagcgctgaaccaaggttgaatgctagtgtgcctgacatgagaaagaaggcagaacaaagaggtcttgagaaggaagaggaagactacttcaatgaggacagtgatgaagaagattcaggctccggccggcgggctaaacatgcacagaaccaaaataacaagcctaagtccaaggtccccaatggaagtgaagctgatgacactgatggcgcctctaggcctaaatctgctggacttgtggactatgacgatgatgacgatgaggacttcaatccaccaccaaaggagccttctaggcctgcagaggatgatgtgcccttaaacatatccccgttgaagcggaagccagtgaatgcagtggatgggaaacattcagacggagagggtcgcaggaggcaaaaaatagaaactagaattagttgtgctaaaattgctgctgttactagtacagctattaagcacacagatctacaaaacaagtatgcttcccacttgcttacgtcagccacaccaagtactgaagccaatggtatttttagtgaacatggtactaactatgaggagcaacaacatcctatggagaacacagaaacttcacgacaaactggtggtgattgtataaaagatgtgggcagtatgtctcccgagaaggccgtaaatactaccaatacaagcgattcggagccttattcagtaagatgactactacacagctggttggtccatgtacccatcctgtgctgtggtcaacaggaaggaatcagaatgtgtttggctccaagcgctgaatgcatcgatatcatgctggaaacatgattggaggtgacatagattgcagctacctttacatctcaagtaaacatggtcactccatccgcaaagaagaatcatgtgttcaaccagtgtcaattcaacagaataaagaagaatcatgtgttcaaccagtgtcaattcaacagaataatctgttcagcagtttgctttatccgtgctcattgtactacgaacctccgccgtctacttgaatatcaagcctccacgggcagcaaagaatggcgcaaattattgagactcgacagcaatgagcttgatcagtatgttcagggacggtccggaggtgtccttgagggggtcgccgatgacggcagctttctgagcgtgcgacccaaccgaggctatatctaacaaactgcactatgtaaacagtctacattgtaaaataatattttacacggttatatacactctatttaagcatgatcttagtgtggttgtttaaacatggtcttagtgtggttggatgcaccacttgcccttgtt

SEQ ID NO: 19227 - DNA, 2573 bp, Zea Mays
ctaaacaatttaccagcccacgagactgcgcggctttccctctcgtcgctgacatgccgaagcggcaccgcgacagcgagggccggcagcggtcgtcgtcgtcgcggcggcggcgcagcccgtccccgtccgactcggacgccgcctcctccgattacagcggctccccccgacggagccgtggacgccaccgccataggagccgccgccggagggacactccgtccacctccagcgacgcgagcggcagcgggagcgaggattcgaggtcggactccggacgccgagggaggagcggcggccggaggcgccggaatgtcaccgaggagcagatcattgagtacatggcgaagaaggcgcagaagaaggcagagaaggtggcgaagaagctgaaagcgaattcggtttcaggctactccaacgattcaaacccctttggtgatcccaacctgacagagaagtttgtgtggcgaaagaagatagagcatgatgtatctcagggacagaaggtggacttttctgtcaaatccgagaagaagaaacagctagaaagaatggctgaaatagagaaggttaagaaaagaagggaagaaagagctattgaaaaggcacagcacgaagaggaaatggcgttaatagctagagaaagagcacgtgcagagtttcaagactgggagaagaaggaggaagagtttcattttgaccaaagcaaggtcaggtctgagatcaggttgcgggaggggcgtacaaagcctattgatgttctccttaagaatcttagtttctcagatgaatttgacattgagttaaatgagccttatctggtgttcaagggattaacagtgaaagaaatggaagagctatgtgatgacattaagatgcatcttgatctggacagggaaagccaaacaaatgttaagtactgggaggcactcatggtggtatgtgaatgggagctaggtgaggctcggaaaagagatgccctagatcgggctagggtccgtggtgaggaaccaccacctgaggttcttgcagaagagagaggtttgcatgcaagtattgagggggatgtaaaaagtctcctggatggtaaaacttccacagagcttgaagatatgcaaagtcaaattgagtcccaaatgcgctctggaactgcgaaagttgttgaatactgggaggctattctgaaacggcttcatatttacaaagcaaaggcttgcctgagggagatacatgcttctatcctaaggaagcatttacatcgattggagcatcctggtgctgctgaacaggatgtggattctgagaaagaagttgataataaactggaggatgaaatgcatgaggacgaagatgataaacgatattcacctgagcctatgcctcagcagacagataacgaatttgaagaggcagatggatccttttctccacagctaatgcatggcaatgaagatgaagatgcaattgatcctgaagaggacaaagctgagctggaccgaaaacgtgaagctgtagttttggagcatcaaagaaaagttcaggaagccatgaaaacaaaggcaagagtacctgatgagatggagatgaaggccataaaaacaatgggagctatggaggaaggagatgcagtatttggtgccggtgctgaagtgaaccttgattcacaggtgtactggtggcacgacaagtatcgaccaagaaagcccaagtacttcaatcgggtgcacactggatatgaatggaataaatacaaccagactcattatgaccatgataacccaccaccgaaaattgtccaaggctacaagttcaatatattttaccctgatcttgtggacaaatcgaaagcaccaacatacagtatagagaaagatggaagcgccggagagacttgcttcataagatttcacgctggacctccatacgaggatattgctttccgtattgtgaacaaggagtgggaatactcacacaagaaggggttcaagtgtacttttgagcgtgggattctccatctctatttcaacttcaagcgttaccgttacaggcgctgaaatggctcaagaggcaggggaaaactggatcgattggactggtgcgtcatgattctgctgtatgctgtggcatggataccagtcgagtatgtatcttcagtataattaggtactatgctaaatgggaacacactttttggttttactgactgattccccccttttttgaggttgtacaataatacagcatagcaagctgatagttttctaacaaactagcatgtagtctgtgctaacgctaagatctcggtaatgagaggggttgatggcggtggcaacacgagtaagaggaggggtggcggggtcgctggagaagagtgataagggatgattcaaataatagtctattggatttaaaaagggagaggaagtcatccactaatttaaaccgttggttttaatggcttttaagtttatgtgtaatttgtttgttagatttagtggaggttataagtgtgtgagtgatttggttggatgatttttgcaaagtttaaacgggtggatcttaaacccaac

SEQ ID NO: 19228 - DNA, 795 bp, Zea Mays
agagaagaatgggaatccaaaatcctataagaccctcctcccttcatgcacagctctgccgcttgcctccgccggcgagggaagggacgaggcgccgagccggcaaccgttttcggggttgctggcggcgattggctgcggttccgcatcaaggctggtcgaacgctgcccctcctgattggtaggtagctcgagatggatctgattcttccatataaggttggggacctcgcggagtccaaatccttggtgagcggttacagaggtgcatggtttcgctgtaagatacataatatgcgtgtcaggcttggatacctggagtgttacttggaatacattgattatccaggagaaaaaaaggaatgggttaggctctttcgaaagaactctgcaaggtccaaccaaaattcaagtgatagtattcacaccatgataaggccttcatttccaaaatggtattttgtgcatgaagttcctgagcagttcccaaatagtgatgtcacagcaattgttgatgaaacctggcaaattggtgatcgagttgattggttgaaggaaggttgttattggtctgggacaattactaagataatcaatgaagatctggtcgagatagagctgccggcacctcccataggtgaaggaaaatgttataaagctaaatgtagtgatctgaggcctactctcgagtggtctctagcaagaggttggatggtccctctttcacaggcaaatggaaaaggttggcatgctgctcgtctacttcagcattataaatctgggatctgttgggaa

SEQ ID NO: 19229 - DNA, 3363 bp, Zea Mays
aagccgccgccgccaccaccgcctcacccaagctttcatttgtcatgctggttgcccccgccttatcgtgtaatgccatgttgcccccgcatcatcatctaagatttcgtttgtcgtccgcgctgcagtctgcttcccgtttcactcttatatttttttgttggacggagttgttttgcatcgtttcgatctgtaccgtactgtttcccctcttgttcataacggcggcgacacaaattcttgcgtgctgcgccgctcacgcaaggagggataaatcgactcgtcaagaaatcgtttcagttgccatgactccagtaggcaatatgattgttgcttgactacagttttgtcttccactacttagcttatttgtttgttttattcttacctcgcccgtattttctttgttttattcttacctcgctcccgattttaagatctaatttggtatctgcacggtgcttaccccgggcttgtcggatgtacttgaagaaggaagccccaatgtctgtgctagatccactatgccattcagtgttgcaggccctgatgaattttgtgattggtctgtgtcaaagcaatggatacaaattttcgtaatagaccatttctttattatgtttggtttgatgattcgtttgattgattgatggcagtgatttgacattacccgcgcttctgatctaacccgtgaagcaaagggaaaattaatggttgaatttcttaatatgagccatctagtgatctttcagctgtctccttttattttgtgcgtgagctcatttcattcatgtggttgatttggcggtgatgatacaaccattcagcttacaacgccagttctgcttctgataagtcatgacagataaagctgattcatatctgagccttgatttgtgtcatgttctgacaaactcataattaggatcatgcattttttcttgctccaaaccttacatcccgttggccactgaagtcaacccaatgtttcgaggctacaatcggctccaactacatgcttgtcaggtagaacctacttggagctgctgccctcgcatgacgagtcttgacaatcctgtggccctctacgcagcgtcgaaatgcgttttagtttataataatgctgtgttttagttatttctctcctaataattatactgagtggatctgtgccgagttcaactatccttgcactagtgctctctgatttgtgttgaggctgaagaactcggatagtttgtgttgtcatcagcttcggctctgtactgtgagttgggagttaaataacagcacgagattgttaacatctgtgagtttaaaccacatttttttttgccttttttatgcaacataattatttttaaggctttagaacaaggagttcaaccagtagttttgtctccctttgcatgtagctgatgctcacgccctgtgttgactattgtgcttataacaggactggcaattttgctttgagtctttatagtaatcactggaattatttcctaggttggcctgactactgttaccttttgtagaatttataaggtgcagttacacttgccacctcaattctcacacgttcactatttatttagtttaaattatattgtttatggttattataaacttgtgattactgaaggatacattaagtctgtattatttattggttaaaattgttggctaaattatttgtcaaaagtcaagactgttaaagtttgttgatctacatttgtgcgttgtaatctattctggattgggcaaaatccaaaatgcatgctatgtagcataataatgcatagaaaccccaagggtattaaataacttacatgtacaccccttaatttttttcttgtctaggattataagtacgttgtccagctgtggcaccaagtcgtagctcactgtcttgtcctggttctgctatattttctctttgttgcaggcggtatcataaactgattttttgtggttcagttagacgagagcgatgaagagcaacttttgtgaactagagtttcagatgctaccatggtagtatttgacgatcaaaccctttttattagtagtttacttatgttgttttttacttcctgttctgagaagatgaattttgaatggtgatgaacaactgtgttttggactagagtttctgatactagtggtagttgaagaccaaaccgttaactgtctgaactcaaatctatcgagcgggcaatacctgacattttagatgatttttttttattaaatgcgtccattaccaattctgaaggaagactctgttcctctttgtataatggctcggacgccacatggtattctaaaatagttgtgtggttatatcctgattggttgcgttcttttatggcaatccaatcctggaaaggccgcatatattccatcgcatgcaaaactgataatttttccacgtttttttggtaataccttgaagtgatagtgcctgacctgcttgatcgtgtatcatgatatttcttttatatcggatacgatgatctgatagattccttatcttttttctcgtatgagttgtctaaaaagaggtgggtgacgataacaaagtaaaatacagccaatgttgcagaacaggccaacttttgcctattatattttggtatctcttaactagtggtgcgaggccaattgttcacttgttaatttaactaactaattttaaatgttggttggtttggtatcttggtaatattttggtatctctgaactaattttaaatgttgttagggtatattttgtttacccttgtaattgatgtgttaatgttgtttgtttcgaggtttctcttgaatgtaatcatcactggtaacattgtgtcttgagaggcaacaaattagagtctttgatgggcttctttctgtagctcattcagcgctttacgttgccaatagcaagcttggaataagttatcatgcattcactgtcttctcgaacagtgtgtgcatccccatgtccaacattcctcactttgcttaaacgctttgcaaaatttcttctgttgatgtgtgtttggcttgtatgtgactataaataacaactgccttactgcaggtgacttttttctgggatggagctcatatttgcagatatggcacatatgataatgatcagagtggtttctgaacatacgaagtagccgcccaagagctttcaacctgccaagtttcagagctagtgctgttacatcgttggcaatgccacaacattttttcacatacatttatttcccaatgcgttgtccttaatgccatgtccttatgtagcagttcatgaacaagattggaaggatataagcactcaacgaccttcgtcgacagagctgaa

SEQ ID NO: 19230 - DNA, 147 bp, Zea Mays
ctaactagggttacttaacactgttgacatgtgaagagggcacattctcttccacaatgaagaggtaggccccctccgtttgagctgaggaaatgccttatgtcgtatctgattttgttgacaaaacccagtgctatatgtatgccg

SEQ ID NO: 19231 - DNA, 749 bp, Zea Mays
cttttgaacattctatggcatggatgctaacaagggagggaatagatgcacttggtgtagccacattaagttctgcaacgtctgcagcagcctccagattgccattcggtggtggaccatccccattgacctcactagatgacgaagatgccacaaacttaagaaatctgtatcgcctgctcctacttttatctaaggtttctcagaaggaaaatccatctccaattcctgaatataacagtgccatagagaaggaaggtggtagcacggatgaacttgctcttgcgctgtatggaatgacctctctgccagaatttcttccagttctttctgtcattcctgagcttccaccggagtcccaacagcagttgcttcttctgccagcggatttaaccaatcgtattttatctcgggctctcgcgagaaccattagaagactcatgtaaagccataggtgcagaaattttcggtccctgcttaatttttattttactattctttttggttcactgctagaagatggggatttttttagcatctcatctacaacccaagatcaatcccttttttgttatctacgattactatgtacatattgttcaaactaaagcaggcattgtaaatggcccatgttgttatgcacatatggtgtaactgataaactttaaatatatgtgaacatagaaataattctgtaatgcaatttgcctcgaaagcatggattcatgtcattttcttgtttcaccatc

SEQ ID NO: 19232 - DNA, 770 bp, Zea Mays
tttttgccccgattccggcggctccagacacatttgttgcagcagctgctcgaaacccagtatgtaacttatcattgatggtgggtacctctgacatccctgattggtgctttgtcgagatttatggaaaagaagggaaaaagtacttctcagagtctccttcagtagacgatctttgtcaattccaccagaagtcaccaatttcacatattgcaaaggtcaagacaccaacactctttcttcttggagcgcaagatctcagagttcctgtttctaatggcctgcagtacgcaagggctttgaaggagaggggaatcgaaacgaaaactattgtcttcccagaagatatccatggaattgacaagcctcagtctgatttcgaaagcttcctcaacataggggtttggttcaagaagcacatgggcaaataaacattagtgcttcccattacattcatgatttactttttcattgttactaaatgcctgtaaccgggtcaaagtatacatgatttgcctgtccaatctggtgtttgccaagatggaataattcttgaagacatatagaagcccgtgtttattctagtgtggattctggaataccaactgtagctagtttatataataatcttctaataaatgatgcttatgtgttaatgtgaaacggtgcgtgcttttgaattgtattcagaaaaaaaatggcccagctgaccagctcactgttgtttagttcatactaagactgtctccaacaggtcctgtaaaccctcc

SEQ ID NO: 19233 - DNA, 1886 bp, Zea Mays
ggagaacaaggcgtggagaataagaaaaacactctaccattgccttcctcctccatccttgggggctggcgcacggatactgtacacgtcgcgccaagaagtcgagggtccatggaaccaaatctgcactcggcaattgaggagcaatctcgtcttctccgtgacatctgcgaccgtctggtcactggtggcacaggatacgcgctggtgcatgctagagtctgcggtggcacagaactccgcctcgatccattctctcgaagcgtcagcggccaacgcgtcctcatctgcgccaaggcagaatctcaagatccagatggcaacgacttcggagcgcctggatgcagtcgaggcagaggcagcgtcgtgggtcggcgcgctcgaatccgtgacggtgatcagcgaccttcgaatcgtggcgtcccttcgtcgaggccgcaatagacgacatcaagtattccgtcgagaaattgtgtggcgacttgtccaaattggcggttccggcgcctcatccgctgcacacggccttcgtccactccaccggggttctccgtcctgctccatcggccgcggagcgcccatctgccacagcctacaaggccgatggccctcgtgggcaccgcacgaatcacaattgtcgggagtctggctttgggcatgtatttgctcaaagccatctcctgcccaatggtacgtcctactgctggttctcttcaccattccatcatatggatcctattgtcgatagtgccgataacttgattcaggatacccaattgcactatgatctcggcaaattacctaggcttaatttcccatgttttgacggcgacaatcatagactctggcagcgtcgttgtgaagattatttttcgatgtatgctgttagttgtctggattaaagtctccataatgcatttttctggggcagttgcctgttggctacagtcagtagaaccaacttaccagcctttcctgggatgagtttagccatatgttgaaggagaggtttgggaaagaccaacatgccactctagtgcaccaattattacatatcaaacaacaagggtcggttaccgaatacatagaatagttttcccagctagtttatcacctcaatagctaccaacacatgtctaacccctttactatactatgaaatttttggatggtttatgctatgacattaagtctatggttatgattcagcgcccacaaaacttggatactgcctatgttctcgcacaattgcaggaggagattgtcgagacctcgaagaaggactacaagacatttgcatcaacatctcaagggaagccttatgttcgaggtcctctgccgctgcctctccaccacctaaggtccttgctgctgttacccgaccacctgaacatagatcggtacatcctacctcagctccgttgggggtgatcggctgtcatcagtctatgcctatcgcaaagctcaagggctttgctacaagtgcggatcttcttacacccgtggacaccagtgcccagatacagtccaacttcatcttgtcgaagagctttggcagcagttttcccaaccttcataacataccccatgtgaaactgaagaagttgtggaactcaattgtcttcaactttcacaaccagctgcattgggtgtttcaaacttgaagaccatgcgttttgtgggtgagttcgtggggctctcaattctcatactgttggattcgcgtagctccatttctttttctcagttcaaccatcgcccaacaatgcccccaaagcgtctcccttagctcggcctcttgtggttctagtagccaatggatctcagatggtctgtcgatctgagttggtgaatacagcatggtccatttgttagatttataggca

SEQ ID NO: 19234 - DNA, 2997 bp, Zea Mays
taagtagtaacagtacactattatatactgaaatctttatccagttcaggcatggtcggaatgttcaaacggcagagagcaaaatcgaccatgaccaccgcgcgcacatggctgcaacatcacagcacatggttacaccaccacttccaagtcccaaccacacaacacatcacaattcatgttgcagtcccacactgcccgacttctacagtactactacagctgtgtcgctctatgtttttataggctgtggatcgtcaaaaatccacgcagaaacgcctgacccacatggtttctccatgacttccagcaaaaaaaagggggggcagacccacatgcttttcacaaggtccgcaagtcggctgcaccatgcttcttggaggattcagaactctcatcacttttatctcttccggactatgagagctttgttagagaaagattggtcaagaacataaatagaaaagggaatattgatgacacttcatccttctctactattgttgaacagttgagcaaccaaactgaatacctttctagttttttaaaagatttgtcaacctacatgaatagcaatattattgtggtgcttcgttctctgcaactagtgagcaacacctttgcccatactctagaagagcatgacatgttgaaggttgaattggggaacaaggatgctcataacagagctcaagaatctgaagtgctttctctacaaaaagatctgagagcaatgtcatcaaaatgtatttattgcgtccaacaaattgaaattgtttttgacgatatggttgatcttggatatgcaatagacttggctacaggcagctcaagcatagggtctgaactagaggtaactgtgtctgatctgaagaatgaggataccagtgattatagtaaggtggctgatactttgcttgctacaattgacacacttaagtccaagtctgaaaaattatctaccattaaggggcttgtgataacttcattggatgacttcaaaatgaagctgaaacaagctgaagcagctgctgaaactgcttcacatgagcatcagttgtctgttgaaagggtatgcatgctggagaaagaactcaaaatattacaggatgagtgcaacaaaatggaactaaatattcaagagtataaggaaagggagggtgcattgaaggcaagggagttagagttgctatcagttgagcacactcaaatttcagcagacagaggtttaactgacaatgcaatttcaaaagatcaaacggaagctcttgttgagaagataagtaagttaaatatgctgtcaggcgagtcaaatgtgcagagggaagaggctacaagtccgcttgacaaactttttgttgtcattgatgaattcagtgcacttcaacacgaggttgagaccttaagatatgaaaatgaagatttacagttaaatattgaatcctatacccgtgaaattgaacagctaagagaggtctccagaaatagtgatctaactaatagggagttggaatccaaaggaagtgagcttcttgaggtagctgttagtatggagcgaatgattcagcggttaggatatcttggaggaaaagatgtactagaagataacaaacctgctagcacacaagctctcttatcgaagctggaaaagctaataatagcttcaagtactgaatctgggaattctaaatccataatacaggagctgggagcaaagctgcagtcaagggaaaaggcagttgatgagctatcaacaaaagtaaagatgctcgaggatttgtgccatgcacaactttctcagccagaacctagtaaagacagatcatttgaagcatcttcctcaacaattgggtcagatatgtctgatattgaagatgcgggaccagtgggcaagacaacatcagtttcatctgtttctacagctgcacatgctagaacaatgcggaaggggtcagcggatcatcttgttgtcaacattggttcagagtcagaacgattgattgctgcacaagattcagatgacaaggggcgtataaaatcgctccatacatctggcttcattccagctcagggaaagcacatcgctgatagggtcgatgccttctgggtctcggggagccaaattctgatgaaccggccacgagcaaggctagggcttatgttgtactggctggctgtgcacctatggttgatgggcagcatcttgtgacaccgcttctcaataccgagacccatctcataattgtacaatagcacgtattagcagtttcttcttccattcatacaatacatggtagatgttagaaataccatttttttcattgtcttcctcctgctgagatttgcacttgagcagtatgtgttgaatttttgcacacaagatgtaacgcgcagaaaaaataacgttgtcattctttggtatagtgaagaggtggtaattgtatttgtagatgtggtggccctgatcacctggtgggccccatcatcgtaaattcgttgtttgaaattgcgtgcgtttgaggtctgacaatgtagaggccttatgggtcgacctttgacgtatgaatagaaacgtatatagttggttacacttttcgctcctccatgaataattttcgattggaggtgactggttatacagtcacaaatctttcctccaaaaaacataaataaaggagtgaatatgtatttgttatcatgaatctgtgtagtttcataagggataaggcataaatcttcatggcatcatttgtgtttttccacacaatttgtaatgcaaaagaatgtagggtgtttcaaccaaacaacaagaaacaaaaaagatttaaatacatccttaacatactaacatttttacggtggggctgctcatttaaactggactggaaacaaaataacaccgtaaaaatgttggcttttgacaaatctgacactgaatacgccaaagaccacagttgttaccaaaagaaatgcagagttccaatctctcactctcac

SEQ ID NO: 19235 - DNA, 3131 bp, Zea Mays
ctcagggctcgcagaacagggagcgtagggtaatactttgcgtggcggccgctgcgctcctcccctccaccctcctatccccccacctcactccgcttgtgcggccgcgtggtggtgcctcccgcggcgctgcggctgctctccgatcccgagcgagcacatatcctcgccaccttatcacgaggccctcgcaccgcgccgacgcgatcagcgcgtcgagccaccggagtctccccttgcgggattgcatctcaagaatatggggagaaagaagaaccccattgtctttctggatgtatccgtaggtgacgagccagatgaaagaatgatctttgagttgtttgctgatgttgcaccccttacaactgagaacttcagagctttatgcacaggtgagctgggaattggacagaagactaagaagcccttatgttacaagggaacattgttccaccgcgtgatcaaggggtttatggcacaagatgcaagacagatgatatcgactgcttttcttatcatatagtatttaagggaggtgacattgcaaaagaaaatgggtctggtggtgaaaacatatatagtggaaaatttacagatgaaacttgtgttctacttcatgatgatcgtggcctcttgacaacagcagatactggattcaaacctagtggctcccagttctgcattactttcaagcctaattctcatcttgacaggaagcacacagtttttggcaagcttgttgttggaagtgatgttctgaagaggatcgagcaagtagatgtgcaatcccctgattcaactcctgttattccagttactatagtaaattgtggagagctcattgaacgcaaagatattggctctatgtcaatagaaattgataaaaaaagggctgccaaatcaaagttgacaagggatataacttctgacgaggaaagtaatgaaggacaacacaagagacgtcgtaacaaatcttcaaaaaggagaaggaagaagaggagatattcttattcggaatcagatagctcttctgagtcagagactgaatcatctgattatgagagcgattctgatacttactctagtgactcatctgatgtcagcagctcaagtgatgacaggcgaaggcgcagaaagagacactcgaagaaaaataaacgcaagcattcaagaagaaagcgtgaccataggcgcgaaagaaggcgtaggaagcgtggtaggaaatcaaaacagaagtcaaaaaggatagtaaagggtgatagtgaagctgaaagtacgggcgatagcagttctgaagatgctagaagcaagagacaccgccgtgggcggaagttcaaggcatcatctcaagtttctgaggaaaatcttgctggagtggctgctttgaaggatgccacctcacctcaacaaaagagtggaatacagaggagtccagcacaagatgtctcctccctgcaaaatggggaagtccatacaaatggtgttaatgactcaaaaattgaaagaaatgccgctgtcatgcctgttttaactggcaatcgaagcaaatctaggagccagagcatgagtgttaatcactcaatgagcaagagtatgagtatcagtccaagaagaagcccaatgaaaaggtcaagtaccagcccgaagaggtcacttagcaggagccctgttgacaataatcacagtagaagccctatccgtactcccaaaagaagcgtgagcaggagtccagccaggcggcagatcatgagcaggagccctgctaggagcccacccagaaattcaagcagaagccttcacataagcaggagtcctgttaaagcccacagaagaagcattagcaggagctcagctaggtccatgcaacagagaagtccaagcaggagtctggagagaactcatgtacgaaaaagtatcagtccaagcccacctttggagaagggaagaagcattacccgtacctctgtggtatctccattgcgaagtgttagtcggagcccagcaaggatttcaaggagcccacataggccttctaggagaagccctatgagaagtccacgatggaacatacgcagaagcctcagcaggagccctgcaagaatacctagaagaagtgtgagcagaagcccagtaagaggtggtcgacctcgcaggaacattagcagaagtcccagtccacatcgcagggtagtaacaccaccaaacaatggaagaagcccatccaggagtggttctcctgatgggtcaccaaaacgcataagacgtggacggggttttactcagaggtactcatacgcaagacaatatcgctcaccttctgctgatcgctcacatcgttatggtggaagaaatgaccgtgacagatacatgggttaccggggttcccgccatcgatcacctcctagacggtatagaagcccacccagaggaagagtgtcatcgccaaggtacaggaggaggagccgaagcgcctcacgcagccctgtctacagggaaagaggaaggggaggtggatacagcaaaagccctatacggagcagttcaccccctgccaggaaaccaaggtcacatggtgaccgtgcacggtcagtttcaagaagccacctttctgggtcagtatcaaggtctcctccagtgcatcatccctctccacctgattccccatcagtgaagcatgcaagtgatgagaaatctcagtccgcgtccccagctctgtcactgtctggtagccctaatcgtggaggcaagaaaggtttggtttcctacggggatggctcacctgattcagctgggaagtaggtttccaccggggcattgaaatgtatcttacaccgttagccattggctgttgatcaggtccatcaatactttttgttatatttctactgtaagaagcggtttggtccttgagctgcccagctgttacatatgttgtttgggatgatcggctatgtcctttggttatcacaagagtcgtaatttgagcttaggttttgctgttgctaaacatgtagcacagattcagtgtgggattttgatgttatataagcttcaacgcaaagaatcattacaatgttttgacctcggatgcctaagtacgattcacaatttatttcttttgcatattcaat

SEQ ID NO: 19236 - DNA, 2201 bp, Zea Mays
ctgacgctacattcctaccctcgcgtcgctggactctaatagcgcgacacgcgagaggcaatggctgtgcggtggtgcctcctgctgctcgtgttagtgttggctgcggccgcggcttgcgcggagaagggggagtgggacccggtgattcggatgcctggggagaaggagcctgcagggtcgcactcgcacagcggcgagggattcgatggggaggtggatgacgccgtcgggacgaggtgggcagtgctcgttgccgggtcctcaggctacggcaactacaggcaccaggctgatatatgtcatgcgtaccagatactgcaaaaaggaggcataaaagaggagaacatcgtggtgtttatgtatgatgacattgccaatagtgcactcaacccaaggcagggggttatcatcaaccacccagagggcgaagatgtttatgctggtgttccaaaggactacactggggaccaagtcactactaagaacttctatgcagttctcttgggcaacaaaactgcagtcactggaggcagcaggaaggtcatcaatagtaaagcagatgaccatatttttatctattactcagatcacgggggccctggtgttcttggtatgcccaatctaccatatctttatgctggtgacttcatgaaggtgttaagagaaaaacatgcttcaaatagctatgccaaaatggttatatatattgaagcatgtgaaagtggcagtatatttgagggattaatgccagaagaccttaatatttatgtcacgactgcatccaatgcagaagaaagtagctggggtacatactgtccaggaatggaaccaccgcctccttctgagtacattacctgcctaggtgatctatatagtgtctcttggatggaagacagtgagactaacaatctgaaggaggaaacaataaaggaacaatatgaagtggtgaagaagcgtacttcagacttcaatagctatggtgcaggctctcacgtcatggaatatggtgacaagaccttcaagggcgagaagctttacctttatcaaggttttgatcctgcaaatgccaatgtcacaaataagctgctttggtcaggccaagaggctgtggtcaaccaaagggatgcagatattctcttcctatggaagaggtatgagctcttacatgagaagtctgaagagaagcaggaagttctgagggagatcaccggaacagtaaggcataggaagcatctggacaacagcatcaacttcatcggaaagcttctcttcggggctgagaaagggccttccacacttgaggccgtcagacctcccggccagccactcgtcgatgattgggactgcttgaagcaaatgtacggtatgaggcatatgagggcgttcgcaaatatatgcaacagtggcacgcctggcgcttcgatgaagcgagcgagcatgggtgcttgtggcggctacaactcggcgagatggagcccgttggctcagggctacagcgcttgatcttctgaaaggttccggggatatggatgtgtatagtcttatctgtgaagtactgtatactgtaaaagttggcctttgtgcctctgtaatgtacgtagcagttgtcttgtatatgtctcggtggtgtgtttctgacttggtatgtttcgccaggtcataataatagacgaaagtggcctgcagcttgcaagccaatccggtgtagtagactagtagtagtagttcacaatcaggcctatgggccatttctaggagaacagagacatgacactagttcggacagcttaaagagcagaagtgcagatgcaggtacgagacgacatgagctgggagttgcgacacgacatacggtcggagtagaacaggttgaatcagagaagacgctggctgcgcagatgagtgttgcgacataggctctgtttggccatgctcctatgcctcctactactcgctacagaccgtggctcccagcttcacgttcatttcacgaacagagggctcccagcttcacattcaccatttcacaaagagagaaaaacaactcacgtaacttacgtgaacggtgctgctacagttactgttgttagaggagccgaagcaagcaaacaacgtggaaagataaaaatgcatgcgtgtagacctgaaacttgggtcggcacgacacgagcccatcatgtcttgggccttaagtcttc

SEQ ID NO: 19237 - DNA, 1446 bp, Zea Mays
agtcagagagcgggccccatgcacgcagccctctttacccccatccgcagcccgcgcttgtgtccttctccgcgagccagtacacgcaccacttccccccttcgatctagccatcccaactccgccgactcgctggaaccctagccagccgccgccatgccgccgcgccgcggtagaaggaaggggaagggcagggcaaagccaagagcgaaggccaccgagcccgagcctgagctagaggaagccgccgattccgagatcgaggcgggggacgcgaaggcggaggagtccggcgaagcgaaagaagatgaatcggcaagcgacgccgagtccatggatgcagatgccaacgaggaagccgtcgagaacggagcggatgagatggatgcggagcctgaagccaaagccgagccggaagcggtagccaccgaggcggaagcgaaacctgacgtctcggatgccgaggatgaagaagccggtgaaacgtgctccgaccgcgaagcagatgccaaggatgttgattcgaaggccaaagcggaggagtccgacggcgaggatgaggagggagccaccgccgagaccgacggcgaggatgaggagggagccaccgccgagaccgacggcgagagtgaagaggaagccgctgagacgggcggcgagaacgaagaagatggtggggactccgacaccgaaggtgatgctgaggaatcccctccaccccctccttcccgcagccgccgccgtaagcgagcggccactcccgatgatgaagcagaggagacccctacaccgtcgcgtcgccggcgccgtcggaagtcgaggcagcgtggtgactctccgccgccacttccggaccacctccgttgccgtcgtagcgacgggaagaagtggcgctgctcgggccgtgcactcccaactgttagcttctgcgaataccactacgcgagggccaacaagggcaagaagctaccagcggatggagagctccttgctgtcgctcttcagaggcagaagaacaagaggaagggcaggaggagaatcaatccgtcgacgtcccctcaggcagccacgagtgaccgccagaccagggatctcccaaacggactgatgacgatcttgccaggtagcagtggacctgcagcactgtcaactcctgttactacaaaagttggtgtagaaatttctgcaccgatgcagcggtgctatcgatccaagaatgctgagccattgcctgttggtcctgtgaaggttgttcctcgtgctatgagtatgacgaaagcagcaccaagaatgtgtcactgctgcggggtaaagaaggcagcgcgtgttgccaattgcaagaactgtgatacgaatttctgtaacagctgcattaataaatggaatacctacaataacctgttttctgtggtggatgcttttgcgtgcgttagaagtgtcgagttg

SEQ ID NO: 19238 - DNA, 2175 bp, Zea Mays
gcgaagcataaactaagctttaagcgttactctaatacaaagtggaatacaaacataaactgaactcttaaaagtcggcagtcggcagatccttgtttgatccaagttaatcttcaagtttatcgtatacattcctcaatgctggcgcgttcggcaccggcgccgacggccacgtgctgccggccgaggccacgcgcgcggcgatgctcgtgcgcatcaacaccctcctccagggctactccggcatccgcttcgagattctggaggccatcgccaagctgctcaacgccaacgtcacgccgtgcctgccgctccggggcaccatcaccgcgtcgggcgacctcgtcccgctctcctacatcgccggcctcatcacgggccgccagaactccgtcgcggtgggccccgacggcaggaaggtgggcgccgccgaggcgttcaggatcgccggcatcgagcacgggttcttcgagctgcagcccaaggagggcctcgccatggtcaacggcaccgccgtgggctccggcctcgcctccaccgtgctcttcgaggccaacgttctcgccgtcatggccgaggtcatctccgcggtgttctgcgaggtcatgaccggcaagcccgagttcaccgaccacctgacgcacaagctgaagcaccaccccggacagatcgaggccgccgctatcatggagcacgtcctggaaggcagctcgtacatgaagctggccaagaagctcggcgagctcgacccgctgatgaagccgaagcaggacagatacgcgctccgcacctccccgcagtggctgggcccgcagatcgaagtgatccgctttgccaccaagtccatcgagcgcgagatcaactccgtcaacgacaacccgctcatcgatgtgtcccgtggcaaggcgctccacggcggcaacttccagggaactcccatcggcgtgtccatggacaacacccgtctcgcgctcgccgccatcggcaagctcatgttcgcgcagttctcggagctggtgaacgactactacaacaacggcctcccgtccaacctgtccggcgggcgcaaccccagcttggactacggcttcaagggcgccgagatcgccatggcctcctactgctcggagctccagttcctgggcaacccggtgaccaaccacgtccagagcgcggagcagcacaaccaggacgtgaactccctgggcctcatctcgtccaggaagaccgccgaggcagtggacatcctgaagctgatgacgtccacgttcctgatcgcgctgtgccaggccatcgacctgcggcacctcgaggagaacgtgaaggccgcggtgaagaactgcgtgacgcaggtggccaagaagtcgctgagcctgaacgcccggggcgggctccacaacgcgcgcttctgcgagaaggacctgcagacggcgatcgaccgcgaggcggtgttcgcgtacgcggacgacccgtgcagccccaactacccgctgatgcagaagctccgcgcggtgctggtcgagcacgcgctggccaacggcgacgccgagcgcgccgcggagacgtccatcttcgccaaggtggccgagttcgagcagcaggtccgcgcggcgctgcccaaggaggtggaggccgcgcgcgcggccgtggagagcggcagccccctggtccccaacaggatcagggagtgccggtcctacccgctgtaccggttcgtgcgcgaggacgtcggcaccgagtacctgaccggcgagaggaccaggtcccccggcgaggagctcaacaaggtgctcgtggccatcaaccagcgcaagcacatcgacccgctgctcgagtgcctcaaggagtggaacggcgcgcccctgccgctctgctgagctcagctgcacgcacctgctccgcacaaagaaggaaaaaacaaaagtatagcggctcaagacagtgtttcaagatcgtttatttacaaccagactagcagaagatgctctctatatctaccgtcgccttgtattattagtagctgaagtaagttcatgtgaatgttgtcgtgttcccgcagctgcgacgccacagcgtgcgacgtgcgcgttcttgtctgtcgcagctgctgaaacttttgatggttttttaacttgtaagctgggaggatgaagtaaattattttgttctacaata

SEQ ID NO: 19239 - DNA, 2596 bp, Zea Mays
gcggatcttcaataatggagacatgataacaaaggcttgtcccggcgttcgcgtggaccaagaagccgttgcacagcggtcaggcatcgatcaaagactggtgccagaagaggggcgtcaagggagagcacgtcgtgtacacggctgagttcatggtggattcagacttcggcgagcctggcgccatcaccgtggccaaccggcaccatcgggagttctttctggaaagcatcgtcgtcgagggtgggctgccgtgtggtccggtgcacttcgcctgcaactcctgggtgcagtccaccagggaactgccgggaaagagggtgttcttcagtaacaagataatctcatgcagccgtacttaccatctgaaacaccacccgggcttagagaactacgggataaggaattgaaggaccttagaggagatggcacaggagtacggaagctatctgacagaatctatgattatgcaacatacaatgatttggggaatccagatcgggggaaagagttcatcaggccaatccttggaggtgacaacatcccttatccacggcgatgccgaactggtcgcccaccaactgatacaaacatgctagctgagagcagagtagagaaacctcacaggatatatgtacctcgggatgaggcgtttgaggagctgaagcaaggtgccttctcatcagggaggctgcgggcagtacttcatacgcttatcccatcgatgattgcaaccatctcagctgagacccacagcttccaaggctttcaccacgttgataatctatacaaggaaggcctcaggctgaagttgggtctccaggagcacctgttccagaaaataccccttgttcagaagattcaggaatcaagtgaggggatgcttcgctatgatacacctagaattctttccaaggacaagtttgcatggctccgtgacgatgagtttgctcgacagactgtggcaggaataaacccagttagcatcaccaggctcacggttttcccaccagtaagcaagatggatcctgcaatctatggcccgccagaatcatcgatcacagaagcgcacatcactggacagctcaatggactcacggtacaacaggcggtggacgaggcaaagctgttcatattggactaccatgatgtatatatgccattcctggaccggatcaatgcaatagaggggcggaaggcgtatgcaacccggacaatcttgtttcttaccaaagctggcacattgaaaccgattgctattgaacttagccttcctccgagcaaggcaggcgagccccggccaagcaaggtccttactcctcccgctgatgctacctccaattggctatggatgcttgccaaagctcatgtcagctccaacgacgccggtgttcaccagctcgttaatcactggctgaggacacatgctgtaatggagccgttcatattggcagcgcatcggcgtatgagcgcaatgcacccagtcttcaagctcctgcacccccacatgcggtacacgctggagatcaatgcgctagcacggcagagcctgatcagcgcggacggtgtcatcgagtcgtgcttcacccctggtcccgtctccttcgagatcagcgctgcatactaccgcgaccactggcggttcgacctagagggcctcccttctgacctcgtccgcaggagagtggccgtggaggatgcgtcgcagcctcatggcatcagactcctcatcgaggactacccttacgcaaacgacgggctcctgctgtggtcggccattcgcagctgggtggagtcgtatgtgcagctctactacccggacgccggcaccgttcagtccgacgacgagctccaagggtggtaccacgaaacggtccacgtcgggcacgccgacatccggcacgcgccctggtggccctcgctctccacgccgggggacctcgcgtccatcctgaccacgctcgtctggctcgcgtcggcgcagcacgcggcgctcaacttcgggcagtacccgctgggcgggtacgtcccgaaccgcccgccgctgatgcgccggctgctaccggacccggagcgcgacgccgccgagtacgcgacgttcatggcggacccgcaccggttcttcctgaacgcgatgcccggggtgctggaggccaccaagttcatggctgtggtggacacgctgtcgacgcactcccccgacgaggagtacctcggcgaggagcgcgacgagccgtggacgggcgacgctgccgccgtggcggcgcacgacatgttcacggccgacgtgcgccgcgccgaggaagccatcgatagtcgaaacgcggaccagcgcaggaagaaccggtgcggcgccggggtgctgccgtacgagctgctggcgcccagctcgccgccgggggtcacgtgccgcggcgtgcctaacagcatctccatatgaatgagtgcatcgttcgttgtttttccacattttttttctacgggtactattatgtattggttttcaagcaaattcgtgcctacgccagcacttgtagagaatacactacgaacatatatcgaaaataccaaatctgccaagaatgaggattgaaca

SEQ ID NO: 19240 - DNA, 2494 bp, Zea Mays
gttggcagtgttgatgtacttcattgctattatgcccatggtgaagagaatgagaacttccaaagacgaacatattggctgcttgaagagggtttcatgaatattgttcttgttcactaccttgaaatcaagggtgccaaacaaagtttcaatcatgctaaagaagctgaagagactgcaggattatctaatgccgatagtcctgcatgctcaaactctttcgctagtcagagccaggtagcctcccgatctatggatgctgaaagcccaattagtggacagatttcggaatatgaagatgctgaaacagataattctcgagcaagctccagataccaccctttcactgagatgcagcagcctgtggatggtaccgtgatgggtaacttctttggcgcttcatctccaagtgtttctgtaaataatctagctgcaggttatcttggtgaaatgcaacctacgggagctaattttaccagtcattttgccactcgcaatgacatagctagtgtgttcaatgatactggctctgagttaggaggtggtcccaaaacttcaattgattcagtactgttgggtgaaccatttccagaatatccaggcggcttcatggagtcgacactctattcttctgttgcaacattgggtaacagtctggaagatggtttgcagacatttatgtctgaggctctctacaccaacaatctcactcaaaaggaagttgatgcacttggtgcagcaggcataacatcctcgaagtatcttaagaatgatgccgtagggcattggagtttacctatttccatgagctggtatgatgtaaccctttattttcagacagagaatgatggttatacagatcaaagtgtcaggtatccacttttaaagcagtcatcatcagacctctttaagatggagccagatggtttgaaaaaattcgacagcttttcaaggtggatgagcaatgagcttccagaggttgttgatttggatatcaagtccagctctgatgctttctggagtactactgaaaccgtgaatgttgctgatggatctagtatacctattaatgagccattggatgtatttgtagtcagcccctcactttcccaagaccagctcttcagtattattgatgtatctccaagctgggcatacaatggcacaaaaaccaaggtcttaattactggtacattcttggcaaaaaaagaagatgtggaaaattgcagctggtcttgtatgtttggagactctgaagtctctgctgaagttttagtggatggctccctgcgttgctatacaccagtacaccattctggacgagtcccattttatgtgacatgttcaaatagagtagcttgtagtgaagtgcgagaatttgagttccgtgattctgagacccattatatggatatctcagataagcatactacaggcataaatgaaatgcatttacgtatccgccttgataagttactttccctggaaccagaagactatgaaaagtatgtcttgagtaatggaaataagtctgagctgatcaacactatcagttcattaatgcttgacaataatttgtctaatctggcattaccatctgatgagaaggaattgtgcactgtacaggatcagaatcttgagaaacaggtgaaagaaaagctatattactggcttatccataagatacatgatgatggaaaaggtccaaatgtcctaggcaaggaaggacaaggtgccattcatttagtagccgcacttggttatgattgggctatcaaaccaatagttgcggcaggagtaaatataaacttcagggatattcgtggatggactgcgcttcactgggctgcatgttgtggaagggagcggacagttggtgccctgatagcaagcggagctgcatctggtgctttaacagatccaacgcagcagtatccatctggaagaactcctgctgatttagcatcagaaaatggtcacaaaggcattgctggttttcttgcagagtctgctttgacaagtcacctctcagctcttacattaaaagagtcgccaagtggcaatgtggaagaaatatgtggattaacagcagctgaaggttttgcagcatcaagttcttcccagcttgcttgtgttaattctcaggaagagtccttaaaagattcacttggtgcagttcgtaaatcaactcaagcagcagccagaatatttcaagcttttagggtggaatcattccacagaaagaaggttattgaatatggagatgatgattgtggattgtctgatgaacgcacactttcacttgtttcccttagaaacccgaaatctggacacggtgattcacattctgctgctgttcgtattcaaaacaagttcagaggatggaaaggaagaaaagagtttatgcttatccggcagaaaattgtgaagatacaggcgaaaatcaaagtatgtggtggtggtggtcgtagttatttgaggcgcacttcttttg

SEQ ID NO: 19241 - DNA, 1171 bp, Zea Mays
cccaatacgccgagagcccccagacatccatcccgaagacccgagtgcacttccgttgccgccgcccgccgggcgatttttaggtcctcgctttccccacgcgtgtggcgtgttccgctcgcgcccgcccggcctcccaccctctccagcgccgccgcctcctcttcccggccgaaggagcaccgccccagccgatcttctctcccccacgccccatcaggccgtttctggctgctcttgggcctccctcgccctccctgacggccccgagctcgccctccatctccgccccagctcgcgccatctcggtgcctcgagctcgtcgtccgcgcttctgtggccactgccgggaagcatgaggaggaggcctgggatcgctggcttgcagaatgcggcggctactcgtgaccaattccggctggtcggggagaatgtggccaaggtgaggaccgatgtcatgaaggagcagcttgcgacgttccggtcacagctcgaggaattcgctcgcaagcataagagtgacatccgtaaaaacccagtattcagacagcagttccatgagatgtgcgcaaaagtcggagtagatccattggcatctaataaaggagtctgggcagaacttctagggattggtgacttctactatgaacttggggttcagatagttgacatatgcattgctaccagatcacataatggtggcttgattgacttactagatctccgcaaactgctcggtcagaagaggaaagctactcttgaatcattatctgaagatgactgtttgcgtgctataagcaagctaaaagtccttggtagtggttttgaagtaatttctgttgggaggagaaagcttgtgcgttcagttcctaccgaattaaataaagaccacagtgggatacttgggctagctcaggctgatggctatgtcacggtggaacaagttgaaaaggaattctcatggtctactgggcgtgcgattgatgctcttgaaactttgctcaaggaggggcttgctatgatcgacgatggccacagggatggcaagcgaagatattggttcccatgcgtcactgtcagctccgacacagcagctgttgaagtcaagtcataacctccagtcccctctggatgcccaatactagtaacatagttgttggggcgaaggcag

SEQ ID NO: 19242 - DNA, 769 bp, Zea Mays
ctacttgatcatgacatttaggcagggagacaagctacggaggcgtggagcatgggagaattggttgcttccaaaactgaactattctgctgggagttcttctggttcgatgacccctgtgacatctaacattgatgctcttgcatctcagtttcgttctgttggacttgagggggcaacgtaccatccaagcatgcctgggatgtctggtgaagctctcctgacaagatcagcaacttcagttagtctaggttaccatgcatcaaccttcggtgggctacagagcaatgggagtgaacctctctttgggccgaagtctgcaagaaatctactcaggagcgataccttttgaggctatatattcaagagaagttaagtacaatggcaggccgagttttcacagtaacggcatgcacaccttatctcaggtgagatgtaaaaacagctgttaaataaaaccaaaaaaggcaaaagcataatacaaaaaaaaagcatacacaaagacaaaaaaatacaaaatgcaaaaacaaaaataaaaagagcataggcagcttttgtgctagtactcctgtcctttgtgttatgtggtatattacctagtaggtttgttttctaatgctaggagtttgatggctcttctgtgtgaaccgagttatttaagtgttatggatggtaccattgggaaactgttgagtggacgacgttatataaaagtacatgaaaacattgttaattatgctgctctctgctgatttgtgccgcatttctt

SEQ ID NO: 19243 - DNA, 391 bp, Zea Mays
ggttcatcaagaattgaactttgaccgataaattaaataaataaataaataatacttacaacaccgaattaactactcttctgtgtttttagagtgtgccatggaccatatggaccaccctcttggtccgccctagctttcccattattatattaagaagatatctaaatactgtctcgaccgagaaaatcctcgaactctgtccccatcactagcgggccgtcactacccactctgcaacgacccaactggaggatggcacgcagaacgtaacccgggagggcataaggaggaatttttttgacaaagacacaaattcgaattctcccccgacgggggatcgaacccgggatctggaggtgctactcggacgccttaaccattacgttag

SEQ ID NO: 19244 - DNA, 2263 bp, Zea Mays
accgtttccgcccgcgtcctcgcctcttctttcttcgcctcttctgcaccgcgctctcgctcgcccctccgccgcttggcctccaccctcccgctgccggctccgccgactggacttccgcccgtcgctggccgtcggcgcgcccgttcctcgcagaatcaaagagataaattgaactgggaggctgggaatcgcgagagaagtgatgtctttcgttaggcaagcagacccatcagcatcctgtgcggagaccacttacatccacaaatttgtgccaccaggatcagttttcccagcacagagatttgtctctggcaccgacttgcttcaccacgggcctcaaccatataatgctgagggctacaagcagtctggtttcaatggcacagcgcctcatgcatttcagagcttttacaatactgatagctatgctgaatctcactttaatgaagcaccatattctcctgcaatcttcgatatatctcagcagaactctcaatctttatcggataaccaggcctctgatcttgtagagttcgatgaggatgagatgagagtaaagcttcaggagcttgagcatgctttactcgacgatggtgatgagatcttttttgacttgtcagggagcattaacgatgagtggaatgataacattaagacaaacaatgaatgggtcaatacaatgaagaatattgtgagccccgactctccaaaagaggcatcacctgagtcaagcatctgctgtcttgacaacaatgttggagaagcacggaacccgaaacagttgctttttgactgcgcagaagcgatatccgaaaatagcatcgatgaagcacagtcaatcatagcagaactacggcagaaggtggcaattcaaggagacccttctcagagacttgcggcctatctcgtggagggccttgctgccacactacagtcttcaggaaagggcatctacagggccctgaggtgcaaggaggcccctactttgtaccagctttcagccatgcagatcctctttgaaatctgcccatgcttcaggctaggcttcatggctgctaactatgctattctcgaagcctgcaaaggcgaagatgtcgtgcacatcattgactttgacatcaaccagggtagccagtacataactcttatccagttcctaaagaataacagtaacaagccacgccttttgaggataactggtgtcgatgatccagagtcagtgcacagagctgttggaggactgaatgttgttgggcagcgactagagaagcttgcagaggactgtgaggtacggtttgagttcagggcagtggctgctaacattgaagatttgactgctggaatgctaggtcgccgtcccggagaggccctcattgttaactttgcattcctgctgcaccaccttcctgatgaaagtgtctcaattatgaaccaaagggatcggcttctccgtatggtgaagggtctccgaccaaaactagtgacgttggtggagcaggacgcaaatactaacactaccccattcccttccaggttccgggaggtctatgactactattcggcactttttgattcactggatgccacccttccaagggaaagcccagatagaatgaacgtggagcgccagtgcctcgcacgggaaatcgtcaacatcttagcttgtgaaggccctgaccgtgtggaaaggtatgaagtggctgggaaatggagagctaggatggcaatggcgggctttgtgccgtccccatttaacagcggcgcggttgatggcataagatctctactgaaatcgtactgcgataagtacaggttcgagaaggtccaggacggcctccactttggctggggcgacaagacgctcgtcttctcttcggcgtggcaatagaagcttgcttgtagtattgccgatctgagcactttccagcgttttaggagcatctggtgcaagggctgtaaagagatttctgtcgccgtattgttgaagtacactcgtagctaaccttagcgtgttgcctgcctgtaggcttgtgaggtctacggtttacctagtttcttagatgaagtatgttgtgcattgtacacctactgaactacatgtagactgtagagtcgcgggtgtatttaattttgcccttcttttggaggggcagaatcacaatatgtcgacattgtttcgtgtataaagtactggatgatgatgatgctcttttgtactggtcatgagatgggataaaataacaaaaaaaatcgccaatcc

SEQ ID NO: 19245 - DNA, 3954 bp, Zea Mays
  misc_feature (3953)..(3954): n is a, c, g, or t
tgcctcgtccccacccttctcgctccgccccccgccccccgctcctcgctccaactcccacccacccaccaaagcgtcgccggccgacgcgtgcgaatccccaggacgggatcgataccccgcttgatcgccggactctctgcctcggtcctcctcttcgcacctctctctgcctgtgaatccagctgcaggtccaattcgcaacgcggcgtaggaatcccatcctagattcggtcgagctgcaatgccggcgtccgcatagctggaaatcgggcgctgacggacaccgggcgccgagatgggccgttccggccgccgccggcgggaccgcgtgcggtggagcaatctctacaccttctcctgcttccgtgcccagcaagagcacgccggcgatgcgggcccctcctccgatggggctggcgccgtcggcgggccgggcttctcgcgcgtcgtgtactgcaacaacgccgccctgcagaagccgctcaagtacatcaccaactacatcaccaccaccaagtacaacatcatcaccttcttccccaaggccatcttcgagcagttccgacgcgttgccaacctctacttcctcctcaccgccatcctctcgctcaccccagtgtgccccttctctcccgtcagcatgattgctccgctggcctttgttgttggcctcagcatgatgaaggaggggttggaggactggcgccgcttcatccaggacatgaaggtgaacaaccgctatgtcagcacgcacaagggtgatggcgaattcgactaccggcactgggaggacctttgtgtcggtgatgtggtcagagttgagaaggaccagttcttccctgctgatttactgctactgtcctcgagctatgaggatggtatttgctatgttgagacaatgaacctcgatggtgagacgaaccttaaggtgaagaggtcacttgaggtaacgctgccgctggaagaagacgagtcatttaaggatttccaggcagtgatacgctgcgaggatcccaacccgtccttgtacacatttactggtaactttgagtatgagaggcaggtgtacgcccttgatccgtctcagatacttctgagggactcaaaactaaggaatacagcctttatctatggagtggttatcttcactggccatgacagtaaagtcatgcagaactcaactgagtcgccatcaaagaggagcaggattgagaagaagatggatttgatcatatacatcctgtttactgtgcttgtgttgatatcgctcattagttcaattggattcgccgtgaggatcaagttagatttgccccgctggtggtacttgcagccagagaaaagcaataaattagatgatccatcacgcccagctctttctgggatattccatctaatcacagctctcattctttatgggtatctgattccaatctcgctgtatgtctcgattgaacttgtgaaggtattgcaagcacatttcattaaccaggacattcatatgtttgatgaggacactggcaatactgctcaggcacgtacatcaaatttgaatgaggaacttggccaggttcatactatcttatcggataaaactggcactctgacctgcaatcaaatggatttcctgaagtgttcaattgctggagtatcatatggcgtgggttcaagtgaagttgaacgtgctgctgcaaagcatatggcatcaggtgctgatgaccatgatatccctttacaagatatatgggaggagaacaatgatgatgaaatcgagttggtaggagtcaactttagtgttgggaccaacataaagccctccataaaaggcttcagttttgtggatgaccgtctcatgcaagggaactggaccaaggagccaaattcttccacaattctactcttcttcaggatacttgctctgtgtcacacagcgataccagagataaatgaagcaactggttctattgcctatgaagcagaatcacctgatgagggggcttttcttgtggcagccagggaatttggatttgaatttttcaagcgaacacaatcaagtgtctttgtcagggagaaacacacttcttcgaaagacacagttgagagggagttcaagattctcaatctattggaattcagtagcaaaagaaaacgaatgactgtaattctgcaggatgaagatggtcaaattcttcttttttgcaaaggagcagacagcatcatatttgatagactggcaaaaaatggaaggatgtatgaagttgatacgactaggcatctgaatgattatggtgaggcaggcttgcgaacattggcactatcatacagggtgcttgatgaatcagaatattctttgtggaatgcggagtttcttaaagcaaagacatatattggtcctgatagagagttgcaacttgaacgagtctctgagttgattgaaagagagctgatccttgttggtgcaactgctgtagaggacaaattacaaaagggggttcctcagtgcatagatcggttggcgcaagcaggtctcaaaatctgggttctgacaggtgataagatggaaactgcaattaacatcggatatgcatgcagtttactgaggcaaggcatgaaacaaatatgtttgtccatacccactggtgagcaggtagctcaggatgcaaagaaggttgcaaaggagagtctcctgtcgcaaatcgccaatgggtcacaaatggtcaaactcgagaaggatccagatgcagcatttgctctagttattgatggaaaagctctggcatttgctttggaggatgacatgaagcatatgttcttgaacctggcaatcgagtgtgcttctgtcatatgttgtcgtgtgtctccaaagcagaaagcactggtgactcggctcgttaaagaaggtataggacaaaccactttagcagtaggtgatggtgcaaacgatgtgggcatgattcaagaagctgatattggagttggaataagcggggtagagggcatgcaggcggtgatggctagtgatttttctatttctcaatttcggtttcttgagcgacttcttgtcgttcatggacattggtgctacaagagaatcgcccaaatgatttgctacttcttttataagaatatcgcatttgggcttacaatattttactttgaagcattcgctgggttttctggtcaatctgtatacgatgattggtttatgctgcttttcaatgttgttcttacctcacttcctgttatatcactcggagtatttgagcaagacgtttcatccgaaatctgcttacagttcccagcattataccagcaagggccaaagaatcttttctttgattggtaccggatccttggatggatggggaatggcctctactcctctctggccatattcttcctcaatctctgcatattctatgatcaggcaatccgtgttggggggcagactgcagacattgctgcggtgggaactaccatgttcacctgcatcatctgggctgtcaacatgcagattgccctaacaatgagccatttcacatggattcaacatctctttgtatggggcagcataacaacttggtatctcttcatcctcgcctatgggatgacattgaggtctggcgacaactaccagatcctattagaagtccttgggccagctcccatatactgggcagcgacgcttctggtgactgctgcctgcaacatcccctacctgatacacatatcctaccagagatcgtgcaatccacttgatcaccatgtgattcaagagatcaagtacctaaagaaagatgttgaagaccagacgatgtggaagagggagcggtcgaaggccaggcagaagacaaagattggtttcactgcgagggttgatgcaaagatcaagcagatcagggggaaattgcataagaaaggcccatctttaacaatccagacggtatcgnn

SEQ ID NO: 19246 - DNA, 722 bp, Zea Mays
gaacatcttacagagtgaagctctggctttttgtggcatatgtcgtttcttttgtctgtttagctggatccgtgggtttattggtgcaagatgcactgacgaacaagggcccttctgtctggactggtgttgctggcgttctgcaatgtgttcttgtgttgataagcggcctggtgtattggacatgccactcagaagattaagggcgtaatgtcatgagcagacttgcaaggttggtcacagttgtgtgaaggaaattatttctggcaacatatgattttgtgtgatggaaatgacggacactgttcactgctgaatgggatgactagatgtttcatctgtgcatatctgacttttggaaaatgatgtttcttaacaccggtgcatgtgttagccccagcttcttgtgagttgccaatctgtgatgcggtcgtgatcatgcaaatcttttggctaaagctgaaaccggctgcagcaacaagctagtgctactatttacaccatgcctcctagtcaattacagttgacttcatttaagtcgagacgctgtctcggcctgtttcatcgttactccaccgtcccacatatatgaccgtaaccactttttgttttagttccataatataagaagtgttcttcctagacatgcatacatggatacatgagtggttacgccatcgaagctagtgttgaaaacaccattgcttcaagttgagaacgcc

SEQ ID NO: 19247 - DNA, 3020 bp, Zea Mays
aagagctctcgatctagggattcccttcccgggtctcgttgctctcctcgtccaaatccccaggccagcctagcggcgcagcctgcacgcccccgccccccggaccatggccgaagaccacctctcctccgcgccgtccgccccatcggcggcggcggccgcggccgcggcggcggtcgggtcctcggtgatcccaatcgtcaacaagctgcaggacatcttcgcgcagctggggagcagctccacgatcgacctgccgcaggtggccgtggtcgggagccagagcagcggcaagtccagcgtcctcgaggcgctcgtcggccgcgacttcctcccgcggggctccgacatctgcacgcgccgccccctcgtgctccagctcgtgcaccagccgcgccgccccgccgacgcagaggccgatgagtggggcgagttcctgcacctctcggggcgtcgcttctacgacttccgcgaaatccgacgcgagatccaggctgaaacagatcgtgaggcaggtggtaacaaaggtgtatcggataggcagatacggttgaagatcttttctccgaatgtccttaacattactttagtcgatttgcctggaatcactaaggtgccagttggtgaccagccaactgatattgaagccagaataaggactatgataatgtcatacatcaggcacaagacatgcatcatcttagctgtttcgccagcaaatgcagatttagcaaactctgatgctcttcaaatggctcgggttgctgatcctgatggttctcgaacaattggtgttatcacaaagttggacataatggacaggggcactgatgcccggaactttctgctgggaaatgtgatccccttaaagcttggctatgttggtgtcgtcaaccgcagccagcaggatatcaactctgacctcagtatcaaggatgctctggctcgtgaagaaaaattcttccgtactcagccagcatatcatggtattgctcagtactgtgggataccacaattagcaaagaagctaaaccagatcctggtccaacatataaaaacagttttgccggggcttaagtcacgcataagcagtcagttgactgctgttgctaaggagcttgctgtgtatggtgatcctgttgattcaaaggctggccaaggtgctaagcttttgaacatactagctaaatactgtgaagctttctcctcaatggtggaaggaaaaaatgaagatatatcgacaattgaactctctggtggagcaaggatccattacattttccagtctatctttgtcaaaagtttagaggaggttgatccttgtgaggatgttacagatgaagatatccgcatggctattcaaaatgcaactggtcctagaagtgctctgtttgtacctgaagttccatttgaagtccttgtacgtaggcagatcagcagattgcttgatccaagtcttcagtgtgcacaattcatatatgatgaacttgtaaagatgagccatcgctgccttgcaatggagttgcagcagtttcctatactccgcagaagcatggatgaagtcattgggaagtttttgcgggatggacttaagccagcagaaaatatgatagcacacattattgagatggaggaagattacataaacacgtcacacccaaattttattggtggcagcaaggctgttgagcaagcacagcagcaagttaggtctgccaaaatgtcagcagcggtggtaagaaaggacggagtggatgcacaggcttctgagaaaactcaaaaatcacgcgcgatcttgggtagaagtggtgtaaatggagtagttactgaccacatccagggggtacggcctgctgctgaggcagagagaccaggatcttctgtggaagcacatctttctggaatcaaatatttacttccaatgaggaccgaacacatcctcctgcaagagataacacaacaaacaaatcttatgctgtgcctgcacccaatctggaacattcattctccacgatacagttaagagagccaccagtcgtcctgaagccttcagaacaccagtctgagcaggaggcgcttgaaatagcgatcacaaagttgctattgaagtcatattacaatattgtcaggaaaaatgtggaggacttaataccaaaagcagttatgcatttcttggttaatcatacaaaaagggcgctgcataattaccttataacaaaactttatagagatgatcttttggaagacttgctcaaagaacctgatgagataaccataaagaggaagcagatacgtgaaaatctcaaggtccttcaacaagcttacaaaactttggacgagataccacttgacgcagaggcagtagagaggggtggatactccctggattctgatgcgattggtctgccaagggcccatgggctttcttcatccctccacggattcaacgatggaagctcaccatattcaaccccgaagcagtcaaggtcaaggaggtcaaaccattctggcgagcagcttcctttcaaccccaatatgagtggcaatggtttttgatgccaccctcctacgttacaagacggccaaccagattggttatggaaccaaccaaatgtgcagcaagcacaccttattcaagtttgttggcaccaatagatatatgttatttctagttaaattctttgtagcgctgcgccgatgaagcctaacatggtgcgagttttgttgtttcgccttttgtacagtatatatctttgcccagtcatttcgtcatgatatgatatcaagtgatgggtatagttttgttcggacccagggaaagcaatgggaaaaaaatctactaggtgtgtagcagtacccagcgtctgagtgactgttacggatttgccttgcaaaatagacatggctggtatggcggcggcaaaaacaaaatgtggcataaaattgatctcgttttcttaatgttttcatttgatttgatagccctttgttaataattatgcatttgtaaatcagcatta

SEQ ID NO: 19248 - DNA, 769 bp, Zea Mays
ggcggagtcgcggaaaccacaaccgcacgattcgtacaacgtccaaaccgagtttcctctcatacaatataatggtgtcaaagcctgtagtgcttgtcttcctgttggtggtactcataatcacatcccagtttgaatggaagcaacagcttgtaaacgagttggaatctacggctcgcaaccagaaacatgtttcaagtagagaagagcttgtcaaggatcagataatcttcactcaagaaaagatgattcaaagattgaataattttgtccgaaatcttcagcaacagttggtgcagtgtcgtggcaacaacaggacagttaatcgttctggaacttctttgacatcttatattagtgagatccagatgccgcagatgatggatgactgacaatgtcgcgcggcatgaactatacggataaaaagataggatattcacagagtcatgtggacagcgaagttctcccagtaaaagcagtcataatgtagtattagcctggacagaacaatattcgatcagttccagagagaaaggaacgctgatcctttgaaaacccgtgtaattttatttcccttttcctctttttcccccctaagagaactgaaaattctttgttttatgataggcatctatatatacttattatcctctacagatattgtgatatgaaggtgttttagaagtgtaaattgctctttaatgcgtgctctggcacaatagcactgaaacctcttcagtgaggagaggactctgcctttacatattac

SEQ ID NO: 19249 - DNA, 1884 bp, Zea Mays
attttttttaaaaaagcgacagcgaggccgatgatggggaaagcagcgacgaggaaggcgaggaggattcggagtcggaggctgaggctgaggctgagcaattgggcgcggatcggagcgaggttgcctgcaacaaaattgctggtcttctaagcagtgggaggagtctggagggtttaaagttggcggagtacaaggtgtatttaaagaagaatggtcttagccaaactgggggcatggacacttgtgtagacagaatagtactccattggaggttcaaagatgcggatccaaggagaatttatcctcggtcatccttttgtatcaactgtaaaggtgatgtttgtaggggcgatgccgttctattcaaacagaaggtgtacgagaagagtggaaaaaggcatgcaaaatgtataggtaatcgtatagtagccggcaaagtcatcaaggaaagttatggtaaacaaaaacagcaacacactttcacgattcaagtgttttggagcaaaggacctgggaaattaccacctttgcatctgttgcttgtcaaagggcgcaacctatacagaatgatgacttttcgtcagccttgggcaaatgaagcagaaaggctgaagattctagaagagaagcacaacagaggggatgatgcaaggcgtgttcgtgcattgaatagacctaattctgctggaaacactcttaaaggcaagaaaaaattgcacaaggaaaagcacaagtctcgatctgaaagacctcaccgccaatctaatatcaccgaactggataaaggcaaaaaacgacctgcacaatcctccaagtccgatctgcctaataaaagatctaagaaagaagggtcccaagttccttctaggaaaaaggatactggtggtaggatggcaaagaaaaatggtccctgccaagataagagcatttgtactggccagaacagctctctatgcaaagacaatagggagaagcacagtcatgctacctttcagaaaaagtgtcacgctgaacctctcaacaacggtccatctggttctgggtggaacagaactgctggcggacacagccaattcgaaggaagacacataactccagcttctcacgtcgaggcaaatcatggaaattttgtttctgtacagcatccttgcgtcgagaggcttcaacggcctactcaatcgcgtgaagttgctctggctcaccccggcggcggccatccatacgtactgtccagcgctgcaatgggcctccgacatcaaaatggagcaacggccggtgtgcacgcaccggcatatttcaggggacttccactcagtcaacagagggcagcatttccttcggccagcacgccgcaaactgggtaccatcctcatccagaagaattatttgttgcgccacacttcagatatcctagagggagtgctggtttccgccgataagacagtctggttggcgcctgctgcattttggtaactgcattggtggtaagacatgcggtcttcggcttattttcattgatgccatttcgttgccatgactcatgagcaaggagtatttgagtcttacctaatgtgcagagaggccagaactttgtttcatcttgagataaagcttccttcgtatataagaaaaaggaagatcctcacctcaattgaaggacttgattttctttgctttttttggggggcaggatgtgatggaaaaacagtgttaccatcgagtcgcataatcagggctctgcgtgcttcagacgggggaagggtttaatacaaacatgaatgctgcttttttttgtcgatctgagtccttagctgcaagattgacgcgagacatcggcttccaatatatgtacaccaatggtttctggaatttgagctagta

SEQ ID NO: 19250 - DNA, 147 bp, Zea Mays
tgggcgtcggggtgggggtttggggaggggagacgagagagcactcagagcagcgtgggaacttccgaaagattggtggtgatgccttgatgccggtggccggtggggactggggaggctgcggaaggacgacaagcaaagcgcgcg

SEQ ID NO: 19251 - DNA, 1057 bp, Zea Mays
ctttttgactcctcgtctcttctccgttctgccatctcactatccgtctctgcttagcggcgaagccagagaaacgggagtaaattaggaaaacccgctgtgcgaatcgaacatctcgaaagcgatttactgctgcgtgcgtttcggccgctgatcccgaacacttcctggcttcgtgaggataagttcagggccagccagagttttagatgaagacttgatttctcctctcagataatagagtgtttcaaaatgactgatcaggagcgagatgatgttcccatgttgctaagaaatgttgagctaccaagatttcctctaagaagtacttcaatgtgtataccagtcagggatgatgattatgaagaagacacctttgtgccccatactggtcctctattcgtccagccatcaactcagacggcaccgggaatttcatttacaggtagagacacacctgataggcttcctaaaccttcacagggaaaacaagtcagcaagccacatgcaatcatgccagaagaaataagaggaaataagtggtcttacagtgggcaggttccaaagaatgaacacttgatgatgtctgggcctttggggcaatgtgataatcccgactgtgtgaattgccctcctgcttgtaaaaacagaagacattttcagagaggttcaaatgctttagacaataagatccataatattctttatggtcacagtcgtggatggaagaagaagattgagcaaatcatggcatgcattccgattatgaacccacatgcaaagcctgttcagcggtggaatcaattctttgtcatatcatgcctgattgccattttcattgatcccctgttcttcttcttactatcagtacgacaggatggcaactgcatagtgttaaattgggaaattgctacagcgcttgctgttgtgagaagtgtgactgatgctatttatttcctccacatgttgcttcagttcagattggcttatgttgcaccagagtcacgagtggtgggagctggagacttggttgatgagccaaaaaaagttgctatcc

SEQ ID NO: 19252 - DNA, 1728 bp, Zea Mays
agttgatagagttgcgaaatggcggggaacagatggctggagtggctaaggcaggagatgttgtcggagaaattggggttctttgctataggccccaactattcacagttcgaacaaaatcattatgccagcttctgcgtatgaatcgcactgcctttctcagccttgttcaatccaatgttgcagatggaacaataataatgaacaaccttatgcagagttttgacatagaaaagttactaaaacagcagaaagacaacagtgtaatggtgggtgttcttaaggagattgagaacatgctagcgcggggtcgtctggacttgccaattaccctctgttttgcggtaaataaaggagacgatttaatgttacatcaacttctgaagcgtggtttggatccaaatgaatcagataacaatgggcatacagcactgcatatagctgcttccaaaggagacgaacaatgtgtcaagcttcttctagactacggagctgatccaaatgctagagactctgaaggaaaagtgcctctatgggaggctttatgtgaaaagcacaatgcagtgatagagctgttagtagagagtggtgcagagctatcatctggagacacggccttgtatgcttgcatcgctgttgaggaaaatgatgctgagctgcttgagaacgttatccgttatggtggcaacataaacaacccaacgaaagacggaaccacaccgctgcatcgtgcggtctgtgatggaaatgttcagatggttgagttgttgctggaacacggagctgacgtcgacaagcaggacagtaatggctggtcgccaagagatctagctgatcagcaaggccatgatgacattcaggctctcttcaaatcacgaaaagcacacaggaagcatgcctcaaatggcagagtggcacctatgctgatagggagattcaacagtgagccctcgatgccagatatgagccatgaaaacgccagagtacgcagcgaagttgttccgcagaagctcctccgaaagagggtgagtttccagaattctcttttcggcgtcatctcttcgtcccacgcccaccaggacaccggccgtctgctctcgaaaggcctcgctggaacagagggtccaaattgccgtcacgactccctcatcagggtgacaatcagctgccccgagaagggggggaacgccgcagggaagctcgtgcgcctaccgcggtcgatggccgagcttctcgaactaggtgcaaagaagttcggcatcaagcctggcaaggtcctgacagttgggggtgctgagattgatgaggtggagcttatcagagacggtgatcatattcttctcgtcagtgatgaatgggtgccagatgttgagcaaattaggccttaacaataagtgagccagctgtggtgctcttattgcaatttgacatgatatggggaaacatgcccctgtgaccctgtgtgcatcagtgcatgtcccccatttaaactgaagtgtagcttatgatggttttgaagctgtaggatgtatccagcttggaaatgaatttgtagtcagctggtctgtatgtagtttcgtcatctctttccatgggaagggattcacaaaatgtaattacatgatttcttttttttcctgtctttagatcaagctttctctggaagtgagaaatattcgtgagtcatgaattttgagatattgatcctatcagttcattttagttgct

SEQ ID NO: 19253 - DNA, 2594 bp, Zea Mays
gatctattttacctgaacttttgaatactggggatgctttggagagataccaacaggttgcccaaaagctggaagccttgattgctaatgatggcaaagatgtggaaattcaggtgtgttagccgtgatgaggctgcattagcagtagcacaaaaggttttcaagagtttgtacgataacacatcaaataccacttatgtctcctggcttctagcaaccttagttgcaatacgagatgtctgcaagcttgttgtcaaagagttaacaagttgggtaatatattcagatgaagagaagaagtttaacattgatatcatttttggccttattcgttcggagttgctgaatattggggagtacaatgttcatttggcaaagttaattgatgggggaagaaataaggttgcaacggagtttgcaatgtcccttgtccaagcattgtttgctcatgatcctgttggcttcacagagtttcagaatgttcttgatgcactatcgaagcatacaaagagaccaggttcacctgaatcgttgcaacaattgattgaaatcgcaaggaataatgtgagcaccactactggttttgttgctgtgaaggatgaaaaggtcaaactgccgaaggataaaaaggttttagctacccgggcaaacaaggaggaaaacactgctaatgaaattacactagttgatccaaatcaggtggcagtcctgttttctgaatggtgtcagatgtgtaatcatgtaagtgctagtgatgcggcatacactcgttttgtcacacagttgcagcaagatggtctgctgaagggggatgatatctctgaacgcttcttccgtattctcacggaacttgctgttacacactctctagtctccgagcagatcgttgctcctggtggatcatctcagcaatcaccacagcaacctcacatttcatatttctccattgattcatatgcaaagcttgtggttatggttctcaagtactcagtggagataacaccaaataaagccagtatactttccaagatcctatctgttacagtgaggtccattcagaaagatgctgaggaaaagaaagcttcatttaatcctcgaccatacttccgattgtttataaattggctctatgatcttactactaccgatggtcaccatgatagttctaattttcaggttttgactgcatttgcaaatgcattccacatgctacaacccttgagagttcctgcctggagctttgcttggcttgagctggtgagtcacaggagcttcatgccaaaactgctgatgtgcaattcacagaaaggttggccattttttcagcgactgcttgttgctcttctcaagttcatggaaccatatctgagaaatgctgaactcccagaggcgatggaccttttatacaagggaactatgcgagttctgcttgtactactgcatgactttcctgaatttctttgtgattatcacttcagtttctgcgatgtgattccttcaagttgcattcaaatgcgcaatgtcattcttagtgcttttccacgtaacatgagactgccagacccttctacccctaatctaaagattgatttgttggctgaaatttcaatagcaccacgaatcatgtcggatgttgatggtgcccttaaatcaaagcagttgaagactgaggttgatgaatatctcaagaggccggaaggctcttcctttttaagtgacctgaaccaaaaattgctgctgcctcagaatgaagcaagtgttgctgggacacgctacaacgtgcctctgatcaattcacttgttttttatgttggcatccaagctgtgcaacaactgcaactgaacaaggctaatccgtctgcatcagtacagcagattaaccatatatctccgatggacattttccagattggaacagctaccgatatattcaggagtcttataacaagtttggatacagagggccgctaccttctgttgaatgcaatcgctaaccaactgcgctatccaaatagccatacacactactactccttcatcactctgtatctattttccgaggctacccaggaaattacccaggagcaaatcacaagggttcttctggagcgtctcatagtgaaccgcccccatccttgggggttacttattactttcattgaattgataaagaatccgcgttacaacttttggagccggtcttttacacactgtgcacctgagatagagaaactgttcgagtcggtggcaaggtcatgtggcgcaaaagttgtggacgaaggaatcagcgtgcaggatggcagccactaaagccatctgctttgttcaagtgttgtttttgtgctatttcttctctggcactggaaattttctgtgcttgtacagatcgtctgtatagtaaagctgttagtcacacgtgtcggtgcactgccaaaccttagcaggtgcctgggagaatgcttttgtttgtatgaattttagtcagcaatatggatggtttgcaatatcgctcgctgctacttcgcgccagtacaacagatccaggtttcattgaagaaaatgcctcatccataactgtaacctaactctctctc

SEQ ID NO: 19254 - DNA, 2724 bp, Zea Mays
cccaccttctccgaccgccccctccgctgtccgctcctgttccgtcgtttcgtcgactaacctccaaagttttttcctctccacaactcggcaactacggagctgcctccatctcatttgcttaccatccctaccgcctggctcagatctcgatgcggcgcaagcttcccggcgacgcgccgctgtcggcggcggggcctggtcatgcgttgtccgcatccgcgccgtccgaggtggacctcgctcagctctccgccgccatcgcggccggggaggaccttggccccttcgtgcgccgggccttcgcgtgcggccgccccgagccgctgctcgcctcgctccgcggcgcggcgcgggaccgcgaggcggagatcgaggagctctgccgcgcacacttccacgattttatccgcgccgtcgacgacctccggtccctccttgccgacgccgacgcgctcaagggctccctctcggcgtcccactccgcgcttctctcctcggcggccccgttgctcgcctcgcttgaatccttcctcgccgcgcgctcgctcgcggggaatctctcctccgcgctagcctcctcccgacgctgcgtacggctgctcgcgctcgcggcgcgggcgaacgcgcacttacaggccggcaatcatgggctctacctcgccctgcgcgccgtcgacgccatcgaccgtgatctcgcctcgggacccgagcctctgccgctacccacgctccgccgcatgctgctcagcgtcgtccctgcggtgcgtgcgcatgccgagcgcgagatctcccgggagttctcagactggatggttagcattcgcgctgcttcgaggcacctcggccaggtggccatcagccggtcggctgccgcgaggcagcgccaggaggagctccgctccaagcaccgcccgctggaggagtgcatcaccttggatgacgatggtgttggtgacctcgacgattttgcggcagccgcggcaacagctgaagcagcagatggtgccgctgcagcctcttttgaccttacgccgctctatcgagcgatgcatatacaccagacgctggcgctagattgctgggttctttattgttgaagaccgggtgtttagaacagggggtgggctcacatctcggccagatgtagatgcactttgggatgccgctgtggggaagatggtctctgtcatggaagataacttctccaggatgcagacagcaaaccacttgcttctcatcactgattatgctgctttgctttctgccacaatgcggcggtatggttatccagtagggatgctactcgatgtgctggctaagcacagggacaagtaccatgatttgctgcttgcagattgccgtaggcaggtggctgaggcactgacagcagataagtttgatcagatgctcatgagaaaggagtatgagtactcaatgaatgtccttgcatttggaattcagagctcagacattaccccagctttcccatatgttgcaccgttttcatgcaccgtcccagacatttgccgtattgttcgttcgttcattgaagattctgtgagcttcatggcacatgggggaggtggggatacctatgcagcagtgaagaagtaccttggtcggatcctatctgaggtggtggatgcttcgattaaaaaacttttggattcaggcagtggtctaagtgtgtcccaggcaatgcaggttgctgctaacatgtctgtgatggagcgggcatgcgagttctttacacgccatgctgcacaactgtgtggtgtgccgctgcgtgctgtggagcgtggtcggcgggacttcccacttcgcaggtcacgtgatgctgcggaggcgctcctgctgcggcttctgcgtgccaaggttgatgagtttatgagacaatctgatggtatcaactggatggctgatgactctcctcctggcggcaatgagtatgcgaatgaggtcatcatctaccttgagacgctcacatcaacggcacagcagatccttccccttcctgtgctacaccgtgtacttgtggcagtgcttgcccacatctctgaaaggatcatcgagctcttcttgaacgattcagtaaagcggttcaatgccaatgcggtcactggtatagatactgatctcaaaatgtttgagacgtttgcagagggcatgtctagcctgtttgtggactcaggtcaagaatctgcaaaaaatgaaatgaaggctgcactagtggaagcaaggcagctagtgaatcttcttatgagcaatagtccagagaatttcctaaatccagtgatccgtgagaagagctataacaagctagattatagaaaggttgcaatcatctcagagaagtttagagatacctcagagagttatttctcaacatttgggacaaggggtgccaggcagaacccaaagaagaaatctctggataccctgatcaagaggctcagagaagccagttagatatcctcccagctgttgaccggtaaattactggattgtgggaaccataaagatgacaatgtcttttcaaccctttagctcactgttggctatcttttacaatttctgaaagataattgaacatgttagaatgtattgtgtgagttcttgttagggttatgtatagaccccttttgtattgggccttggcccacctaactctattattaatttatcaccaaccctagttagtgttagggtttcagtttttcc

SEQ ID NO: 19255 - DNA, 1903 bp, Zea Mays
gtgtcccgcctctcgcggtcccgccccgttttctccaaggcagccgctagaaataccaccacgcggacgcgttcgcacgagccgcatcgcatccatactccactgcatctgccatcttggggaactctttggcctctggaaccggcctgcccagccgctcgatcgacgttcggcgaggaggctgatccggtctgttggatcggaggcgcggcgatgggggcgctgtcgcggccggaggaggtgctggcgctggtaaagctgcgggtggcggcggggcagatcaagcgccagatcccgcccgaggagcactgggccttcgcctactccatgctccagaaggtgtcccgtagcttcgctctcgtcatccagcagctcggacccgaactccgcaatgccgtgtgcatcttctacctcgtgctccgtgccctcgacaccgttgaggacgacactagcatcccgaccgaggtgaaggtgcccatcctccaggaattctaccggcacatctacaaccgcgactggcattattcgtgtggaacaaatcactacaaaatgctaatggataagtttcgccacgtatccactgccttcctggagcttggtgaaggttaccaaaaggcaatagaagaagtcactaggcgaatgggtgcaggaatggcaaaatttatatgcaaagaggttgaaactgttgatgactatgacgagtattgtcactatgtagctgggctagttggttatggactttccaggctcttctatgctgctgggacggaagatctggctctagattcactgtcaaattcaatgggcctatttttacagaaaactaacataattagggactatttggaggacataaatgagataccaaagtcccgcatgttctggcctcgagagatatggagtaaatatgcagataaacttgaggacttcaaatatgaggagaactccaaaaaagcagtacaatgcttgaacaatatggtgactgatgcactgattcatgctgaagagtgccttcagtacatgtcagccttgaaggatcctgccattttccgtttttgtgcaataccccagataatggcaattggaacatgtgctctttgctacaataacgtgcatgtcttcagaggagttgtgaagatgagacgtggtctcacggcacgaataattgacgagacaaactcaatgacagatgtctatactgctttctatgagttttcttcattgatagagtcaaagattgatgacagtgatccaaatgctgctctaacacagagacgtgtggattcaataaagcaaacttgcaagtcatctggtttggtaaagcaaagggggtaccatttggagaagtcaccttacaggcctatgctgatcatgattgtcctcctgctggtagctattcttttcggggtaatgttctagctggccctttcttttccgcgatggagacttgagagaaactatgccaatcagatcctttttgtactgtgtattctccaaaggctgcagcaaattcggaagtactgactgtagatcgatacggctgcatgctactgtttccatgactccgttgatgctctcaattcgtttgttcattttattttctcgcgctttgtattgtttgaagctgttttaaggcagaaaatactatcgtgacatgtatgatgtatcctacgaacatgtgtctcagtttagttagcaatggctgcactgtagttattctatgtgttgtcttgttttcatatctgatatgtttgtgtttatcataactgtgtactctcccatggcgctaattatattcaatattatatgtatgtttagctaaattttaaaacatctaatgataatagttatgtactaagtgcttgtttggtttctttagtacagagactaaagtttacttcct

SEQ ID NO: 19256 - DNA, 1213 bp, Zea Mays
atggcctgcgtggtgacagtgaggtatgaggcggagctgacgttgatgcaaaattcatgtgatcaacttgctattgggaaggaaacaacacgtcgtttgggaatgggtactaaatgtaaggatgagtcacttgcttcattgccaattgatgaattgaccgagaaggctgatggctttgctagagtctttccagcttggttttatgcttcttgcgctgatatggaagtttgacttcccaacatttaccgtccagatcattgccatcctcaatgacgtacaagcagcatattaggtaaactaacaacatcaacctggcgacatgaataagtaccattgtggctatctcgaaggacatagtaaaaccacctgcacaacctgacagttggaagttatttggtcgtgatgactgtcattttttcttctgggctacgtacaagactgacttcttctcggtatgggccagtggctggtttagcattatttaaagttttgagaaatcatcgtagtgtgcccatccttttcatggttgctaatatacagaaattgttccatgtcgaaagccttgagaaaatttcccagggtgattttcatacgctttcctctgccatgtaccttcaagtcagcacaatcaatcagggcccttaacttacacggtctcgcacgctcgcaactgctgctgagtcatccgactctagttccataccttactgttgtatgtggtctttccgcgtctccttacattttatggtgtttgcagaatgccactctgattgttgtatatgccaactgggcatttgctgctattaagggcattggatggggctgggccggtgtcaaatggctctacatcattgtcttctacttcctgctgcgcatcatcaatttcctcatcctgctatacgctgagtaggagggcatggaacctcgtccttatgtatatactaggtgtgtgcccgtacgttgcaacgggagtatgttaggatgagcatcgacacatatttgatcggatattatattttttgggatctggagaaagtttgctcggaagccaaacatgttaagacctgagcatgtgtatgatatgcaaaggctggggctcgaacgcgcttgtatgagtcttgttaatttgcatgtctcgtgcatagtctctcaccatctattcactataatatacaaaatctgtgtctatctatatttattttaagcttctaac

SEQ ID NO: 19257 - DNA, 2813 bp, Zea Mays
ggatttatggatatgtcctcgctttctgaactcgtggcttcactggaaatatactttccaagaggtaaagagcaagcgcgacaagaagaaagagattaaagaggttcctgagacaagatatcgatcagcaaatagttctactaatcgaggccttagaagtggtgtagatcgtggtggacggaacaattctatgcactccagctctactgataacatgacctcaaggccaccagggtctggtactgcatcaggtacttccagtcagaggcaaacagttgcaagtccttctgcaaacaaacatatggttgctgatggaccagctgcatcattgcaatcatcgtctgggtttcagcatggtggttggtctgggacacctggtcagttgtcgatggctgacattgtgaaaatgggccggcctcagggaaagacttctatcaaacctgtggtcacagctgacagaggttatgctggacagtacccatctttgccaagcacaaaccagaatctgaaacaatctggaagcatggttcccccaacagagcttgacaaggggttacaacctgcccaagattcggttcaggttaaggatcatgatcattctactgctgacagcaagctcccatatggtactgactggtctccacaagatggcccgacatttgcgaaccaatcttcccttcctgagccatctggtgatccgtccttgtatgaggcatcgtttcagtcatctacattggttactgatgtagttaattcacatgaaaattcacacttggatgaaaacgacacctttgcaatgggaccagcacctgcctctgagagacacctggatcctagtgacggtatttctgagtacaatgatgtaatattgaacaactcaagttcctatcagcctcataattactcttacacagaacaacaagaagttgaggattccagtgctgatgtatcagcagcagcagcaaacttccagagtttaagcctacataatgatgagttagctgcaaaaaagtctgcagaagataaccctgcagtgataattcctgaccacttgcaagttacaaatacagaatgtgtcaagttgagctttggcagttttggatctggtgcattttctgggttactcccacaaaataccactgatagcaatgtggaattccctgctcgagaggaatctgcaccagtagatcaaatagatgccaggaatcaagattactatgaaagtggtgctgtaacttcaccagcagacgaaaatcttgaggccatgcttggagctaacatggagaatgtagatgcgccttctgtttcacaggctaatgagctcaggcaggacgtacttgatccttctgaacttcaatatgacgtcccatcagttccaagtcatgcttattcaaacacggacactttacagcctagcacaattgaggagccacaaggaaacaaccaagcacatactctttcccatttgtcaaacttaatgcaagcaaatcctttgagcaccagcagcctattggggtcaaatcaaaatcatgcaactcttcatggcttagagtttgatttaccgccttatctgggagcaaaatataacgcaggctcaactacaaatcctagaccacccatatccatgcagcaggaggcactgaaagcaggggttttctccaacgcccagtctacacagagtcttccaagtactagcattcagacggggcttcctctgccacagcaattagcacatcacccttactctcagccaactttaccaatcacacattttccaaatatggttgggtatccgtatttgccacaaaactatgctacttacctatcttcaggcaccttccagcaagcatacccgagtagcggaccattccatcagtctgctgctgctgctttgctggcatctggtatgaagtactcgactccagagtataagaacaacctgtctgccacaggcttacaacagcaacatcagccacaaccacaaccactttcatcagtcatctctggttatggaggctttggaagctcaagtaatatacaaggaaattttacccttagtcagagtaccggctctgcatcagctcttgggtttgatgaagcattgagcagacagtacaaaaacaccagtcaatacatggctctccagcagggcgacaactctggaatgtgggttcatggctctggttcaagagcggcctcgacgcttccgcctaaccacttctatggttaccagggacagagtcagctgggtggctttgctcgggcgcagcagccacagccttcccaatttggaggccatgggtacccaactgtctaccagtctcagggacaggagcacccccagaaccttgctgagggcagcctgaacggcttccaggtcacaccgtctcagccatctcatccgagctggcagcatcagcacacgtactgagccctcctgtactccctggttagggtggctcttgtgctgtcacaagccaagtttcgcgtgcttgtgccctcactcgatgcagagtatgctgctcggattcagtgagcgctgagagggtcccaggcatacaacagttagagcgttttaacatgttgcgtgtgttgccagactgatgcattgcggtttgttttcgatagtgagttatatgtgcggaggcgcagtcctgtataactgagacatgataacctaacaagcagtcgtttctgtttcccaagagttggctgctcttagcttgagctgatgattgactgtttgcttgcagttttggtcatgattttactgcttcaaaaacatttccaattccaccatattggcatcgcgt

SEQ ID NO: 19258 - DNA, 3268 bp, Zea Mays
cccctctctagcctccttcccttctccactcttatccctctctgagtggtaacacacctggcgacgtgcacgagtgcgcgtgtgcgggagcagtagctgtactgtaagcatgcagcagcagcagcacgggggaggcggcggagcaagcggtggaggcccagcgcagcagttctgcgcacagcaggtggagatgccgctgccattctcgccggtcggcggcgctgggcagcggatctcgctggcggaggcaccgtcgcccatcagcagccggccgccggcgccggcgccggctcagcagtatgacgagctcggcccgtccggcgccggcgcagtgggctttgacgccgagggcctggccgccgccgcagctggtgaggatggcgccagcggcggctcggcgggcaaccggtggccgcggcaggagacgctggagctgctcaagatccggtcggacatggacaccgccttccgggacgccaccctcaaggcccccctctgggagcaggtctccaggaagctggctgagaaagggtacaaccggagcgccaagaagtgcaaggagaagttcgagaacgtgcacaagtactacaagcgcacaaaggagagccgcgccggccggaacgacggcaagacgtaccgattcttcacgcagctggaggccctgcacggcaccggagcggctcccgcgtcggtggcgtcgcaggtgggcccggcaatctccggcggggtgtccggggcagcccggccgtcgtcggccgtgcgcgtgcctgccgagccgctgcctgcggtgtcggccggcgtgggaatgccgatgacgacgacggtgggctacccgagcatctcgacgtccaacacggaggacgactacacggacgaggacgactccgacgacgagggcacggaggagctggtgggcggcggcgcggacgatcagcgcaggaagaggaagagggtgtcggacggcagcgggaagatgatgaggttcttcgagggcctgatgaagcatgtgatggaccgtcaggaggcgatgcagcagaggttcttggaggccatcgagaagcgtgagcaggaccgcatgatccgcgaggaggcgtggcggcggcaggagatgactcgcctagcgcgcgagcaggagatcctggcgcaggagcgctctatggcagcctcacgcgacgctgccgtcctctccttcatacagaagatcaccgggcagaccatcccgatgccatccattgccgcgcccaccatcaacgccatgccaccgccgtcgcatccgaagccgccgccgccccctcagccgcaccccacacccattgcctccgtgtcgccagccccgccgccaccgcaaccaccagcttcgcagactccgcccccgcagcagcagaagtcgccaatgccggcgacgccacaaacgccagcaccgcaacggcaaagcacagacattgttatgacaccggccgagacgacgccgcacgccgacacccaggggcacgaggggtccggtggcggcgcgacgtcgtcccggtggccgaaggctgaggttcacgcgctgatacagctgcggagcacccttgacacgcggtaccaggagaccgggcccaaagggcccctctgggaggagatctccgccggcatgcggggcatgggttacaaccggaacgcgaagcggtgcaaggagaagtgggagaacatcaacaagtacttcaagaaggtgaaggagagcaacaagaagcgtcccgaggactccaagacgtgcccctacttccaccagctcgacgcactctaccgcaacaaggcggcgatcacctcatcctccggcgccggagccatggtgcacgctaacgcatcgtcggcaccgcaggagatggtcacggtcacggccgcgacgcccatctcacagacgccgccgcctccaacacagccttcccagtcccatcacgcggcgaagaacggcggcagcagcaactccgctggcacaggcactgggaacggcagctacgcatcagagcacggctccaggggcatgcaaacgcaggcgagcaacggcagcgctgcagccagcatgttcgtcggcctcggcggcggcgcggcctcggcagcgaagaagaggaaatcatgaaggagatgatagagcagaggcagccgcagcagccgcaggcggtggtaggcggctacaacagaatggacggcgcgggcagcaacaatatggacgacgacgacgacgacgatgaagacgactacgatgagaacgataacgacgaagatgacgccggcaacaaaatgcagtacgagatccagttccagcaccaccatcagcatccgaacgttgtcaggtcgaacgccggcgccggtggtggcaacccgcccggcaccaccgcgcccagcacggctgcggccccgacaacaacagccggatctttcttgggcatggtccagtgatcgatccatccacacgcgtatcccaagcattattcctcccggtgatgactactctatcctcctcttgccgatggcttcttttctttctctcgcttgtgacatttgtatctacctacctgtcgcctccatgctcgcgtccatatatctgatctactccacaaatcctaaaaccacaacaactatccccctctcctctctattctccggcgattctccatattcttcatgcaggtcgtagccacacctcgatccatgtcgtgtcgtcgtcgctgttgcccaccctcctatttctccattcgttgctgcgctagttacagtggtcgccctcttagatgttacagtaaaaaaaatattggtggtgatatggttatttattgattcgttagggtaattaataagaaccctcaaaagcttggggtcttcacggagtggttgaatcgatgcggtgaaaacggcacgtgaagggtaataagagatcgatcgagcggttaaagagaacaaggagacagagacaggtggcagatgatgcagtgggtgtttttcactgttactgcggtaatttttgtgcatgcggctactactgtacagtggggtagtttgttacaagagaggagtaaaaaaatggaaacagagaacttggccgtcatgcggcaagtgacatgaagaatagtcagtttgatgcatgcaggaatttgttttctttatccttttacttttttattttcagttttcactgtttcttttatgttctgcaacgagtaaactgtccattacgtttttctttcttcctcaaactgttgttaccgaaatttactgtgtatacttgaga

SEQ ID NO: 19259 - DNA, 102 bp, Zea Mays
caacaatgctagcatcatcagttttatgacaaggtataaagtgagccgtttttgagaatctatcaacaaccacaaaaatactatccctccccttcttagttc

SEQ ID NO: 19260 - DNA, 1882 bp, Zea Mays
caccaataatgcccagactgaacattcgtctccaccgctgttctttcatccgtctgatctactgctccgccctgcagtagcgaaaacacaaacaccaatacaaaaaaggaaaagaaaaggcaaccaagcgaaccagaccctcccaacggtcacctcacctcgcccgccgcgccgtgtagccagatcgccttcaggttccacgacctgaccacaacccctcggcgctcatcgtcatccaccgccgcccgcgaggtccccctccagccttcactgggcgaaggagaaggagaagtttcgccccacatgcgtggcgcgagtgccgccgccttccgacgcagcagccgcggccgggatgtcgcgtatccgtagcggggtggaggtggtcgccagtagggggtgcgcgcggatggtgatccccgggatgcatcacaacccctcatccgccgcatccgtctcctcctccgcggcatcgcgcgcggcccccgccgccggttccgggccggcggcgcatgccgatgggcccttcgcaggcctcgtcatctgcgtcactgggctgtccaaagaggcgagagttcaggtgaaggaggcgacggagcggctcgggggcgagtacagcgggagcttgcaccccaagtgcacgcacctcgtggttcagagctttgccggacgcaagttcgagcatgcactgaagcatggtccgaggaatgggctattcctcgttacgctgggttggtttgtggactgcgtgaggaggaacatgaggttggatgaatccttgtatgccatcaagagcattggggagaatggtgtgccgcccggggagttcagccgccttgttggagttcctgttaacgagaagtcttgccttccaccgttgatatttcaggacaaggcatgctcagatatgacccagaagcattcgctccagactcctgggaacggtggtggtcatgatgggttggtttttatgaatgacacaatctacattgaccctgggatatctgatgagatgaggaaaaagatttctgacgctgttactagagaaggtggaaagttgctggagcactggtttattggttgccctacaacttatattgtctgtgaggatgtttgcgttaagagatatgtaggccactcagaaaacattgttactccgctttggatcttgaaaacagtgaaggaaaaaaacttgcagcgtcttgtccatttgtcttccgacctagctaggcatgttgccatggttctggaaaatgttcagacatctgaagagaataggaaacttggaagtgtaccttctataaacacaagctcatgtggtcgtccatcaaccaaagaggagatcaatgaagtccatcaagcgaagcaaaagtttgttgaaggagcaaagaaagaagtccgagaccgccgtgcccgtcgtatgcagccagtcatgtgaagtaaccattcatccaatcacaccggccacacttctggattcaatctgctggacaatctctgagccaacttcatctgcgtcaatttatatggactcttcgtggtccgatgatgccaatgagcagcaaagcaccacttactttgatgcaaatggggacgtgagggatccagatcaacctaatgacaatttttcccgtccactgaaagaaagtgagcgaagtgagctgatcttcaagaatcacttccttaccatactcttccctgttgatcgttttggagaacttggaccttcctcaaagacgttctataacaatggtggctttacgtgtatacaagtactgaatcacatttacaacttctaccaggtatataactactgcacactcatcgctcaagtttggactctttttgtcttgtaaaacattgatggcagtaaaactattctcga

SEQ ID NO: 19261 - DNA, 737 bp, Zea Mays
gaaagtgatcagaaaagtggctagcaatcgggataacattcctcgtcgcagaagcttgtctcataggaggatcggtgaggaatgcaaagcacaccaagtatttaggctactacatgaagcatgatttggtgtcgtgcgccgcccttcgcaagggagtctttgcagcagctgctgcaatgatgatcatcaacctcctggcgtccctggtgtactactggagttactcaaaagctgcgacgggtgggttcatgaagcaccaaaatgaggttggtgtgggcatgacggattacggccttgacaagggtgtttctgggccctgagtgagatggaatcttattggcctctgtgcggtattaatactatcgtcgaaatgtatgtggatgaagttgagttgtttctctacggtgtgctgtgaatgatataccataactgtacaatggcatgggtggtgatattgtagggttcgtgctgtgaaaaatgcggtagcactagttgtgtttggtgtgctgcacgagcacgacaccgacttcttcctgctcgctgctggcggtggttgttcgcaacacaaatgcgggacttcaatgttcttggctgtcattaaattatgcaaggtggtactgtactgattttgcactaaaatggcatctgttaggcctgcaggcgaggcccggctgcatctttattcgccacatatagttttcttttgggacaattgcatggttgcccttgttcacgat

SEQ ID NO: 19262 - DNA, 468 bp, Zea Mays
acgtctgttgctctctaccggagacggatcagcgtgtcaactgacagccctatgtccttcgccgctttctcatggccgtttcgccgccggggcggggctggcagcagtggcgcaagcaagtccgccgccacggcagaggaggacgaggagctgggcgtgaccccgcagctcctcgacttcctccggacgctctcgcccgacgccttcaaggccgccgcactccagctccaaggaggctccacggaggcggccgccggcgacctcaccagctggcaggagcggcacgccgtgctcgtgctatccaaagctaaggaactcgccaagattcggtatgatctgtgccctcggcacctgaaggataagcagttctggaggatatacttcctgctcgccaagagttacatctcacctctgtcagtcgttgatcaatgagcgaaacttcgaaattagcatctcactttggttact

SEQ ID NO: 19263 - DNA, 2532 bp, Zea Mays
ataaaaaaatgtgctgcatctgtaaattttctttattactttgatgcctatgatttgactcctatcatgtatttttatccttatattttgacagttgttaagcatgcttttagattatactcccttgttgctgatggtaataataaaaaaatctgtctgtttcctttcagacggtgcacccaagtaacccaacatttttctctgcagattgacttggatacaattgaagttagcaatctgaatagacagtttttgtttcggcagagtcatgttggtcagtcaaaagctaaagttgctcgggatgctgtattgaaatttaggccaaatatcaatataaacccataccatgcaaacgtgaaggattctcatttcaatgttgatttcttcaagcaatttaatgttgttctgaatggtcttgataacttggatgctagacgccatgttaatcgcctttgccttgctgctgatgttcctttggttgaaagtggtactactggttttttgggacaggttactgttcatgtcaagggtaaaacagagtgctatgagtgtcaaccaaagcctgtccctaaatcatatcctgtctgcacaattacaaacacaccatcaaagtttgttcattgcattgtttgggcgaaagatctgctttttgcaaaattatttggtgataaaaaacaggataatgatcttaatgtgcactccaaagatgataccagttcaaaaacagatgtttttgaaaggagtgtagatgaagatcttgagcaatacacccagagaatatatgaccacgtatttggttacaacattgaagttgcattggataataaggaaacttggaagaatcggagaaagccaaaccctatttacattagagatgcattgcctgaagacgctgttcaacaaaatggtcgctctcaggatcacgtgaatgaggagcaggatccttctgctatggtatccttaggccttagaaatacacaagagatatggagtcttgctgacaattcaagagtgttcttggaggctttaaaattattttttgacaaaagagagaaggaaatagggagccttatttttgacaaggacgaccagttggctgttgagtttgttaccgctgcagcaaatatcagagcttcctcttttggaataccactgcatagtctttttgaagctaaaggtgttgctggaaatatagttcatgctgtggcaactaccaatgctataattgctggtctaatcgtcatcgaggcaattaaagtgctcaagggtgattatcaagattatagaatgacatattgccttgagcatccagcaaggaagatgctcttgatgcctgtcgagccttttgaacctagtaaatcatgttatgtctgctctgagaccccacttgttctggaggttaataccaagacaacaaagctccgggaagtcattgaaaaggttataaaaggtaagcttggaatgaacctacctttgataatggttggcgccacacttgtttttgaggatggtgaagatctggaggaggatgagattgcaaattatgctttaaaccttgaaaaggtcttggctgaacttccagctccagttctaaatggtacaatggttacagtcgaggatttgcatcaggaactaaaatgcagtatcaacatcaaacacagggatgagttcgatgaagaaaaggagcctgacagaatggttcttgttgggtggtctggcccagttgataagcaaaccactagtaatggtgagactaaatcagttccatcttcatccaatacagaagatgtggatggtactgccgaggacatatcagcaacttctggaatgaagcgtaagctgaacgaaatattagagacaaaggagaattttgatgctctcgaaaatctttcgggtgttgattccagcagcgctcaagttgttgaagatgacaatgacgatggccttcttatgtttgatgaggacccaaggcaaagtaagaagaagagattgcagtagcatcctgctgcggcgataacagctcttgactcccggcatcgtggctaacacattgttcgatcgtaacatctttgataacttatttatgcggttatgtaccaggttgatgttgaaacattagtaacaatgcccagggcaccttttggcctcagatagtcagataccctgtagggttgtaatttgtaggatttaggaacaagagcaactaatgctcagctgacagcctgctgcgagatagaatttgtatctcaagagccaaggtcctgttttggttatgttttttgttcagttgaggggtgaccgggtgaaccaagctctgtcttgttaggtgccaatcacagggtctggaaatatgtactcatcctgtattcttgctaaggttatggatcagatggtgtatatatctgtgcaaaacactaatttatagttttgcactaatctacactgtagattatattgtttaccgagtgaagtttgaagtaaacggctggaaatagcttaacgttaagcaatatgcgaaacaaggattgggtt

SEQ ID NO: 19264 - DNA, 183 bp, Zea Mays
aatcttcaggttcaatcgtcagcatcaccttgagattaatccaactcttgccctccacatcacgtgattaattaatgtacctagatgatatacaataatgcatatgagtaaggacatgaatagcaaatgataaataacctatactaaagaggggaaacacttcaagcaagacatcacagacat

SEQ ID NO: 19265 - DNA, 1556 bp, Zea Mays
atgtgcctgttcctgtgcctgtgcgtgcgcctcctgcgtgtggcaatagcagcgggcagcggcagttggtcaccgtggtcgtggagtctgcagtgggctggaccctccctgccgcagttccgctgttggaccctccttgcccggctactgctgtaccctccaacaaggcaaaaagaagaacgaagctcacccaccctgcccatcggcctcatcacttccctcaaatccaccgatccccttccagaggttagggcctctgcgcccgatttcgtcccgcctcgccgatccacccgccgcaggtgagcggcttcgccggttggagtgtagtactgcggtcgcgaccttcgttccgagctggttcattttcgcttggataggtttggtacggatgggagccggcggcgcggggatcaggaatgtttcggtgcgtgggaggtgagagccgccggtgggcactgagggcctagggtttggttgaagagggagcaacgaaatggggggcttttgctccaaggggtcggcggtggacaagtcacccagcgacactacgctcggccccggccgggaggttgaccgccatgaccgtctagtggtgaaggaggagaagaaagctgtggtgggggaggctgctgccaagaggatgcaagaagagcaacatcaacagcagcagcagcagcagcagccagcagcgccaccactgcctgtatcggtgtcgcaaacggcagtgcctggagctaccgcggataacactgcagcaccatgggatggggtgccaccactggcacggttgccatctcagaagtcggggatgggtgtggcgaataaggtttcggaagtaagctcaattctgggtagagctagtactgctggccttggaaaagcagtggaagtgcttgacacacttggcagtagcatgacaaatttgaatataagtagttttggatcaggcactgcaacaaaggggaacaaaatatctattttagcatttgaggttgccaataccatagtcaaaggttgcagtctaatgcgcgccctttcaaaagatagcataaaacatttaaaagaaacagtgcttcactctgaaggtgttcagaatcttatatccaaagatatggatgagttactcaagattgctgctgctgacaaaagggaagagttgaaagtgttctctacagaagttgttcgctttggaaatcgttgcaaggatcctcagtggcacaacttggaccgctactttgataagttgacatcagaacagactcctcaacatcaactgaaagaagaggcagaatcagtaatgcaggaattagtgacttctgttcagtttacagctgaactataccatgaaatgcatgccctggatagatttcaacaagattatcagcgtaaacagcatgaagaggatggttctagtgttgtgcaaagaggtgataacatgcacatactaaagcaggaagtgaaaagccaaagcaagcatgttaaaagtttgaggaaaaagtctctgtggtctaagaatttggaagaggaaaacattcaatcctgttgattcaaaaaat

SEQ ID NO: 19266 - DNA, 1919 bp, Zea Mays
cggccgtggattagtctctgacgaggtacaatcacgacagtcagggcgacaagtgagtgccctgaattttcaggcttctctagctgctaaggatctccaggtttccagtgagtcaaatccaaggctgcattcgtcttcaagtaccataagccatcatctcagattcaatcacctcaattaccatgaaaacaaggaagatggcctggggtctgaaaacgctgaaacaagtggtcttcaaagctcatctaggaaacctgtcatggtaaggggaagtctcattaatgaagctgttaatggtgacatatcaggagaaggaataagttctataggatcagagctggaaaatgttcctagcacagtctccactaatgaaattggtggctcaacttctgaatctggtttgggcccctcatcgatgacatctgaaaggatcatgtctgactcagaagtagagatatctccgcaagggacctcatccacaactgtcatgacaagtgaaagatcagatgcatctcaatctagcttaacatctgtgttttctaactcttcaactgcatcatctgtgatcgtggaaccaatgccagatccaatccctacaacggcagatgtccccatattcagtgggccacatggtgaagctggagggagtatattacatgacgacatgatgagcattttctcaaatgacggtgtaggacgctctatagattcaagcagcagtgaaacaaggaggagtcacagaaggatcctgtgggatgcattttccaggcgtggctcaagaggttatccagaatctgatgctgatgaaatgggattttttagtacatggctagaccttggtgatgatatttttgaagagttgggggaatcaagatattttcatcgcaggcgacatggttcaatcagagtaagccagtattcaagatcccggattagggagcatcgccgtgctgtttttgatagtggtaatgaacaaaacactgctgcatgtcctttggggattcatcaaattggccgatgcacctgtaattctttctttattgctgaagaatctagcgcccgagcaagtatatcaagaattgtcatgttaactgaggcgctatttgaggtgttggatgaaattcaccgtcaacctgcatcactttcactttccatggtctctgttcaggctcctgaatctgtagttgattcgttgccatgtaagagctacaaaaagcttgagacaccccaatgcagtgatgatatggaacagtgccatatctgcctaaccgaatatgaggacggagaccagataagaacccttccgtgcaagcacgagttccacctgcaatgcgttgacaagtggctgaaagaaatacacagggtgtgccctctgtgccgtggagacgtctgcgaagtcgcctcgtgaagaccttggcgctgccatccttccgatgtggcgccggtggatagggcaccaccgccaggcgccagctgttccgtggttgaagctggttcggtcaggcaatggtgatccaacttggacagttgacaccgcaagagcacgtcaactttgactgtctccctgccgaagagaatggccaaaccaaccctgcgaccgatgagtcgctgttcctgtcatcaacttttaagataccgagactttgtatacagtagcttttgtagcctcccgcctcgtgtatgacagcctgtacatatttgtaaattctggaatcaaatgtcacaatcccctgttctcgtgacctgatgttgtagggaacatattcggtgctgatggagccgggaacagagatgtgctgatggagatggaacttattcggtgctgagccttcgtggcttgagcagcggaactgctggtgaaggtctattacagagcatgggctaactaccgtaaataacaaaaattaaagacagtaaac

SEQ ID NO: 19267 - DNA, 1080 bp, Zea Mays
gtttcataagatggtggaaaaggccatagaaatttggaacatcatctcaaatggtggttacttgtatatttgcggtgatgccaagggaatggctagagatgtacacaaaatgcttcatacaatagtccaagagcagagatctttggatagctccaaaaccgagagctatgtaaagagcatgcagatggaaggcaggagcacgagatgagcgcgttgatgtacttagtactgtgaaatcaaactggaggaggctgcaattctgcattacacctacaaaaaattctcaaacctaacctcaagaagggatagatgtggctgcaaaccaactaaagaagatgtgaagcaatgttttatcttggaatttgaccgtttggtaccgggaacatgttgcatggaccgatagagacaccaacttgaaacttttaaggaaggatgtattaacacatatatatgtgcccatggcattcatcggtggcctcaaggaatccgacgtctatcaatgcaataacatcagcgaaagcacaataaaaaacaaagtcatcaaacatgggtctcggaaacaaggaccacatccggctaaactgaactgctggtcagtccaaattggaaggcggtcacgggaaggtgcaggtaagcgtcagaaagatcctagaaatggttgatgcccaggaaggagcagcgaggccgccaatgtcgcccccaggttttcttgagctggctgaaagcaccactgccttttcatgacattatgtgaggcattgtttgagtattgactgaggttggtttaaccatgcgtgatacatgcagccttgagcatacagtgagtcactcaacaactttggcgaaagcccagatgttttcttgcagtttttgaaaaatattccgcgccctgatttcatgattgtgtgccatcgcaacacacgggcaactggctattatatatataagttatcatggtattatatggtcccgttgcaacgcacgggcactcacctagttattttatatgtgtatagtaggatttaggagatgatttaggacttgtttggttattttttaatctatatggatggtagagga

SEQ ID NO: 19268 - DNA, 2677 bp, Zea Mays
cacgctgtcacccatcgtatcggtcaggtaggcacggccgatccggcgccagcagcggcggtgctcgaccttcaggcatcagagctgcgggacatcacacgcaccgctacgatctcctcctgcgagcgagatctcaccaccgcagcggcgccgcggccatggcgggaaggtatcaccaggatcagggcggggacgggggcgcgtccatggaggtagtcagcacgccgaaccaggagctggcccttaccaactgcgcatacgtctctcccgctgacctccgccgcttccccaacgggctcgccctcgtcgctgacgcctgggtcttcaccctacgtgaccacaatgctgttgcaagtggacgcattgccttgaatgctattcagcgtcggcaggcaaaggtttcagctggggattctgttactgttagcagttttgtcccccctgatgatttcaagttggctttgctcactttagatctagattatgccaaggcaagagccaaccgaaatgacgagctggatgctgttgtgcttgcccaacaactccgtaagaggtttctgaatcaggtcatgacctcagggcaaagggtgccatttgaattttatggaacaaactatgtattcaccgtcaatcaagctttgctagagggtcaagagagttctacaccattggatagaggattcttgtccagtgatacatacatcatatttgaggctgctcctaattcaggaattaaggtgatcaaccaaaaggaagctgctagcagcaagcttttcaaacataaagagtttaacctggaaaaattgggtataggtggattaagcgctgaattcactgacatatttcgtagggcattcgcttcaagagtctttccgcctcatgttgtcagtaagttgggcatcaaacatgttaagggtatattgctatatggacctcctggtactggcaagactctaatggccagacaaattggaaagttactgaatggaaaagatcccaagattgtgaatggacctgaagttctgagcaagtttgttggagaaactgagaagaatgtgagagatttgtttgctgatgctgaaaatgagcagagaacacgaggtgatcagagtgacctccatgttatcatattcgatgaaattgatgccatctgcaagtctagaggatctacccgtgatggtacaggtgtacatgatagcattgtaaaccagctgcttacaaagatagatggtgttgaggcgttgaataatgtattgcttattggaatgacgaatcgtaaagatttgcttgatgaagctttattgagacctggacgattggaagtacacattgagataaacctgcctgatgaaaatggtcgtttgcaaatccttcaaattcatacaaataagatgaaggagaattctttcctgtctccagatattaatcttcaggagctagctgcgcggacaaagaactacagtggagcagagttggaaggtgttgtcaaaagtgctgtctcatttgctttgaaccggcagataaccatggatgacctcactaaacctttggatgaggaaagcatcaaggttaccatggatgattttgtgaatgcacttcatgaaattacccctgcatttggtgcttccaccgatgatctcgaaagatgcagattgcgtggtattgttgattgtggcaaggcacataagcacatttatcaaagagctatgctcctcgtagagcaagttaaagttagcaaaggtagcccactcgtgacttgcctattggaaggtcctgctggaagtgggaaaacggctatggcagcaagtgttggcattgacagtgattttgcatatgtgaaaattatatcagcagaaacaatgattggtttcagtgaaagcagcaaatgcgcacagatttgcaaggtttttgaggacgcatacaagtctcagttcagcatgataattcttgatgatatcgaaaggttactggagtatgtagccatcggaccacgtttttcaaacttgatctcacaaactcttctggtcctcctcaagagagttcctcctaagggaaaaaacttgcttgtcgttggaacaacaagcgaggttggcttcctagaatctgttggaatgtgtgacgtgttctctgtgacctaccatgttcccaaactgaaaaaggaggatgccaaaaaggtattgcatcatcttgatgtgttcgatgacggagatcttgacgcagcagcagaagcactggacgatatgccaatcaagaagttgtacacacttgttgagatggctgctcaggggccaaccggaggaagtgctgaagcgatttatgccggagagaagatagatatcaaccatttctttagcatcttgagtgatattatccgttactaagcccgcatggagccgaaatgaaccctataagtatccagtaggagtttgtttgcacccgtgcttcatcaaccatttctgtagattggtttgatctttgatgtgttgtttttgtttgatgcacctactagagctgttggattagatcagaggcgaattacacgatatatcatttttgtattgtatgacgatgtttatacagttcttaatgggatccagctttacacctcagaacaccgataattttcacattcctattagacccgcttgttttgttgaaattgaattctattttaata

SEQ ID NO: 19269 - DNA, 1295 bp, Zea Mays
gtcagctactcaggctagggcgttgggctgccatcctgctggtttaactccacgccgcctgcacctgccaggcaggggcgctaggttgccatccctccaggaaccgatcagccgagtagttgctgcctcgctggtcaggttgctgtctggctatttacttttattgatggaatcggctgtggaaggaaaggggaggactgcaagtgatggaactgattcagaaagtaattcgtttgacaagagggatgatatgtctgaagatgaactggtagtgcttggtggaaaaattgatgattcagtggacaatgtcaatattgatgaatctgaggacaacagaagtaaacaaggggtcaagagaaggcgcaaaagggtgaagatgaaggctacagctgaaactgaaaggagcaaaaaggcaaaatctaaagtttgggatgcctttactaaggtgactgtgccggatacgacagagaaggggaagatgatatcaaaggcaaaatgtaactattgtaagaagctatattcttacatacaaggatcaacaacatctcatttgtcaaggcacatgagaatttgtgccgtgtatttgaagcatgtggcaaagcagcagaatcaatctcttctaaattttgctccatcaacagcaggtgaatctggatctggccttcctactatcacttctccaaaagattataaccatgagaaagtaaaaaaactaattgctaagatgataatagttcatgagtatccatttaggatggttgagcatacttggtttaacattgtcatgaggtatttgaatccttcatatgagtttattggtaggaagactataagagctgaatgtttaaagatctatgagtctgaaaaagaatcactagcaaaagtccttaaaggtgttgagtatatttccctaaccactgatttgtggacatccaatcaaacattatcctatatgtgtttggttgcacactacatagatagtgattggaagatgcaatgtcgtgtcctgaatttttttgaattggaccccccacacaaagggcctgttataggacaagcagtatatgaatgtgttgctggctggaaaatagaagataaaattgttttccatgactttagataatgcctcaaacaatgatggtgctattcgaggtttgagggccagattttcagctagacaaggaagtgcttttgttgcaaaatatttccatatcagatgttgtgcacacataactattcttgatccaaggtataaaatgagatttattgagtggtgcttcaataagatatttgat

SEQ ID NO: 19270 - DNA, 1249 bp, Zea Mays
gtcactttggaccctagttttctagcttgtgttcttcaaataaattactcaggaagctgttatgttggaccttcttagaatagttgggcatcacaaagcaaggcttgctacccaaattcgaacagttcagaaatcatatggcaatgcagacttcgataacattccttttggagaggacatgtatagtcgagtccgtggccggccacttctgattgatacatctgcaaggatcagtgatgacaaacccaggcctcgacctgtatcatcacgtgaggagcagaaagtcaagacaaatggctcggtagatattaagtccagttcccctgaaaatgctagttcaagcaactctgaaaagcaggaaccgaaaaaaatggtgcctgaagatactcgggtgaagaacattaagggtgataatgtgatgccagtaacaccatctttagatcctgctacgtcaacttccaaggctggtaaagggaagacacgggaaccagagcccactgagcggcaaggagatgggtcagtctcggtggctaatccaaagaaagaatctagaccagtttttgaagataacattgttctgggcgtagcccttgagggttccaggaggacactgcctattgaagaaggaaatcctcatctatcactatctgagactgaggtggacaccgaagaggcggcttcatcaccgaaggataagataggccaaagcccaaaactttgaggtccagaaaaaaagccgttcagaggaatctcgataggtcatccgagttcaaactgtatccttgtgaagatttgtcaccaagcctaccttttttgtgcgcttgtgcaaatacaatgccaccacacatcagtgttgtatgcttaaggggtaaattcacactgacgattattcagggaacattacctgtcagtcgtattgctacaggcttgtaaagaagcaagtgcttcaataggcattttgtaaagattatattattgctcatttaagtggcttcttgcatatgcatcggcaattcagcatgcgccgttgcaactgtcatctcggtttccaggtttggcttacgttagttttgtttccaatgccatctgctgcgagctgaaatatcatcgtctcttttcctttttttttttttacaaaagacacgctaagtcgtggagacggtgaattcttccggatggcgtctcatcttgcagacgactaaaacggaataccgcgattatcgaaaaggaaacggaataccgcgcggcg

SEQ ID NO: 19271 - DNA, 228 bp, Zea Mays
gcccggcccaaggtccaactacgagctttttaactgcaacaacttaaatatacgctattggagctagaattaccgcggctgctggcaccagacttgccctccaatggatcctcgttaagggatttagattgtactcattccaattatcagacactaaacgcgcccggtattgttatataattgtcactacctccccgtgtcaggattgggtaatttgcgcgccttgct

SEQ ID NO: 19272 - DNA, 4607 bp, Zea Mays
cgccagcccgagccacgatatttgcgctgcgcctcgcctccgcgaagcaacgcggacgccgtgccttgcatttccctttcacaaaaccaaaatccaaaacaaagaggagagcgtcctcctatcctccccttcccctcccccgcggccatctcaccccgatggcctcggcccccttcccgccagtcgcggcgtcggcggcctccgcgccgccgcgcctggccccgcgccaccccttcgctgctgccgcagccgcgcgccgctcctcgctctcgttccgccccgccgcgcgccggcccgttctcccgctccgctcctccgcggtcgcggctaacaccctccgctgcacgcaccgccgcgccgtctcatccaggtcgaggagacgcgcgcaagaactcggcgcggcgcccgcgttggctgcgtcgacctggggcgtcggcgaggagaagggcggttgcctctcgtgcttccccaagagtaggcggggcaggtcggggctcgcgaggttcgcgccgtgcgcgctcccgcacgcgtcgggactatcgtttcgcagccggttgagcgggtccaaggtcaagcctagccatatattgcacgccgctggacctgatgaaccacatgttgcaagtccaacatggtctgatacttcccttgatacacgtgacatggatcatgctattagtaaggaggagcttgaagatgttctcaacactccgcttcctgagcatccgaagctaattcgtggtcaattgaagaatggacttcggtatcttatcttaccaaataaagttccagcaaacaggtttgaggctcacatggaagttcatgttggatcaattgatgaggaggaggatgagcaaggaattgcccatatgattgaacatgtcgcgtttcttggcagtaaaaaacgtgaaaaacttttggggacaggaatatggtgaagacttactcccttctgtgctggatgcattgaatgagatagcttttcatccaaagttttcttcatctcgtgttgagaaggagagaagagcaattctttctgagctccagatgatgaacacgatagagtatcgtgttgattgccagttgttgcaacatctgcactcagaaaacaaactgagcaacagatttcctattggacttgaagagcaaatacagaaatgggatccggagaagatccgtagatttcacgaacgttggtactaccctgctaatgccactttatatctggtgggggaaattgatgatattcctagagctgtgcgggaaatagaggctgtatttgaacacactctttcagaaaatgaaggaaaccctgtaccgagcactagtccatttggtgctatggcaagcctttttgcaccaaaactcccaagtggctttactacaaacctaactggtgaaaaatcacctgccacagataaaataaagcctgtaaaaagggaaagacaagcagttagaccacctgtagagcataagtggtcccttcctgaagttgctcaggacgccaaacccccagcaatttttcagcatgagttgattcagagtttctctatcaacatgttctgtaagatacctgttagcaaagttcagacctacaaggacctgcgtagtgtactcatgaaaaggatatttttgtctgccctacattttcgaatcaatacaagatacaagagctcaaatcctccttttacttcagttgagctggaccacagtgactctggaagggaagggtgcactgtcactactcttactgtaacggctgaaccccaaaattggagaagtgccatcaaagttgctgttcatgaggtgcgaaggctgaaagaatttggtgttacaatgggagaaatgacccgttacatggatgcactgataaaagatagtgaacagcttgctatgatgattgacagtgttccctcagttgacaacttggacttcatcatggagagtgatgcacttggccacactgtcatggatcagttgcagggacatgaaagtttgcttgcagtagctgaaactgtcacccttgaagaggtcaatactgttggtgcggaagtattggaattcatttcagattttggaaaacccaatgctccccttcctgctgctattgtggcatgtgtacccaaaaaggtacatgttgatgacataggtgaaactgaatttgagatatatccagaagaaatcactgaggctatcaaggcaggtcttgaggaacctatttacccagagcctgagcttgaggtgccaaaggaattgatcactcaatcaaagctcgatgaactgaaattgcaacacaatccatcatttgttcctttaaccaaagaggagaatgcggtgaaagtgtttgacagtgaaactggtatatcacaacgccgtctttctaacggaatttccatcaactacaagattacacaaaatgaagctagggttggtgtcatgcggctcatagtagggggagggagagcgacagaagattctgaatcaaagggatctgtcattgttggtgttcgttccctgagtgaaggtggctgtgttggtaacttttctagggaacaggttgaacttttctgcgtcaataaccttatcaactgctcactggaatcaaatgaggaattcatatttatggaatttagatttgctttaagagacaatggcatgcgtgctgctttccaactccttcatatggtccttgagcataatgtatggctagaagatgcatttgatagagcaatccagttatatttgtcttactatcgctctatccccaaaagtttggaacgttctacagctcataagcttatgttagccatgctaaaccatgatgaaaggtttgtagagccatcgccacattcactgcagaagttgactcttcagtcagttaaagatgctgtcatgaaccagtttgtgggtagcaacatggaggtcagcattgttggtgatttcactgaagaagaagtagaatcttgtgttcttgattatcttgggactgtgagggcttcaagttctccaaccatagaggagcgtattgaaaagatttcctttcgaccatttccatcagatgttcatttccagcaagtatacataaaggacacagacgagagagcctgtgcatatattgcaggccctgctcctaaccgttgggggttcgctactgaaggaaatgacctatttaatgtcattcagagatctgacgctgatgcagaaatatctgaaccagtaagcttggatctaacagggaagagacacatcaatgttcgcagccaccctcttttctttggcatcactttgagtctgcttgctgaaattatcaattctaggctatttacaacagttcgagattccatgggattaacatatgatgtttcttttgaattgaacctttttgacaaattggatcttggttggtatgtgatcgcagtcacttcaactccaagcaaggtccataaagctgttgatgcctgcaaaggtgttctgagaggattgcatagtagccgaattgtggaaagggagctcgatcgggcaaagaggacactgttgatgaaacatgaagctgagacgaagacaaacgcctactggcttggtttgcttgcccatctacaatcttcatctgtaccaagaaaggatgtatcatgcatcaaggaattgacgacattatatgaaaatgcaacgattgaggatctgtatattgcatatgagcacctgaaagttgacgattcttctttgtttgcttgcattgggattgctggcgctgaatctggtgaagatacaaacgatgacgagcctgatgtggatcttcatggcatgggtcccatgggaggccggggtctttcaacaatgaccagaccaaccacatgatcaccattgggatggccaacccttccaagggattaaccttgctccccaagacagggagtcacatggccctaggagactgcatgttgactgtcgtttcccagcaaaactgtttaaagataattcaagcatttgatctggatctggaagactattatatcctgagccacaaccaaaagcttggtggctgcattttttccccgaggagcgttgagttaatgactcagcaaggtcgtgaaaaagaatttattgtttgaggtcatgtagcttcacatgtacagtaaaagcaggttggttcttgcatacagttgttgtaactagtgcgttcagggcattgaagataggatgacagtagatcacagacgttgctgggctgcgaatagcgtaaggcatctgctgtaactgtaacgaaataatgaagcgcagtgtcaggaccctggatagatggcaagtgggtggcatgtgtgcctataaaaagggagaacgtatagaccaagggatatgaaagaaccatttgaacaaactaaatcctctctacctttccattactgttatctcttcataatctctcctctcatgtatcctgtttctctaccttctagaacaatttggctatcagatatcaaattagatcgtcttcctcgctgctatctccttcttcaacccttcttctacctgaacatctctcttctctccgatattcccttctgtggcgctaacacgcaggcatgtaacatttttgtgttattcttttg

SEQ ID NO: 19273 - DNA, 1693 bp, Zea Mays
aaaaatttatacaaatctatggaatctgataagcgtgtgcattacccttgacaggtctttgatctttccgttgtgaagccttcagattttgttcaccatggtttgagttgtttggagaggttagctgaccaaggcgataaccgtgcgaaggctgttcgtgagaaaatgaggattgtggttgctgggggtgatggtacagttggttgggtgcttggatgtctctcagatctttataagatgaaaagggaaccggttccacctacaggaatcattccacttggtacaggaaatgatcttgctagatcgtttggatggggtggctcttttccctttggttggcgctcagctgtaaagcgttatctcagcaaagcttccagatctcccatttgccgtcttgacagctggcaaactgtaattcagatgccagaaggagaaatagaagagttgccatatgcacttaagaaagtagaacctgtagaccggttggagatcagccaggagaacggtacagagttatccgaaaaggcttctttctataaaggagtattctacaactaccttagcattgggatggatgctcaggttgcatatggcttccatcatcttcgtgatgaaaagccatatcttgcacaaggaccagttgcaaataagttgatttatgctggatatagctgcactcaggggtggttttgtacaccttgcacagcgagtccacagctaagggggcttaagaacattttgcgactttccattaaaaaggccaattgttcagagtgggagcaagtgaaaatgccttcaagcgttagatccctagttgtgttaaatttatacaattatggcagtggaaggcatccatggggtgatctaagacctgagtatctcgaaaagaaaggctttgttgaagcccattcagatgatggcttgcttgaaatatttggtctgaaggaaggttggcatgcttcatttgtcatggccgagcttatcaaagcaaagcacattgcccaggctgcggctatcaagttcgaaatgaggggtggcgagtggaaccgagcatatgttcagatggacggagagccgtggaaacaaccgctgctacaggagcactcaaccatcgtggaaataaacaaagttccgtatcattctctcatgataaacggggagtaatgagatttttactccgtcaaccagatcgttaggatcgtgtacagttcaggagcagcgggcactagatccttagaactgggtcggacggactgcagcgaggatggcatgcatgttcgttggccttttgtcgtgctatggtcgaagccatggccggagcgtgatgtggcaccatgcattgttgtattcgtaccataatatgtgcgttgttgtatcctaagttctttttgaaggaaacatgattgatttgtttgtattgtaacgttgtgtcattgcaaaagaataacctggtgtaaaactgtaaaatgtgacagtctgccgtttgcacagccctgtagcattttttttttgttcttgttaactttttttttatgaaagcattaactgatttgacttgtcagagttttctattaggaatgccagggagcaatttccctctaccaacttgtacgtagaaactaggaagtactagtgtggtagtaatttatgaggccgttgatcctggcatctccaccgatacagagtgtggcgc

SEQ ID NO: 19274 - DNA, 201 bp, Zea Mays
atatataataacagagtgtatagagataaaagtcacaatataatcagagtacttattacatagcgaaagtcttacaaaataaaagataaatataaaacaaactaaggatcatccttggcgcaagtcaactgggagacgccacctagatcgaatcgaactcctcgatacgtgactcctctttaaccacctgttcttctcctg

SEQ ID NO: 19275 - DNA, 193 bp, Zea Mays
tacaaaataaataattacattataaggagacaacggtccagcaatccaaagttgactgggagacgacggcctagatctctcacgaactcatcgcagcattcaccttgcgcctcatcctgcggtacctgttcttgacctgtggggggtgtgagacagcaagagtgagctcacatacgttcatcgctcaacaagt

SEQ ID NO: 19276 - DNA, 189 bp, Zea Mays
ggggtggatcaccttgaggtcaggagtttgagaccagcctggccaacatggtgagaccctgtctatactacatacacaaaaactagccgggcatggtgatgggcacctgtaatcccagctactcgggaggctgaggcaggagaattgcttgaacctgggaggcagaggttgcagtgagccaagtcacac

SEQ ID NO: 19277 - DNA, 798 bp, Zea Mays
gtagaacgcgtcaccgaagcaaatctagaagcaaggaacaaggacgcggcgaggtccacctccagctctacctgcccggctggcggctgcccccgtcttcgtcttccttaatctcaaattcccaatcctcctccgacgccttgtttctggatcatccagcggggggacgccggtgtattgctcggtcctcctccctggttgcccgaggcagccgtgacggaggcggaggtagcgggggggaccatgtacagatcggcgggggtcgcgatggcgtggaacgtgttccggttctgcacggctctccgtgggctgggttccatcatgatcctactcgtcctcgccatcgtcggcgttacctactacgctgtcgtcctctgcaactacggccccgccctcctcaccggcggcggcaccactctcgccgcgctcgctgtcctgctcctcttccactttctgcttgctatgcttttatggagttatttttctgtggtgctcactgaccctggttctgttccaccaaattggaatcttgattttgatgcggagaggggagaaactgctcctctcactagctcagagttcagtagccagatgaattcacagcaatctgtggctcttggcaatacggcaaatccaagggctaggtactgtaggaaatgcaaccagttgaagccacctcggtgccaccattgctctgtttgtggaagatgtgttcttaagatggatcatcattgtgtgtgggtggttaattgtgttggggcactgaactacaaatactttcttctgttcctggtcggt

SEQ ID NO: 19278 - DNA, 520 bp, Zea Mays
tttaaaaaatagtatcctgaacaccgtaattgaagttttagtattataaaccgtttagctttggttttttctatcggactgtgatttagccaatgttcagctactagtacaagctgttacggcaatccatctcactgccccgttcttagaacgaatatgtgctggagctcctctcgtgacgctcttctctcccggcgctggagctcccctatcaagtcttgtccgacggcgctccggggcgctcctctccctggtcccggcggtgctcctcttcctgatgttgatgattactcggcccagccagcagtgcttccccgccagcagtgcttccccgccagtgcttcctcgctcctggctgtgcttccccgcgaccggttatcgttccctgagacgctcggtctcgctcccgacctcaacaatggagaccccgccaggagcgatgacgtcggcaccggctgttgtcatccccgatgacaaccatggtgcaaatatggtacaaactggcatataaggagcaaat

SEQ ID NO: 19279 - DNA, 650 bp, Zea Mays
aaagccgcatggatacccggacggagagtgatgtagccgtaggcccactgcattgattgcttgcgccgcgtacttttacaccgggatcaaactccagtcggtgaagctggcaatgaagcacctgaaacgggtttcctccgagctcgaggtgatcaagggaggccctgaagaggaggagcaggagctgatgctccaaggagtacggttcgccttcagggtacaccagttcgcaggtgggttcgacgtggacaccatgcgagccttccaggagctcaaggagaaggcgtccatgtgccgggtacagcggcagaagcagcaccgtcacctgcgccagcacaggctcgttgccagggcctgagaggaggagactgaggagtgtgtgaggaccagagcatgcagttcttattttttatatggtcggattatctatacgccatcatctcgtcgtcgccgccacagtgccatagtatgatttgttcattgtttttttttttgcgagaaatagttgatcgtgtattctgctgtaaacgctccagtactgtaactaatgaacagcctttgtacctttttttaggagaaatatgtgtttattctctttcgttcttccgatgggttagaaaccagcttagaaaacttagtcatgtttgagt

SEQ ID NO: 19280 - DNA, 2205 bp, Zea Mays
accgcgtccccgcccccgtcgggcaccaacccagcccaacgctctcccccctgctcctccccttttcctctgcccaccaattgatagctcacctcacctccgcgcccgttgtttcgtgcaccgtacttcacctcccaccaacctctccccctcaaaaactatccacccctccacggctccacccctacccgccgacgagcgcgatcgattgattcggttcgagccgggcggaggaggagggagcgccgcggggcggggtgagcccaccagatccgactaccgcagcggctatgatgaagtcgctgctgccgcagagccagctgcggcgctcggcggcggcggccgcgcggtcgtcggcgggcggcgccgcgggggcagacggggctatgtccgacggcggcggcgcggggccgcgggcgcccgcctcctccaccttctggttcctgctccacgcgctctgctgcctcatctcgctcttcctcggcttccgcttctcgcgtctcctcttcttcctgctcttctccaccaccgcgctctaccgctccagcacctcctcctcctcggccgcggtccttcgcgccaccaccacgacaaccaccaccacgaccaccacgacgacgacgaccaacaccttcacgctctccttcgccgccgccaacactcccccttccacccccgctaaccgcaccgcgctggatgtggccgacaagggggcggcgtccgggaacccacagagtcacgtcgtggtggggaggcacgggattcggatccggccgtggccgcacccggaccccgtcgaggtgatgcgggcgcaccggatcatggagcgcgtgcaggaggaacagcgccgctggtacggcgtcaaggagccgaggcaggtgctcgccgtcaccccgacctactcacgcgcgttccaggcgctccacctcaccggcctcctccactcactccgcaacgtgccgtacccgctcacctggatcgtcgtcgaggcaggcggcaccaccaacgccacggcgtcaatgcttgcgcgctctggcctcactttcgttcacatccccttccctgaccgcatgccccacgactgggccgaccgccacgccactgagaaccggatgcgcctccacgccctacggtttccttgcgcagcgtgatccgcgagaggaagatggatggcgtagttgttttcaccgacgacagcaatgttcatagcatggagctgttcgatgaggtgcagaaggtccagtggatgggtgctgtatccgtcggaatccttgcgcatactggcacggcagaccaactacggctcagcgaggaggacaagcagaatatgcctcttccagtccagggccctgcttgcaactcctcagggcatctgattggatggcacacgttcaactcattgcccttctctgggaagacggccacagttgttggtgaagcagcccctgttctgcccaggggtttggagtgggctggttttgtgttgaactcaaggatgctgtggaaggaggctgacggcaagcctgactgggtgaaggatcttgatgctgtgggcgagaatggcgaggagattgagaacccacttactctgttgaatgatccgtcctctgttgagccactgggcaactgtgggaagaaggtcctactgtggtggcttcgtgttgaagcacgggctgatagcaagtttcctgaagggtgggtaattgagccacctttggaagtcgttgtccctgcaaagcgcactccatggcctgaaacaaccaccgagctgccagccgagttattggatgacaagcaagagcaggaggataggcgcttgtcaagagccaacaaatcatctcggccccgaggcaccacgaagcggaagggcgaccctcaaggacaagataactgatgcagaacgtactggccttgtgatgtatatcttacaccctgcaaaaacacagtagcaagcatatcctgttaatctggcggtgtctgtttaatttttcttttcttttctgatgtttttgctcctgtggcgatggtccacgcttgggtatgttatctgtagagggcacatttttaaagtagtggttgtatcttttgtgttgaaatgtacaatgcattgggagctaaaaaaatggtggatgaatactggaagtctgtctatggttctgaagaaagtactcaactcttgcatgccggctgatggctgggtgcgca

SEQ ID NO: 19281 - DNA, 3571 bp, Zea Mays
tgaatgttaaattctgcaaactttagatacacaaaagagggtgttccacttcggcaagggcaagagcgagggcaacaagaccatgaaggaactgctgggcggcaagggcgcgaacctggcggagatggcgagcatcgggctgtcggtgccgccggggttcacggtgtcgacggaggcgtgccagcagtaccaggacgccgggtgcgccctccccgcgggcctctgggccgagatcgtcgacggcctgcagtgggtggaggagtacatgggcgccaccctgggcgatccgcagcgcccgctcctgctctccgtccgctccggcgccgccgtgtccatgcccggcatgatggacacggtgctcaacctggggctcaacgacgaagtggccgccgggctggcggccaagagcggggagcgcttcgcctacgactccttccgccgcttcctcgacatgttcggcaacgtcgtcatggacatcccccgctcactgttcgaagagaagcttgagcacatgaaggaatccaaggggctgaagaacgacaccgacctcacggcctctgacctcaaagagctcgtgggtcagtacaaggaggtctacctctcagccaagggagagccattcccctcagaccccaagaagcagctggagctggcagtgctggctgtgttcaactcgtgggagagccccagggccaagaagtacaggagcatcaaccagatcactggcctcaggggcaccgccgtgaacgtgcagtgcatggtgttcggcaacatggggaacacttctggcaccggcgtgctcttcaccaggaaccccaacaccggagagaagaagctgtatggcgagttcctggtgaacgctcagggtgaggatgtggttgccggaataagaaccccagaggaccttgacgccatgaagaacctcatgccacaggcctacgacgagcttgttgagaactgcaacatcctggagagccactataaggaaatgcaggatatcgagttcactgtccaggaaaacaggctgtggatgttgcagtgcaggacagggaaacgtacgggcaaaagtgccgtgaagatcgccgtggacatggttaacgagggccttgttgagccccgctcagcgatcaagatggtagagccaggccacctggaccagcttctccatcctcagtttgagaacccgtcggcgtacaaggatcaagtcattgccactggtctgccagcctcacctggggctgctgtgggccaggttgtgttcactgctgaggatgctgaagcatggcattcccaagggaaagctgctattctggtaagggcggagaccagccctgaggacgttggtggcatgcacgctgctgtggggattcttacagagaggggtggcatgacttcccacgctgctgtggtcgcacgtgggtgggggaaatgctgcgtctcgggatgctcaggcattcgcgtaaacgatgcggagaagctcgtgacgatcggaggccatgtgctgcgcgaaggtgagtggctgtcgctgaatgggtcgactggtgaggtgatccttgggaagcagccgctttccccaccagcccttagtggtgatctgggaactttcatggcctgggtggatgatgttagaaagctcaaggtcctggctaacgccgatacccctgatgatgcattgactgcgcgaaacaatggggcacaaggaattggattatgccggacagagcacatgttctttgcttcagacgagaggattaaggctgtcaggcagatgattatggctcccacgcttgagctgaggcagcaggcgctcgaccgtctcttgccgtatcagaggtctgacttcgaaggcattttccgtgctatggatggactcccggtgaccatccgactcctggaccctcccctccacgagttccttccagaagggaacatcgaggacattgtaagtgaattatgtgctgagacgggagccaaccaggaggatgccctcgcgcgaattgaaaagctttcagaagtaaacccgatgcttggcttccgtgggtgcaggcttggtatatcgtaccctgaattgacagagatgcaagcccgggccatttttgaagctgctatagcaatgaccaaccagggtgttcaagtgttcccagagataatggttcctcttgttggaacaccacaggaactggggcatcaagtgactcttatccgccaagttgctgagaaagtgttcgccaatgtgggcaagactatcgggtacaaagttggaacaatgattgagatccccagggcagctctggtggctgatgagatagcggagcaggctgaattcttctccttcggaacgaacgacctgacgcagatgacctttgggtacagcagggatgatgtgggaaagttcattcccgtctatcttgctcagggcatcctccaacatgaccccttcgaggtcctggaccagaggggagtgggcgagctggtgaagtttgctacagagaggggccgcaaagctaggcctaacttgaaggtgggcatttgtggagaacacggtggagagccttcgtctgtggccttcttcgcgaaggctgggctggattacgtttcttgctcccctttcagggttccgattgctaggctagctgcagctcaggtgcttgtctgaggctgcctcctcgttggcaaccggattgcctgctgctggtggatgtggtgatcaacagtattattacagagccatgctatgtgaacattactagtagcagtgctcataaaagctacaatcccatctcccttttttttccagtcatgtaaaacttccaaactgctccatggttcaaaactctgttcttcaatacatcatcaattatcgattatatacgtggcaaggttttttctttgtttgcttttttcttttctttctggcatgtgtttttttggttttcttggtgtgtgtgtgaggtgtgcatgtcgctgttgaggcccttgctgcacagaccacctcaaactttaagcctcgaaaaagctggtactatttttttagaactctggagtctggtcaatatgcaattgactggtttgcttctgaggctcttcttgcattcatgcctttacggccactctttggcacctgtaacacaggtaaaaaaaatgttaaaagatggttcaggaacacagcagttttcaagccagggaaactgtactgtacagaaaccaagagatcgttcgacatacctgtgcccgcacatctacctaacattctcgaggaccattgccgatcaaaggcccacacatcgtcttcttgttccggcagttgataagaacctagtacataagagacagtacatcatcaaaataaggagcaggtgaaaagcaccatctgcagtatgcagtatgcaacctggcacatggcatactatgtgatactgtacatgagtacaggaaaggatagcttattacaatatcggtgagttacgacacacaaattatagacatttgtcaggataaagaagttatgccgttttgttgcgcagtgtcccacgccatgattaatccaaaccactgattgactcattttttt

SEQ ID NO: 19282 - DNA, 1854 bp, Zea Mays
gttcgttttcttcagtttatcaactgttcattctgaagttgataaatgcagggaaggattaactgaaaactcagataaatcgctacatacattattcattgttttgaataccacattctccaagttggaggtatcacttagaaatgcttgtgagggtcaagatgaactatttatagatgatggaaacttgcatgaactgtttgggaaattaccagaagttgatgtagagagttcagaatggacagaggccttggcaacagatggtacaagtttaatctatcaaaaccttcagaagctagatagttttctgtcctctcagctctcaagccataaaagaccaaacaaattgaccatatattggttaccctatacatgtggagcagtaggtctctctgtgtgttctctgtggcttttacgccatagcagtttgatgggaagccctgatatcgacaattggattcgagatgctaaggagtctgtggctggattttgggatgaacatgttgagaaaccaatcatttccattagagatgagcttttcgagacattcaagcaaagagataaaggtgtaatggaaaagcaagaggtccaactaactgaagattcattgcgcaggatgttagttgccttttgtgagcaaacagagggtcaaaagttgctggaagatttaccagtgcaggcgatgttggagactctcacaaagagatacgagaaggaattgatacacccaattcaaaacctgttcagtggagaattagcccgtgctatgcttattcagattcaaaagcttaaactggaccttgaatcgggactactggaaatggatcagattctaagggcaaatgctataaactttgctgttcttgcagcgcttcctgcttttggtctttcacttctgttgcttgtgttactgcgagcatgggttcagcgtgaccatggtgctgagggaagaggtaatattgcacgatgtcaacggaggctgcttcttgttgatgtagagagaaggcttatggagtttcaacattacagggataatggaatggaggaagaggcacggtgcaagtttggcttagtactttacacgcttgatagactctgcaaagctgttgagtcacacgcaaaagaaacaggcgaatggttaagcttgagacaagatatttttgatctgtcgaagctcgacatgggaatgccagataagatgattgtcgtttcacggttgaagtggatgtataactgcttgcttccattctcatcgagccgtttgccacgcctctagagcagtgagcaactggacgtcgtgtgttgcattttggataaagattttgacacggatacctggaactctatgtcggaaggatggttctttcatgcccacaagatgttctgtagattttagcagagctggatgaagcatatcggaagggggcagattgggtggatgcagtatccatcgagccctccgttgacaattcttgcattgctaggcatgttgatttggattggctgttgcaccgaatggtttgcgtcgatgggctacatctacatgtgtgcgagcattgtaccctttggccttgttccacttgcaattccaattccaatggttgttccatatcccatactagttcataagtcataacatgacaacagaatgctcttcttttatctattccgcagagatgggtacaatcttatttaactgtttcatttgaaagaacgtgttattattcatgtggccacacgacaccctgggttcctttcacttgccgatgatggcgagcagcgcttccttgtagtggccatgggtgttcttggccacggcgtcggcgagctttgtcccgtactgcctggtgtagg

SEQ ID NO: 19283 - DNA, 1194 bp, Zea Mays
agataggctagcgcagtggtgaggaaccttcccactgagccaaaggtcctaggttcaatgcagtctctctgcaaaaatacaagggcagagggataaagatggtgatggaaagttaaactttgaagaatactttactgggctacatgaccatatacatggttatgatgacgagaatgcagatatttcccaaattgggaacataacagttgcgaaggatcggtttttcaaacttgacaaagataatgatgggtttatttcggagcatgaactagagcctgttcttgataagctctatctttctgaacgctattattctagacagcaagccatccatgctatttcagaggcagacaaagatcatgatgggaggctgactttggaagagatggttgagaacccctatgcattttatggcagtgtttatctcagcagcagcgacaacgacgacgaagactacttccacgacgaatttcgctgagaccaatattgttactatcctgacacacgcaaggaacacagctgacgagcatcaaggtgcgcacagaggttcggaacgtctagcatactatgtgtgatgcccgggctgggctgctgacagaatgggagagcttagagttacggccatggagtgaggaactagtttttagccgcttggttcttcaagttgtttgtgttaaatggaacgacgacagcatcctagtaccggccaggcccagcagtgatggatgttacgcggcaagttgagccacctttatctaggctgagctgcattggtctccatcctgatgttcctgcagcaggggaaatgtagttcaggagaacaatgagtggaggagcgtcatctctgtggcgagcggcttcagaaatctaacgggaacgtgttgtttggtgtccgaaatgtatgtgtgtgtgtgtatgctatgaattcaattatttctggcagaatgtcgcagtctagcgagctggcccatcccattgagaaacattccatcggctgcatgagtgcgccatggacgggagatggatgtgccgaattattggagggaaagggttcactttattcgtgcctagtcatcagtgtcatcagtacggaggttacagcgtatccacgtggtctgccacgtcatgtgaatcccagccgtggcgcaggtacattctcgctgggtcttgaactggtaataaaagatatttggc

SEQ ID NO: 19284 - DNA, 1038 bp, Zea Mays
ctcagtattttctgcagcatgtgcacttgggttaggactgccaaatggtttgttgggggtgtgattccagctatgcttaccttacggcgtccattctcttgacatgcagctagtgggttaaagcaacataatgcttccgtgcatttaatctatgcatagggctgacaaatgtgtactagcatcttctggctttcagggtgatattaaagctctgcacaagaacctagctgccagagaattgctataccaacaccagcataacaaaaggatgagctgccctgccatggcacagctcctctccaataccctgtactacaagcgcttcttcccatattacgccttcaatgtgctcgggaaagggtgtgttttcacctatgatgcagtaggttcctatgagagaactggttatagtgctcagggaacgggatctactttgattatgccagtcctggacaatcaactaaaatcaccaagtcctctattgctccctgccagggatgctgtcacaccattgtcggagtcagaggccatcgatctagttaaggatgtgtttgcatctgcaactgagagagacatctacactggagacaagttggaaattgtagtcatcaacaaagtcgggactaagcgcgagtacatcgacctgaggaaggactaagccaacgcttcagttgtgctgcagctgtcatttgcttcggacatgtttcctagtctggggatttatgtctaaagccgttgcttgcatagaaacatatgttattacttgcatatgtcctgtaccagggttcagtcagcttgttttttttttgttgaaacaaattgcttggatattgaagcggtacttactggcggaaagtctatatttggttgggagcttaacattaatggcctcatccgaaatgtcacaatcacaagtctctttatatctcttctactcattcggattcgaattgccttttgtctttaaagatctttaacttttatgtagtacctcccttttaaattatatgatgtttttagtttcttttagtatattgt

SEQ ID NO: 19285 - DNA, 921 bp, Zea Mays
ttttattattatttcaaggtccttttccaaaatgattctcctgcaacattacttgctcgcgtgatgggcatcattggctccatagaacaagctatgcttgcacagggacgcgacacctacaaatatttcacaaagaaccacatgttgtacgaaagaaatcaggaaagtaacaggcttgagtacttgattccgaaaaagacatccttgcggcaccgattgcccatggctgatcaagggtttatcgagtttgttgcgtaccttctggaggtgaacccaaagaagcgcccaagcgcctcagaagcattgaaacatccatggctttcttttccttacgagccaatatcttcatgaggctaactgctattggatcctgtgtggctttagcatttgtctcaacacctaagcaccatgaaattttgatagatcaagacggaagattttctaccacgactgagccatggcatcagccgaaatcccaaacgcaaatgcagattcggttcgatcatgtcttggtgccacaatcagctggtcttaggcgccatgtaaaatcaatgcatgccatgtgttgtgcttgtaatataacttgttttttttacccttcatttccagccccgatgtaacaggccattttggttttctaggtacttggtgactcatttctagcaatagggctgtcatgttgtacatggtgtgatcattgttgagcggccccgtgccatgctgtgcacctgttacgcttctaacccaagtcatgaatgccgttcgtcgtgcttgtctttgaaggagcttaatggtcttgcatgccttttaggactgccaacgagtcgtatagagactgtatatgatgatgtataatcatgtatctagggaattctcaaaaaaaactagaaaaggtcgctaggtggtgtacacgttccggat

SEQ ID NO: 19286 - DNA, 1847 bp, Zea Mays
cacgcgaggcggaaggggaggcgagtggcgcgggccccactgcagctactatctcctttggcgtcgctgtccagtagtgcgtcagcggctcagcgcagcgtcgcttccaattataagtagcgtggccagctaccatctccccaacctcgcctccccccactccttccctccctccctcgctcacccagtggggcagccaaagccgagccgcaaccgcaaagatcttgcgcggcctcctttccccagctcgtcactgtgccgctcgtgccatccaccctcggttcacccaaccaacaatccatccgccaccacaccccgctgcggcgatgtgcggcggcgccatcctctcgggtttcatcccgccgtccggggtgccggcggcggcagcggcggccaagaagaaacagcagcggcgtgcgacggcggacctgctgtggccggggcccggcaagaagggagcgccccgggaggaggacttcgaggccgacttccgcgagttcgagcgcggcctcggagaggatgacgacgtggacggggccggcgacgaggtccaggagcttcctctgccggagccggcgaggctcgccttcgccgccgcggttggggcgccgcgcactgcagttgacggcgtgatgactccaaaggatggtgaaggagacatgcctactaccgctaccaactcagcagcaaataagcgcaggcggaagaaccagtacaggggaatccggcggcggccctggggcaagtgggcggccgagatcagagaccccagcaagggcgtgcgcgtctggctcggcacatacagcaccgccgaggaggcggccagggcgtacgacgccgaggctcgcaggatacgcgggaagaaagccaaggtcaatttccgggacgaagcggcggcagcagcaggtgctcagaaggcaccagccgcaactactccaactgcttgtggcaacgcagcgaggctaggtcctccacctccaccgccgaagttccgtgctgacgaggttttcgggaacatgaacggtggcactggcagcaacgatctgttcgcgattatgttcgcgttcagtgacagtagtagtaaggtcgttcgtgtggagccagagcagcgactcgtatggctcttgtgacttggggtgggagtgggactgggacgatgacaccatgacctcagactacgcctcagtctttgctccagctgctcccagtaacgttgtgccagcatggtacacgcaaggtggaccggtgtcgaagagaacgaggagcagctacggctacggtgcggccatgccgggcggctttgaccctgagacgaactaccagtaccagccgttgccttatgtcgtcgagagcagcccgtcagacggcgcgtcgacggacgacatggactgccttcaaatgatgcgggctggtgatgttccacaggatggggcgagcagtggtggtggtggcggcgacggcggcgatatctggagccttgacgagctgctcatggccgctggcgcttactgagaaaagctatgtgcatcgcattcgcatgtgctagacggctacttgctgtgccgtgaatggagtgtttctcagcttcgttttgcttttaattttttgttatgccaggtctcctgcttgtgcttgtggtgatgatgcaggagagccatggtgggtactatgcttttgctgccagtggaactactgcaggtctttgtctggaagcactcgatctcgctttctacgcaacatttcttttctgtttcttgggggaatggtaggtgccagccaaggccgatggtctgtgtcaccagaaatcgagaaagatctagatgacctaaacaaggttgctgtttgcc

SEQ ID NO: 19287 - DNA, 553 bp, Zea Mays
gttaggaatttttgttgttgttgcaggaggttaggcattcttggcatatgaatcacaacactaccatgtgtcacaaggtcatgacagctgtttatttcctggaagtaagctgctgaacaacgccactggatccggcaacacgaacacatcttcgacacctacaagtgacgctgagggatctgcgatatggagactaagaactgggagggacaaagggctgttgctcttccttcggttggtacttagcattgcggtggctatcgtggtggattcgaacttttggacatgacaagaggttgctagctgtataataaactaaagccagaaattttgggtggtatgttagaggaggaaggaaggaggtgggcgggggattgggttatgcttagtgattctttattgttagataagcattaataaattgctcatttttcttcatctgatgaaatgtgtctataatttgttgaaatgtcccgatatttcaatctgctgggttcatgtccatacaatagttttttttatcaaattactgtaggattggcctacagttttt

SEQ ID NO: 19288 - DNA, 2097 bp, Zea Mays
gtgacgactgtgcctctgaatggatcctatcctacacaagtcatgggggccgccgccagctcacacacactgccgacgctgccgtgccactgccatcctcgagcacaagggaccgaccagacccgatccacagctcatcacacacacacacagtggcgagctcgtcaattgcaggcaagacagcaagcgcatttacacagcacgctgaaagccgggacgcagagcagcttttgcgccttgtcccctcctgctcgtcgcttccctcactctcacagccacgccacgccacgagagaagaatgccgccgacgctgggcctgctcctcgcggcggcggcggcggtcctgctgctgctgctgccgccgccaccatcggcgggggcgcaggagacgtgctggtcggggccggcgccgcggcgcggggcgtggatgtccgtggccagcttcggggcgcgcggggacgggcagacgctcaacacgggcgcgttcgcgcgcgccgtggcgcgcatcgcgcgtcgccggggcgcgcggggcggcacgctgctgtacgtgccgcccggggtgtggctcacgggccccttcaacctcacctcccacatgacgctcttcctcgcccgcggcgccatcgtccgcgccacccaggacacgtcgagctggccgctcatcgacccgctgccgtcgtacgggagagggcgcgagctgcctggcgggagatacatgagcttgatccacggccacggtctgcaggacgtcttcatcacaggtgagaacggcaccatcgacggccaaggcggcgtgtggtgggacatgtggaagaagcgcacgctgcccttcacgaggccgcacctgctggagctcatgtactccaccgacgtcgtcgtctccaacctcgtcttccaggactcgccgttctggaacatccacccggtttactgcagcaacgtagtgatagcaaacctgactgtgttggcgccgcacgactcccccaacaccgacgggatcgatctagattcaagcagcaacgtgtgcgtcgaggactgctacatctccgccggcgacgacctgatctccatcaagagcgggtgggacgagtacggcgtggccttcggccgcccaagctccggcatcacggtccggaggataaccgggtcgggcccgttcgccggcttcgcggtcgggagcgagacctcgggcggcgtggaggacgtcgtggccgagcacctgagcttctccggcgtgggcgtcggggttcacgtgaagacaaactcgggcaggggcggcttcatccggaacgtcaccgtctcccaggtgaccctggacggcgcccgctacggcctgaggatcgccggcgacgttgggggccaccccggcgcgtcctacaacgcgagcctgctccccgtcatcgacggcgtggcggtcaggaacgtctggggccggaacgtccggcaggccgggctcatacggggcatcagggactcggtcttcagtaacatttgcctctccaacgtgaagctctatggcattggcagcgactccatcgggccgtggagatgccgagccgtcagtggcagcgcactcgacgtgcaaccgtcgccatgtgcggagctggctagtacgtccgggacaggtttctgtacctgaatcagtttttccgcctcctatagcagcaataaagacgtcagcatttctccattttgttcatcacctacagggccctttgtttctttggcaaactcttctgcgattcagctgtcactgttgaattctgctgttggcagaggataatctatttttaccagcagccattgcaagagaattatttttacgtccgtgaaatggtgagaccgatcagcattgcacatcctggtgttggtgtaaccagatcccccactgccgtgtgggcgcgggacactgccggccccacacgcagtgaccggcactcacgggtaccatggacttgtttggaagcaaagagaataaaaaagatgagttgtatagtgtttaatgttccagaagaagagaaagagaagcttcttgtaacacccaaagtcttattttggaagactagtaaaattctcccaatatttttaagttaaaat

SEQ ID NO: 19289 - DNA, 100 bp, Zea Mays
tttgaaagttgaaaatttcctcttccgaagcgtcttcgactatttcctttttcttctcaggctttgtggccatggtttcttcggtggctgcagcagtttc

SEQ ID NO: 19290 - DNA, 179 bp, Zea Mays
atcgaatgtcacatctttacttcatagcaggagttctatacaaaataaataaataattacattataaggagacaacggtccagcaacccaaagttgactgggagacgacggcctagacctctcacgaacacatcgcagcatcctccatgtgcctcatcctgtggtacctgttcttgacc

SEQ ID NO: 19291 - DNA, 1128 bp, Zea Mays
tttttaaattattgtttatgtaatctaaagtttagaaaaggttgtacctgagacgaaatccgggcggcagcagccatcggaggctgggcggcagccgccagcctcccgctcgcacgggagccacacacggacaccacgctgcgttcactcgcaaccgtggcccgtggcccgtgggtttcgcctgtggtcaccgcgaggccgcatccagtcgcccatgccgccttccgcatcgatgccggcgacgcacacggccgtgtacgtggcggcggtgcccctgcgggcgcccaagggccccgcccagctgctgatgtcggcgggctactcgctgggcatgtgggacctgcagcacttcatggtgctcctccgtcccgacccggcgctggcccaggcgctggtcttcgatttccagccgcgggacccggaggacgtcctcgccgcgctcgcggtgctgtcgcggagagagatccctggcgtggttcgcagaagaacgctgcggagggtcccggacgggcggtgctggctcgtggggcactgctgcgacgccgtcggtgccgccacaaggttcagcgagcggtggacgaccggcctggtggtcggggagcacgactgccgggactacaccaacgggctggtcgaggtcctgacaggtgaaaaacgtgtcctggagtcgctcagattgcgcggcaacggcagcagcaccagtggggcggcgccgccgtgatggatgatctaaactgtacggactacggtcatatatcggattctataaactggagacccaacacgcaatgcagaaatttcatggaaacgaggagacgttttgaaagggaaaaaaaatgaggagagaaaacaaagaagctactactcaagacaaggcgatggtgtaacgaagaaatgaggccacttgactagttgactgtgaaagatactagaggtgctacgtgaagcaagaaattagacacgctatgtggagaagcaccgttgactaagtaaacttaggaggtgtttggtttgaagaaatcaatctattctaaatgaggtggtatatcatgagtctattatacaaattttgtggaataaacttattctttatattattactaattattagcccacgtagaatgaaat

SEQ ID NO: 19292 - DNA, 1268 bp, Zea Mays
cggaacagttggcgcgtgagcgagtttcttaactcctcgccattggaatcggagtcgtgtattctctcacaccatcctgctcctgctcctgctcctgctcccttcccatccggtctccctttcttttcgcggcctcgcctcgcctcgcctcgcctcgccggcggcctggtggtcgcggtctcgctccagcaccgataaagcccacctcgagttctgctctgctccaccccccggcttcagccgcagcttgtggtggaatcggagcttcttatccgagagcagacatggagcagagtagtgatgggttgccaatcagccagcggagggctaacagttcaacaaaacactcaagcaagtcagatgaggttgctgaagacatgttgcagagtaatataccacatgaaactgtgagactgtgccaaggtgtggaatcagaagagatagagggacctcctcacaagaaaattgtccagaacttcacggagagcagtagttccaaaaataaaaaacacagatggtcatcagaggaagatgaggcactaaagcaaatggtaaaaaaatatgggacgaaaaactggcgaactattgcatgtgctatacctggccgaaatgccaactcatgcctttcaagatggaagtaccttctagacccagcaataaacaaagagccttggtcgcaacaggaggaactaagattgatccgtgcgcagcaagtttatggaaacaaatggtgtaaaatggtcaaacatttcccagggaggacaaatgatgcactcaaagaacattggagaagtcctatgaaaagaaaactggattcatatttggcctcaggattgctcgaacatgttccagacctgcaagatgatgtatcatttccacagacacagaacaatcaatcagatattccaaaggactgcaaagctgcatctgatagaaatagattttcatcacgtttatcaacagaccccaaacttaaacaagagctcacagaactggatgaaaatggtaatacatcagcaagaaaaagctctgacttattctatgctaaagcacctgatacccattcagccaaaatctcagaaatgagaatggccaaatcacagcagtgtgcaggaacaagaaagaagctggcttttctgtcaactccagtggagctcaagagtgttgtaccgcatgaaaccaccaaacattgccaagatatggaaccagaaaagacagctatatgattatacctgggccaattccaagccatatttctttcacacact

SEQ ID NO: 19293 - DNA, 3029 bp, Zea Mays
ccatctcctctgtctccgcctcgtcgcttccgcccactcttcctcgccgctgcctcacggccccattgctccgagcgcggcgccggtcgcgatccgaccgggggtgcgcggcgccgaatggtgtgatcgaccccgtcgggaattgggatcgaggtcatgcagcgggctccggagcgccgccgcggcgccgggccgctcctgctgctggcgctgctcgtcgcattggcggccgcgcccagactcgtgcgcgcggtcaccgacgctaccgacgtctctgccataaacggactgtacatgtcactgggatcaccacttctacctggatggactggaaatggtggagacccgtgcggtgagagctggcagggtgttgtgtgtaccggctcttccataactggaataaccatgaatgctgcaaacttgggaggacagttgggaagtttaggaaacttcactgccatcaccagcttagagcttaacaacaataatattggtggaaccataccggaggacctacctgttacattgcagagtcttttcctctctgctaatcaacttactggaagcatcccaagttcactgtcaaaactcgaaaacttaacagccatgtcagtcaacggcaaccatctaaatggagacctaccagacacttttgattcactcaatagacttgtaaatttggatatttcttcgaacaacttgagtggtgtgttaccatcttcaatgaaaaacctggcatctttgacttcattgcacatgcaagataatcaactgtctgggacccttaacgttttgcaggatctcccactgaaagacttgaacatagagaataatcttttttctggaccggtgcctgcgagtttgcttaacataccaaacttcaaaaaggacgggaatccattcaataccagcatcgtcccatctgcatctccgccttcaacaggaccagctccaacaccagcagcatcaaaaccagctccaacaccagcacccaccacttcaaattcaacgcccccagcaccagcaccctcatttccttcaagatctcctcccccgcctaaaacaacctcaaactcttctgaaggatcaactacccgagatagcacttcaccatctaagaaacacagtacatcaaccctcaagattgttggctttgttcttgccggagtagtgctgtttattatcatagtcctcctagtattattttgtctatccaagtaccaagagagacggtcgagatatgatcataacagaagtcagcaggcaagggtgcatcatagggttgaaccgcaaatcaagccacctccagtgcaacaaagcaatgatcttaaaaaaggtgaggtacttgatagaaggggccatgaactaagttcatcaacggcagctctcgcaaagaaatctcctgaaaaccaaaaggagcatgtaattaattttgatcgaacagattcagatctgtttcctgtttctctaccaccaccacctcctccacctccattacccccaattgaaagagttattgcaaatcccattgttccaccagaaaagcgatatagtcctccaccaaagacaagtagctctacttctgccacatcattctctattgcatctcttcagcaatatacaaatagcttcagagaggagaatgtgataagagagagtagattaggaaaggtttacctagcagagcttcctgatggcaagttattggaggttttgaagattgacaatgctaatggaagaatatcagtagatgacttcctagaagaggttgaatgtatcttagatatcaagcatcctaacattcttgagttagtcggatactgtgctgaatatgggcagaggttacttgtgtacaatcactttagcagaacgacactagatgacacacttcatgatggagaggatactgaaagtgcactgtcatggaatgcccgcctccaggttgctcttggttctggaaaagccttagagtatctccatgctagcttccaacctccaattgtgcaccagaattttgaaccagctaatgtgctccttgacaaaaagttctcagtgtgtgttgctgaatgtggactggcagaattgatgccaccaagttcagtcactcagctgtcaggtcggatgcgtgcattactgaactacgaagcacctgagttgcaggattctggggtcgtttcagaaaggggtgatgtatacagctttggtgtagtgatgctggaacttcttactgggcgtaaaccatatgacagttcacgcccgcgtcatgagcaacatcttgttagatgggccagttctcagcttcatgacatagaatccctgtccaagatggtggacccatctatacgtggacaatgttctgagaaagcattgtcacgtttcgctgacataatcagccgctgtatccagcagcagccagaattcaggccaccaatgtctgaaattgtacaagacctagctagacttgtaaatgccaccggtgaggaatcagagtaacccccaaaaaaagcatggagccatggaaggcatacaatacaaacgtcgcgaccaagttacgtgctgtacaatttttttgggaagataattgtcttgcttggtctggggagaatactgtgaagatgtattttcctcagagagcattgcacactaatgtcagattggaatttcatttagacctggctggggagtggaggtgcagccatctgtgcacctgattgttgatcaaatccatgtaatatttttgcagacatgatattatatatagcgacagtggcggagcctccgccaagcgccaaggcccggcctgatcgggcacgtgtccaggcttccgccgaggaacacttgggtgggctctcgatcggcctagcacacggatgtttggatgggtcaggcagtggtgtcgatttcaggccggctccgccactgtactgtatagcaaggtgtatatatagcaagaccccggattcttgtaataatagtcagggattcgttaaatttgttactctaaagctagtcatttacttgttcgcccg

SEQ ID NO: 19294 - DNA, 117 bp, Zea Mays
ggatgacgtgtttgacgactcgacggcaaacgacgcgacgacgagcgacggcgaacgacgaggtcgaccacgcggttgggaattaaagtcgagcgagccgagagggcgcgctgcgag

SEQ ID NO: 19295 - DNA, 1932 bp, Zea Mays
ctctcctaaaactctacctgcggggggtaagacagcctccgagcattatattaagaagaccgtcgagaaaacccccgaatccctggcccacccatacaaagcggtactgtagcccatgtgagaacactaccgcgaccggaactggaccgtagacctgtgctttgtcgttggacagacgaggggattttttaaccacagctgaaattcgctcccacggaaagtcgaacctaggacctgaggagtgctactcagaccacctaaccaactcggctttacctatttctttgtaggtgcaagtgttgaacttcatttcagttcttcttgaacatgcgggggacaaggttattccatttgcatgtcagctatcacaattttttcagatgatatggaatgaatctgcgggtgaaagcttgctacagatacaattactaacagcacttagaacttttgtttcttcgcttggattccagtcacctctttcttaccacatgcttattcctatactgcaaagtggtatcaatattgacagccctgatgctcttaatcttcttgaggacagtgttttgttgtgggaagcaaccctttcaaatgccccttccattgtacctcaacttctggatttattcccttaccttgtgggcatcatgaatagaagctttgaccatctggaggtcacaatgaaaataattgaggattacattatttttggcggttcagaatttttgaaaagccatggtgcaagcctagctaacatcattgatactattgttggaaatgtcaatgataaaggacttctcactgcacttcctattgttgatcttcttattcagatatttcctctggaagctccaccattgatatccagtgctcttcagaaacttaccttcatttcgttgagtcaagatgatggccaaaacccgtctaggacaactgtccgagcatcctctggggcgattcttgctaggcttctggtgatgaatacaaacttttcggcacaactattatcagagcctgctcttttggcaagcatccaacaagcagggatttctgtgaacaataatctgcttttttctttggttgatatgtggatcgacaaggtagatgacgcaaatgctatacagcagaaggaatacgcaatggcactttctgtaatcctgacattacaggtacctcaggtcattgacaaacttgatgacatactgagtgtctgcactactgtcattataggaagccgtgaagtaaagactgatgacgatactagcggcgatatcacaagctcttcatggataggcaacgatggttcaggttattccaacacttcaagcaaagagctgagaaagcgccaggtaaaggattcagatcctatcaaacaaacatcgctagagatggtgttaagagagaacttaaaagcatgtgctgttttccatggggatgcagcattcaacgctgccatcggcaggatccatccatcttcgtttgctcagctgcaacaggccctgaatactgcataagagtgcatagctgcttactggattgtatggagcattacgtggagcaggcattgctttgtgaggtgctgacagacagttgaatcgcggtatgacacagcagtgcagtgcagagagagcatgtcctgatcttccgaaatataattggattggattggattaccgcggtcaatgtggatggccagagtttttatagctgtccttccaacatgactgactcgatcttctcccctcccccttctcaaatcatggccaggcatccatcctagttgatttttatcccttgtttagcgaggtgacgccgagattgttgtttgagaaggaaatctggaatgcaattttgttgtacgttttatgttcccattaggaataaaaatgttctttacattcacgtatatctagattctcaaatatttgtcgacaa

SEQ ID NO: 19296 - DNA, 553 bp, Zea Mays
gctcccccaaattcgtttgtttcccacggcgcaagaaagaaacaagggtacaagaacagcccgctaaaggaaagaaacaagggctacacaagaacagcttgagagctcctctccgatcccgacccaccgcctgcaactcttcttctctcctacgtgttcgtcagcccgctaagtgttaagatggcttcaagtgatggtcaaacagaagctgcggccccatctgtccccaaaaaccctgctatggcatcatgccggaagaagaaaacagatgatgctaccttcctcgaagatctgaaagaccacatcgatgagttcatccatgcctccatggatgagcacaagacctgctttaagaagacgatccagaagatgtttgggatgtcgaaggctgttgcagagagatccgcggcagaagcgaaggaagctggagttgaaagtgctttgccacttcagaccagtgtctcgcagtagaatttcacgttggatgatcgtgtcttctcggtctcggtgtaattgtcttaaaatttagcaaaagcgcgatgataggagcctg

SEQ ID NO: 19297 - DNA, 1568 bp, Zea Mays
ctcgttattaccaatggctctcgtggctacaaaccctttcgcatttggacagtggttattaaagcaaaaaacaaaaaggaaaagaaggtttgccttatgattgctaacaagacgaagaagaaagataccttcgcagcgacacatgtacgtagaattagaaaaaaaaaatgtaagacggcctttcacaaccttttccaaacagtatatactaagccggcctgttaaataaataaaggcaaaacaaaaaaaacggttcacgcacgatgtgacaggacatctagtgaagacaaatgtggtcagaggaggctccccaaccccgaggaggaagaaggggcagcagcatttacaaggcagaggggggacacgaggagagttgcgctcctcaagtcacggcagcaggccctcacttgacttcaattctgcgcagaagagcagaagtctgcggcccctccgttcctccagctccagtcccagtcccagtcccagaccatgccttgcgccgccaccgagctcgtccatggcgagggaggcacggtcaaggtaggcacaacgggcaccatcggctcgctcatgacaagggagctggactccaccaaggtggcggcgccgcaggcagccgcggccgcggccgcgggcgccccaccgctgaggcgccaaggcggcccggtctcggtgccgtgtggcgccaccactccccggaagctcatgctgaggaagagctcgtccgacgtctccagcagcagcagcagcaacagaaccggccgcgtgggcaccgaagaggcgtgcaagccgaggagggcctcgcggacgaacaccttcgactcaccgatgctgcggcccgacggcggcgcgctggtggaccgggccccgagcgccggcagggcgaagaagaaggggacgagcgtgggcgtgcacggcggcggggtccaggtggtggacgtcaagtgcggcaacccgatgagcatgagcagccggctcaggaagctcggcttctccaagctgtcgcagacgtttgcgtagcttcaattctgtgcagtggagcatggcgaggggccgagggcaaaggaccagcgccagcatcggaattgaagggtctgcttgctgctgccctttccttgagggcgtcttcggctttggaggacatctgccatgtgctggatttagtgcagcaatcattcactaacagtgtgagtgtccattcggtccggccttgtgggctgccactgccatccagttcgcatctagctgtagtcgctttttctagctgtttttttctccactatgtggaaactgctgttgcgctctgtgtatggatgatgtgttcaactgtaggtgcaagagcaccttgattagatcttctattttttttctgctttataatatataaacagttataggagggcaacaactaatgtgtaagcagtacttaaatggagcgagccttagtgttagccgcaaactagcaactgaacgtcaaaagtcagcatagtatttgcgaaacaaaatgcccgttctcacaactacagcaaaaatgcacatgcagtgcaatgccttcatgcttttattct

SEQ ID NO: 19298 - DNA, 114 bp, Zea Mays
agggtatgcgcgagagagattacgagttcgaatctcaccattcacaaaacatttaaatttgattcaaaataatagtggaaaatgataggcaatgggtatggtaatgagtagtgg

SEQ ID NO: 19299 - DNA, 208 bp, Zea Mays
ctcggttctgtccagttcgtgtactgctcgcccgtccgcgcggcacgtcatccatggccgctgtccgtcgtcgagtccctatgcgcgcaccagctccctgtgtcgcgttccattcgcctaaaccggagttcgccagccgtccctgcttgccggtgtgctgctgctctagttcggatctcgcccaagtcgctgccatggttgtccagtg

SEQ ID NO: 19300 - DNA, 3775 bp, Zea Mays
ttttcttttgcgcagccaccctctggcttgccgttaatttctttcccgtttcactcctcgcgtttttacacttggcccccaatccaatccccgccaggccgccatgccgacgccggtgcccgccgcgcgccagtgcctctccccgcccgccgtcacggccctcgacgccgccgtcgcctccgcgcgccgacgggcccacgcgcagaccacctcccttcacctcatcgcctcgctcctcgcccccaccgccgcgccgctgctccgcgacgcgctcgcccgcgcccgcagcgccgcctactccccgcgcctccagctcaaggcgctcgacctctgcttcgccgtctccctcgaccgcctcccgtccacccccacctccgcctccacccccacctcagtctccgcctccgcctccgccagcaccagcaatgacccccagcagcacgagccccccgtcgccaactccctcatggccgccatcaagcgctcgcaggccaaccagcgccggaacccggacacgttccacttctatcaccatcaggcggcgcccacctcccccaacgccatcaaggtcgacctctcccaccttgtcctcgccatcctcgacgacccgctcgtcagccgcgtcttcgccgacgcgggattccgcagcaacgagatcaaggtcgccatcctccgccccgcgccgcccgtcccgctgctcggccgcctccccacgcgcgcgcgcccgccgccgctcttcctctgcagctttgccgccgcggacgacgccgacgtcccctcgcccgcgcccgccctcgcgggggccgcaccgggggaggacaactgccgccgcatcaccgacatcctcgcccgcggacgcaaccccatgctcgtcggcgtcggggccgcctccgcagccgcagatttcgccaaggcgtccccgtaccgcatcgtccccatcggccccgcctctgccaataatcaggcggcaccgacgacgcccacctctggccttatcttcagcatcggtgatctcaaggacctggtgcccgacgaggccgacctgcaggacgcggctcgccgggtggtggcggaggtcacgcgcctgctcgagacgcacagacctgctgcccgccaaacccaaacggtctgggtcatgggctggtccgccacctacgagacctacctcgccttcctttccaagttcccactcgtcgacaaggactgggaactccagctgctgccgatcaccgccgtgcgcgacgccggccctgcagcgggactcgtgcctcctcctccagctccagccaccacggtcgctgccttgtccatgcctgccactacaaggctctacgatgtcaacattgcaacgatagatatgagcaagaagttgcctctatcattagaggaagtggcgttacagctgatgctcaccaagaaggtctaccttctctgttgcagaatggcggcatgatgggttctaacaatgagtttgatgcagtcaaggttagagatgatcaaatggtattgagtacaaaaatattgaatctagagaagaagtggaatgagtactgtgtacgtctccatcaaggttgcaatagaatcaacagagatccttgccagttatttccacatcacattggtgttcgagttgacagggaaagatgtgcaaatccaaaccaaagcgcacagacaattgcacttcagagggatattattaaaccttgtgcattgtcttctccatacaccaatataactgcaaagagtatttcagcaccagaccaaataaatgcagaccttgtactaaaccttcaagtgaggcagtcgaggagtaatgaaccccttcaaagtggggttgtgccattccaacatatcaactcatcaaattataacaaacccgaagaatcatctgctgcacctgtgacaactgatttagtgttggccacccctcgtggatcttccttcaaggattcaagtagtgccctgtgtaaacgtgtagaggacattgaagagacaatccagctgatgcctaacaaggttgacgatctgaatcttaaacctcctcacttgtctatacaaccttacacttgctccaagagttcctcatcaaattgggagcaaacatcacctagtgctctgcattcaacatctttaggaggcacttctgcctttggccaatggcagaggccttcaccgctcgcaacacaaagttttgatttgagcaattacaagctacttatggaacacctgtttaaggttgttgggaggcaggaggaagcattgagtgctatttgtgcatccattgtgcggtgcaggtcgatggagaggcgtcgtggtgcaaacaaaaagaacgacatatggtttagtttttatggccctgacagcattgccaagcggagagttggtgtggcacttgctgagctaatgcatggtagctcagggaacttgatatatctggacctaagcctcaatgattggggtaaccctagtttcagaggaaagcgtgccaccgactgtatctttgaagagctgagaaagaagcggcgatcggttatcttccttgacaatattgacaaagccgattgccttgttcaggagagcctgattcatgcaatggagactggtaggtacaaggacttgcatgggggacgagtgactgatcttaatgactcgattgtggtgttgtctacaagaatgatccaaggatgccaggatgcttctcttggggtggaagagggcaatgctttttcagaagaaaaggctgtggcagctcgtgggcatcaactgaagatcatagttgagccgggcacaaccaacatcggtggaggcaacgttgtagtttcgtcaaggcattccttgggaagcagtgaagcctcaagttattccagtaagcggaagctccacatctctgatgggcaagaaaagacagaagaatcggcaagcacttcaaagcgactgcatagaacatcaagcatcccattcgacttgaacctcccaggcgacgatgaggaagcccatgatgatggtgatgatgacaagagcagtggcagccacgaaaactatctagagggatctgtcggaaacctcttgcgttgggtggatggttcaatcaatttcaagccatttgactttggcaagctttgtgaggacatcctgcaggagttcagcaatactaccagcaaaattctgggcaccagggggtgcaggctggagatcgacgctggggctatggagcaggtagtggcagcggcatgggcatccgattcgcatgagaatgagaagaggcctgtgcggacgtgggtggagcaggtgtttggcaggagccttgagcaggtcaagatgaggtgtgagaatctgagcagctgtaccctgagactggtttcctgtgaggtgaaagaagatggttttggagctttgcttccctcgagaataattctggattggtgatggtgatatgtgtcgtttgcattattgctgctagctatctagctgtaagtattggttagttagctgacaccacccaccgtactgtagcatatataggttcatatcattatttggtggcttcaaaataatgtaattaagctggagtatgtacgtacggtagtctagcaattaaactactcgttcaagtccatgacctggggatggatggctgtatttattgttgctcctgcgtgtatatatatatttgtaagaccgacgtgatggccttttcatgtggaattccatatactgatgtcatttaactgtctgtgcaagacaattgcataattcacaagtatggaaagcaaaa

SEQ ID NO: 19301 - DNA, 1301 bp, Zea Mays
ttgcaggttaaggtccagccgaagaaggttattcaaccgaagaaaagtacacaacctgctaaacaggagtccagtgatgacagcagctctgagagctcctcagacgatgaaccttccaaaaaaccagttgccggttcaaaaaagcctcctgccagtagtagcagcagtgatgatagcagtgacagtgatgatagcagctctgatgaggaaccagcaaagaagcccacggtcctttcaaagaagcccactgtcctttcaaagaagcccactgtcctttcaaaaaaacctgtcacagcagtcagtaatggttcaaaacaggttaaacctgatagcagcagctctgacagtagctcagatgaggatgaaaaacctgctgctagcctaaagaagcctgttgttgcctctgtgcaaaagaagacccaagaatctgatagctctgacagtgattctgatgaggatgaatcagaagatgatattcctgctaaagctcaagtagtagccaagaaaaaggaagagtccagtagcagttctgattctgatagtgattctgagtccgaggatgagaaacctgctgctaacctaaagaagcctccggttccctctgtgcaaaagaagacccaagaatctgacagctctgacagtgattctgatgaggatgaatcagatgatattcctgctaaagctcaagtagtagccaagaaaaaggaagaatctggtagcagttctgattctgatagtgaatttgagtctgacgatgaggatagcaatgcgaaaacagtacaacctgccaaggctgctgctattaaaaagaaggaagattctagtgagagctcagaaactgactcacagtcagattcagaagattcagaatccagcgagaaatctgatgacagctctgatgagagttctgatgaaagtgatgaggaacctccacaaaagaaaactaagaattctgcaccttctggtgctgcaaaggctgccactaatgtttcaaagaaaaaaagcagcagtgatgaagatgatgaaagttcagaagaaagctctgatgatgaggatacagaacaagttgaaactaaggaaacttctgtagtcactacccagaagccggcacataatgaacctaaaactcctgccaaaagccaaagtcaggctactggttcaaagactatttttgttgggaatttagcctacagtatagagcgtgaacaagttaaggaattttttgaggaggctggtgaagttgttgatgttcgtttggctacttttgatgatgggagtttcaagggttttggacatgttcc

SEQ ID NO: 19302 - DNA, 2266 bp, Zea Mays
aggatcatactgtcttttggcgtttcttctccggctctttttcgtttgcctgtcggttacaaggtggaacgtcttcagaagcttctccactagattagtgtaaatagtagacttgttcaggtttagtttggttggaagaattagtttctggttcgtgttcatttctgctagcaataatggctgcgatgaacggaaaggtattgggtaaatgtggaaggaacatgaatagtctcaagagaaagcgggagaaccccgctgcatatgatgctgacatattccacaactctgaattgcatcagcaccctgtcaatgattctgctgttaggtttcatgttgataaagaccgcaaggcaaagatcgtgtgccacttcaacaagcaggttttgcagagctataagaacttcatgagtagcgcaccacctaaacgtattttgcttcgcataggtgctgtctggaaagacttcccagaaaagattgtcaaattggcacaagctgacttcagggcgaaaaaaacaatcacagaaacaggatatcagaaccagctatttttgctggattttgcccatatgacattcatagacacgaagacaggtcttcagaggccgattgcttggatcgatgaaaatggaaaccgctacttcccagaatcatttgtgcaagatcagaaaatatttatgaagaaagattttggcaacggatatcatgattacattagtgttgagtcaaatgggacacgagaaatgaatgaccagcttggaacatcagaaagttccgcagaaagttcaaacttcggttcaagtactgaagatgtttccagtcctaagagagctagagctgaaaataattccatcataaaaaaatactgtgatatgggagaagctattggagaaaatgagccatgcactttgttgcctacagcctgtaacctactaccacgccaagctaatctgggtgaggtatcacgtgcccagcgcactattgaagccgtggagaagctgttgttgcaggggatgggttcagttattgaatccaaggacattattggaatctacaggactccattattggatgaccatggacaagtccgttaccataatcacgaaaagcatgtacaggttaccagatgtcatcgtggaaacgcaaatgtccgttatgcatggcttccttgctccaaaagcactgtgcatgaaatgatgctgaatagttctttacaagttcataagccgcccattaagtgtgcagcctatggagagggcacattccttacaccagcaaatcgttctgatgcctgtgtgaaattctctgctgttgatgaaaatggcattgtccatatgatgttgtgccgtgttataatggggaacgtagaaatagttcaccctggatctaagcagcaccaacctagtagtgactattttgatagtggagtagatgaccttaaaaacccacaacattacattgtgtgggatatgaatctgaataggcacatctatcctgagtttgtagtcaccgtcaaattgccttctaaaacaaaagattacttcgtatcgcaagaagactgccagaattcatctgatctgtcactggtgttgaattctagttcacccgactgtatttcagagcgatctcaaccaaagtgtctcctcaaattatggacatggttattggttgctatgaagagtttaagagtaagaaaataagccgatgcgaactaataaaggagctgaggcacgtagttggtgatagagtgctaatatcgacgataatgcgtctccaagataagcagttgcctcctgtggagaggcgtgagggaccgggtgcatcagctgccaagatggtggcgaaaccgtgaggcgggtgtcggtcggtcggtgggcgaggaatgcagaagggaggaagcagctgactttgacaaccctgtgggaagcagcaactatgaagcctcttgtgtcagtctttgtatggcggctgatgtttcttctttctgtgtcgtatgagtatgttttttcctagtagattgtatcaggagtttttcatttcaaattgagctgcgcatgttcttttgagcctttggaatagttcgtcaacgaaaaaggctccttttacctttctgataacagtgttgtgcattgttaattaatgtgggtcatatagaataatatatgatgtatacaatgtttttgagtttggctctcgctgccagtcgtgtgtttattctgcacccgtggtaccccactaaacgttagtcgagttcattttatgcatcaac

SEQ ID NO: 19303 - DNA, 1204 bp, Zea Mays
ttttactactacatattctgtttctgcaccttttatcatctctattaagaagaaaaatattaaggtcctataggaccagtacaaacatcaaagggcctccttatggcggtcaccaacaagcatacatgaaaccaacaagcactttttatctagttcttccttgacaagattttacttattgggatgattgggtgaggctaaaggaggtacatggacatcggcaattcatacgcccggaaatttgtagaacatacaattttggcaagcatggatcaagcttgggacagttcttcgagcaatacttggagcccattaagttaaacgatgttcatattgattggaattctgaggatctgagctaccttggggaggataagttttcaaccaaatttggaaaagaggtggctagtgccactcctctccgtggatcagatgctgtgttgaaagcccacaatatggctgaggatgtaaggatccaatacgacgaccaagaaggtttcgagcagatagctcgtcaatttggaatattcgaagaatggaaggatggcatcccaagaacggcttacaaaggagtggtggtcttccggtacaacagtagtcaaaggcgaatatttctcgtcagcccagattctcttcgtcagctgggggtgtagcatgttgagaaggtagattttttacccttggaatggcaaatatcatggaattgcttaactggtttctgtgagcatggaggaaccgggatgcatggtgaagaaattatttttgagaagtgattgtgttgacccaaaggtactggagtagtagaagcatgggcttggtttataggacatttgcaagatataatacatcgttgttatatctttctccgcatcaggaaatgtttagtcagtatgggacttgttatccttgagtgtatttagggtttacacgatgcagttgtatgcgctcaaaagagtgtagcaggagctcactagctgacctgacgctcgatcctttttggtagaagaaaggtgtatctttatgaccaaatttttcttattgggcatcttggaatattaagatggaaggaaatcttgtgcattcgtttgttgtactgttttgtggtgacttcgcagatgtgcgacaagatgggagcgtaagcatccaatcaattccatcgagtttgttgaggtgtcttgttctgaatatgcagtgcgaacctgag

SEQ ID NO: 19304 - DNA, 1063 bp, Zea Mays
cagctccggccggtacacggaatccgggcacccacggtttccaccaaagcgacgcgccccgcgacatggcggtggtgcgcctgcgcgtatctccacgcctccgctccattcccctcctgctctcccagccagacgccgctacagtccggcgtagtttcgcctgcgccagcgcctcccaagcccccgcacccgcgcgggctatggcggccccgtcctcctcatccgcgacgccctccccgtacacgacgctcgtcgggcgcgtgagctgcgagcgcgagatcaagcgcagcaagttcatcgccatcgcggccccggtccccaacgagcgtgccgccatggccttcctggatcaggtcaaggatccacgtgctacccataattgctgggcatacaagctgggagatcaattccgttacaacgatgacggtgaaccttctagtacagctgggaagccaatatactctgccatcatttcctctggcattgataaggtcatggtggttgtgattagatattttggaggcataaaactgggaaccggtggactggtgagggcttatggtggggttgcttctgaatgtcttaaagatgctcctacttgtcttgtgaaaccaaaggctcgtgtgggtatggaagtaccatttaatctgttgggaacagtctatcatcagctacaacatttcgaagctgaagatatcaaacaggactatgacactggaaaagatggtaccgttatggtcatgttcgaagtggaatatgaaaaaattgagaatcttggaaatgcagtgaactcagcttgcagtaggaagatagaactatatctataaaccacaatcacgggttaaggatgagtgtaagtgtggagacacgcaatcgcaccagaaatattcagcgccttatccaagctaactgctagagtgctaggccatattgaactgctccagtgtaaactgtacagtcatctatcttttgaatttcaccatggtaattgtttcatgaccttttttttattatttgttttgaccaagtaatacttcaataacagcaaaacaaagtggtacaa

SEQ ID NO: 19305 - DNA, 2000 bp, Zea Mays
taaacctaacctcattgcggcggcggccgccgcctaccctacaagccacttgacctatacctctatacaatctctccttgtcgttgtattgccttgtttgtgtcgcctaccaccccgcgcttcattttgctctcattatcgacgactacattttattgtttgcaatcaagatggtcagatatggctaggtatacatttgagaccatggagcatcatcgtagacgtggaacattcaaccgtccgcccatgcacggaatttgggctcacaggataagtgggagcttttctcaagtacggaaagcactgttagcagtttcaacctgcctccaagataatcctaggccagacacacataatattccgattggaagaccatttgggcttccaggtagtggtactggatgtccccctggcatggatcctcattctcaaagaagttatttaccaccacacatacctgattaccacacaaggaattatccaagtaatgctggcccccctggtcctagattcttttttgaacaagagatagtgttcaggatgataattctgaatgagatggtgggaagcataattggaaaaggtggttccactattcgggcattgcaaagtgaaactggtgcttgtataaagatcttagagccagttgctgattcagatgagcgtgttgttgcgataactgcacgtgagaattctgacatgctgcattctccagcgcaagatgcagttgttcgggtgtactctaggatctcagaggcatctattgatagaagttctcatacacctgcaaggcttctcgttccatcacaacatattggttgcctgctaggaaaaggtggatccattatttcagagatgagaaagattacaggagctaacattcgaattttcgggaatgaacaaattccaagatgcgcacagcgaaatgatgagatggttcaggtcactggtagcttccaatccattcaggatgcattacttcatattactggaaggattagggatgtcatccttcccaagccacaccccagtggaggcatgcctccatatcctcctgttggaaacatcccagttcaccaatcaagacaagaacaacctcctccgcacctccatcccagtgggggtatgccaccataccctatgcatcctttcagacctgatgctcctatgggccactttgaaatgggtgatcatcggccacctcctgtacattcgatggaatatatgggtgctgatagaatgccatacttgtatggtgttgaacaaggaggtcctcgcccttttctagaacagccttcgccaagaacctgccctcctgaggcaccaaggacaaacagtgaagttcccagaaacatgtctgatgcagtgccagctacagatttcagaaagggaccagtggcaattgaaaaccaagtggctacaccaacaggcacaactgaagttatcattccttgcaattatataggctttgtctgtggaaacaatggcagtgaaattgaagaaatagagaagatgtcaggtgcttcaattacagttcatgatcctaaagctggcgacgcaaactcaaaagttgttatatgcggggatccccgaagaaacaaagaaggcacagagcctgattcatgccttcatattctgtggtctgtatcaaacataattgatgacttgatcactgtgcagtaccatcgtcgtttatgttcttgaatctagagtagttcccatgggcagatttcagcccttgattggatgtacatgtaccgtcgctaccggggtggatgtaggtagggctgatgcatgccttgtacaaacaacgccgatgtacatttctgtagtcctgtgttttagtttgggggaatggcaccatggaatgtgatgggttggctgcacggacctctgtggaatgtttaaccccatgccatcattggttttcatgatttcatctcttgtttgggaggcagccctgtgtgattgagattcgtaatttccaggcatgctatctg

SEQ ID NO: 19306 - DNA, 3309 bp, Zea Mays
  misc_feature (3308)..(3309): n is a, c, g, or t
caaagttcaaactcacaaaagagggcgacgccgaaaacggttcttctccagtctccaccggaggcgggaggcgtagggtttaggcgcggaatggcgggaggaggaggggggcgcggcgaatcctcgccggcgatcaagccaattagtaaggcggtagtgcaccgcatctgctctggccaggtcatcttcgacctttcctccgccgtcaaggagctcgtcgagaacagcctcgacgctggcgctacctccgtcgaggtcagcctcaaggcctacggcgaggagtggttcaaggtcgccgacaacggatgcggtatatctccctccaacttccgggctcttgctcttaagcaccacacgtccaagatatcagatttctctgaccttggatccctggttaccttcgggttccggggcgaagctctgagctcgctctgcgcgcttgggaaactgacggttgagacgaggagcaaggatgagctagttgggacgcatttggagtttgagcactctggcgtggtggttagtgaaaggaagaccgcacggcaggttggaaccacggtgacagtagaaaagttgttctccaccttgccggtccggagcaaggaatttagcaggaacattcggaaggaatacgggaaagtgatctcgctgctgaacgcttatgcattgattgccaaaggggtcagattactctgcactaatactgttggaaaaaattctaaaatggttgtgcttagaactcaaggaagcagttcgatgaaagacactatcattactgtatttggtccaaacacttttaaatgtcttgagcccttcagtgttaccacctcggatggctgccagatagagggctttctttcaaaacctggacctggtactggtcgcagttcaggagatagacaatttttctatgtgaatggcagacctattgatatgccaaaggtcacaaaacttgtcaacgagctatacagaagctcaaatgccaaacaatatcctgtggtaattctagattttcatattccaactacatcctatgatgtgaatattgcacctgataagagaaaagttttcttctcatctgaaagcatgattctgcaatctttgcgggaaactgttgaaaacctgtactcccctcaacaatgcagtttctcagtcaatcacatcaaagatcctgaaaaggaaggggatgctgttactgataggcataatgaagacacaaatgcaatcgtaatggtgaatgttccatcttactacaacaatgatgacaatgaagaaacagacaatgaggatcaggtttctccagagaaccagaaattgccttcagtggctagagatgcgagccccctgtcaggaggcacaaccactcaggctgatagatctgcttggcttccatcctttgcatatgaccagccaaaaagatcgcctaaagaaggaagaagtttggtattgggtagaaattgttttagaactgggcttgctgcaaagccaactcattcaagtactgttcagtcttctctcctgaactttgtatcactaaacaagcggaaacacgaagatgattgcactcttatttctgaagctgcagtgctgagaagagagacatgctctgaacatatgaggagatcaagtttagaagcaaactttgttacaccaaacaagcagaaccatgaggatgattgcattatttctgagtctccagtgctgagaagtgggacatgctcagaactatacaagaggacaagtttagaagtcaattttccatcaccaaataagcagaagcatgatgacaattgcactcttatttctgaaatccctgtgttgagaagaaggacaaattcagaacaagcgagaggaacaagtttagaagcaaattcagcacctgagttcaatttacctctggaaacaaactctttaaaacagcactcctcacaatattttggatctgtgaggacagatgtttcaccacagcattctaaacaacctaatattgtgaccattggggcaggggtaacaggtccatgtgatgttgacactacagaatctgatatggatcaacagtgtggtcgatgccattcagcttctggtgctcccaacaaatattcagaatcacgacatcagaatgcattggctgatagtcctttgcctgatgctcaggattatggtgatggtgctgcagtatgttatgcatctgtacaatatcccattattcaatttacggttgccgagcttaggagaagaagaaagaattgttttatgatatctcatataaataaatcatattgtctcgagaaaacaacaaggtgctataaagctgcaacactggacatcactgtacccttagctgacgaggcaaaatcaaactcattagctgcagccaccaatgagttggacaggcttttcagtaaacatgattttcgagaaatggaggttgttggacaatttaatcttggttttatcattggaaagcttggccaggatctgtttattgtagatcagcatgcttctgatgagaagtacaactttgagtgcctttcgcagtctacaattttaaacgtacagcctcttctcgagccactgagacttgatctatcaccagaggaagaagtaattgtttctatgaacatgagcaccatcagaaaaaatggtttcgttttggcagaagatttgcatgcttctcccggtaaccattatcttctgaaagctgtacctttcagcaaaaatattacatttggtgttcaagatgtaaaggagttgatctccatgcttgccgatagtcaaggagactgttcaataatcagtagctacaagctggatacagccgactctgtttgcccttcgagggttcgtgctatgttggcttctagggcttgccgaatgtctactatgataggcgatccactaacaaaagctgagatgaagaagatacttaaaaacatggctggattgaggtccccttggaactgcccacacgggaggccaacaatgcggcacctagctgacctgcgtactatgaaggcgaaagatatcgcgtttaaacgctaggccctgttggctgccggcctgccgcgcgtggggggcctacgctcaacggaaggatgtttctatgctcttccgctttatgttgaagaatacaagaagtgcatatgtgccccgcccccgcttgtaaattacggcgtacgcacgtcgcgccgcccccgcatgcaaggtccatttgtttgtttgttttttgtcagaaggaatacctgtggtgatatttatgtccagtctccagggatgtatggtgttctgttttggcaaatagaagcttnn

SEQ ID NO: 19307 - DNA, 3096 bp, Zea Mays
ctccctctctctctctcttggagttgctgtgaaaatacgacctatcggggacagctcgatctccctcccttggctggagcctggagccgacggagcagaacgacggttccttgcggcggcagcgacctcgagctgagggcggcgagaaggcgggaacaactcgatctccctttgctagctagctagtcccgatggagccgagggttccttgcggcgacggcggccccgaacctagggccgcgagaacgcatcgacgggagggcgagcgaaaccacgtcctcgatgcgcgaatcctggagcctcagcgacagagatcgaatccaatcaggaacatctttcatctattaactcaacgagaggtctcacctcgattgaaacaccatgctaaaagaatgtggaatgagtccccaaaatatgatcctgattcaattgagttaaggtctgcagatgctaaacttgatattttttcatgggcagaatcacagtccctgcatagctggtctgccaagtattgccctcttttgccacctcctaggtcaactattgcagctgctttcagtccagatggaaaaacacttgcgtccacacatggtgaccataccgtgaaaataattgactgccaaacagggaaatgtttgaaggttttgactggacatcgacgcactccttgggtggtcaggtatcatccattacattctgacatcctggctagcggaagtttggatcatgaagttcgtctatgggatgctaatacttcagactgtattgggtcacaagacttccatcggccaattgcttccattgcatttcatggaagtggggagattttggcagttgcatcaggtcacaaattgtacatatggaactacaataagagagatggcacttctgtaccagccatcatactaaaaacccgccgctcgctgagagctgttcattttcatccgcgtggggctccatatcttctaacagcagaggttaataatatagaatctgcagactcaccgctgactctggcaagatcctctggatatctaaattacccatcggccctgctggtgacaaacactaattctagattctgtacacttcctgagtccaatgtggtgtcaccttgcttactgtggcctgcatacctcagagatggtggaattttacatgtgctcggcaatgacagtagttcaaccattgtgcagcagagatcatcattagttcaaccttccacatcagatactgcaaatgtacagcttgaacagtttgctacccctatggatgtatgtccgggagagccaacttcatctaatgacatacccgatgcagtaactgttcctacttcaaatggaaatgaaatgcatggtgctggaggccagtctaactcaagactgcagggcagcagctctactagtaatcttgagaggttcagtgctagagatgatttgcaagtgtcttccctgagcaggactgacccaatcccattaacagcagggccttcaggatccgatttacaccgtgctatgccactaaatatgctcctcactggcggattagatgttcaaatgttcctaagaaatgtaggaagtggacagcaggatcattctctcttcggcgactcacgtaactgggaggtaccatttttgcagggtttcttgatggccccaaaccatgcaggtgcttcatcttcgattccccttaccactggcagttctaggggaccaaatcgacgctatgcttcacgctctgtacctggggttgggaatttgctcctaggtcctcaaattgacgaagctgaagctcatgctgtttcactaggtgctggttctgaaatcactgcgtccatgcttgctcctggtactgaattgccttgtacagtgaagctcagaatatggcggcacggtaccaatgaaccatgtgttcctttagaacctgaggcatgctgtctgacgatttctcatgccgttctctgcagtgaaatgggtgcccatttttccccatgtggacgatttctggtagcatgtgttgcgtgtttgttgccacaaacagaagacgaccgtggtagccaattgcctgtgtcttacgaaggggctggatcatcaccaactcgtcacccgcttccctctcatcgagttatttatgagctccgggtttattcccttgaggctgagacatttggggatattcttgcttccagagcaatacgggcagcacattgcttaacatccattcagttctcacctacatccgaacacatacttttggcatatggtcgtcgtcatagctcgctccttaggagcatagttgtggaaggcgaaaatggggttcccgtatatactattttggaggtatatagagtttcagatatggagcttgtgagagtgcttcctagcgctgaagatgaagttaatgttgcatgctttcatccttcaccaggaggtggccttgtttatggcactaaggaagggaagctcaggatccttcagcacaatggcgcagacatgacaaacatgggggtgggttgcttcattgaggaaaatatggttgagatccagaggtacgcattggaatgctgaagaagcttcaccacaccatgtgtttttaggcttacttccatggaatttttttctgcaggcttcatctgtgtgatccatccaaggggaaacattagatccatctctaactaagtgccttggggattggtctgtgcagaggtggtaggagatgtaaatctacatggccatcgtcgtggctgccataacgatgctgtaattataccgttgtacatgtatttccaattagcttaactcgattgctgttgtatttcagaaagttgacgatgctaatccttttaaagtcaaaagttactttttgttgtatacttcacctttccgtacaagctgtcgatgatgcaagaagttacacaggcgaatggaattgcctgggcttgcttttacacttgtgaaaatcgtgtattttattttcctgctctcgtctgagcgtatcttatgggcatgggcttgcacatctccaatcctgtcccttcaaccatgatcctatggtcattgttaacactttggtcgctgatgaagatgaaaagtagcc

SEQ ID NO: 19308 - DNA, 1084 bp, Zea Mays
tcaaaatactaatcagcatcaaccattttttcgacgatgtgccaaccacttcgcactgttttcgggaacattcctcggtgctaatgaagactcaactagaacccttgcagaaatcgagaagaagattgcaagggctaccgtgttacccagaaatcatggggagaatgggagaaactatgttcccatatgaggtctcctattcttcagctgaagatcatacttgctgtggagcctttgatcccttcagagggaccaaggattggagagaacattttcggttacacgatagtggacatcttcagtagcagctgccgtggccaccataagaatcctccttcagagccatatgtccttgaggttggggttttgcaagattatgttggaagtggaggctgtgtgcaaggcgtgacagcgtgtcgtggtcaaggaccctaagctctagcgccaaattcatatcacatttgttctagaatgagatcatgaatggtccctggggttggcctggttcacgctccattctcagtgcgttttccgacatcgttcttcaagcaagcatgcgagctggctcctattttcactgagcttgtggattgtgtgagcttagatggggagtccttgcaagctgctttgtctagaacaaagcaggttcatgaatttaccgcaaggctgctagatattcatgataagatgatgttgataaataataaagaggatatacgcttaatattgcaccggtcggactatatgttggattctgaaatcaattcactgcttcaaattgaaaactctaggagctatattttgccaccaacgctgcaactttctgttgttccatcaggacctacctaagttagcccagcaaagcacaagcccctatccgcacgacattgcccctacctttcgccgcccagatgctagacacagcgcccagtgcccagccgccatggccaggtccccaatgctcagtgctaggacgcctgccttgacttcatggaatattatagctatgttccctccaacactggaaaatgagccgctaatgtggaaaactaggagttagattgaccgattggttgggagtttg

SEQ ID NO: 19309 - DNA, 235 bp, Zea Mays
cttggtaaattaatgagtttttcaagtgactaaaaaaagttgaaagcatatttgttggcttcctcaaacagtttccaagatctcgctcacagcagataaaagttaattttacatcagaaatccagaactatttctaaatcacctcaaccacttctataccttctgtcttccatatttgcatcagaaaccctgtcatacttattctttcccacctctttccaccttcggattgggg

SEQ ID NO: 19310 - DNA, 1693 bp, Zea Mays
ccggacatgtttgacgggttcggcagtgagcaaatcaggaaataatagcagtaaaaatctagatgctgtggaaggggatggtaaaaagggaaaacatggaaagggttctgatgattcatattatgctgcttccaaggctcacccagttagttccgaggttcgtcgaattcgaattgacattgagcaagctcaagttctcattcgtaaacttgattctgagaagggtattgaaaacaacgttctctcaagtagtgaccatgaaaagtcagacagggataagtcacatggttcagtggggccaattgttataatacaaggatcatctactgtgaagggtcttgagggtgctgagttgctggacactcttgttacttatttatggcgtatccatggtgtggattattatggtatgtctgagacaaatgaacctaaaggcctaaggcatgtgaaagctgatgcaaggacatataatggggctagctcaaatggtgctgaatgggagaataaacttgattcattctggcaagacagaattcaaggtcaggatccattagaaatgttgaaaggaaaggagaagattgatggagctgctactgaagtcttggatccatatgtgaggaaaataagggatgagaaatatgggtggaaatatggatgtggagccaagggctgcacgaaacttttccatgccgctgagtttgtccagaagcatcttaaactgaagcatgcagacttggtggttgatctaacttcaaaagtgagagaggatatttactttgagaactatatgaatgacccaaaggcgcctggtggtacacctatcatgcagcaacctgctccaaggggaaaaggcagacaaaggccaccaatagagagtcggctgagggatgagcgtgggaatcataggttcgacaggaatgttgattcaccaaaacgtgatgggtctggtgaaaatcccgatgatcctatttatgattcgtttggtgatccagctatgcatggtgccttccctccagatatccctgctcccccggttctaatgcctgtgcctggtgctggtccgctcggaccgtttattcccgcaccacccgaagttgccatgcatatgttgagagatcagggtgcgccgccacctattgagccaaccggaggtccacatcctaggaaagcagggacgggtggtggtccttcaatgcgtggcccatccccaatctttggcgctccttcccctcatcatatgcatgatcctcgcagaatacgaagctaccaagacctcgatgctccggaggacgaagtgactgtcatggactaccgaagcttgtagacttcctccagttcttgtgcatccagatacctttgtagtcaacatttttagcgcgagagaaaaacaccttgctctttctagaatcgccgcggaggaaaccccggcaggctttttgtgtcgcgaccactgagatgtcagcttctcagtgttttgtaaaacgaaacacaggaagtacattacaacttctccccattaaacaaggtgaaagatttccatcagtgttttgtttttttggtcagcccagcattgatgtacatgtacgtaccttggcaaatagggcgggggttcgtttgtcgctgcacatgcaaatggcaagtggagtcgactggtgtctgctctcgcagtttattatattctgtgcctgcctgg

SEQ ID NO: 19311 - DNA, 1668 bp, Zea Mays
acgaaacactgaaaaccaagggcgaagattgctttgttcgactttgatctcgctctcgctcgcaactcacctctccctctccactcgcacctcgccgccgtctacccgtctgctgtcctagccccgcttctgccgcagccatgaacccttccatgccaccgcctccgccgcgtaaccctaattccttttcgtcatccgcctccatgccaccttctccgctcccaaacccctcgccgccgacggcacggccggaggcggcgtccgagcccgacttgtcttcagcggaggtgaacggtcgcgctaaccctagcacatcctcctcgatgcctccgcctccgcctcaaaaacccgccccaccggcaccgcagatggaagcgaaggcggcagaggctgagggaggcgctgtcccgagcccgagcgtgagcggttcgtcagcgaaggaggcgcccaacagcagcggggcctcctccggcaacaacgtgatggaggaagcggccgcgtcgccggtggagcggcagagggctcgcgcgccgtacgccattcccgagtggagcaccgcgccgagccaacccttcttccttgaggtgctcaaggacgggacgatcgttgatcagcttgacgtgtccaagaaaggagcttacatgtttggtcgaattgatctgtgcgattttgtattggagcatccaaccatttctcgattccatgctgttttgcagttcagaaatgatgggaaggttttcctttttgatcttggaagcacacatggatcctttatcaataaaaatctgatcaagaagaagctgtacacagagattcatgttggagatgtaattcgatttgggcaatcatcacggctgtacatttttcaaggaccatctgagctaatgcctccagaaaaagacttgcagaagcttcgggatgctagaattcagcaagacatgcttgatcgtgaagcttccattttacgtgcaaaaactcaagcagctttggcagagggaatctcatggggtatgacagatgatgcaatagaagagtctgcagaggatgatgcagatgaaattacttggcaaacctacaaaggtcagcttactgatagacaagagaaaactcgtagcaagatagtaaaacgaatggagaagattgccaacatgaaaaaagaaattgatgcaataagagttaaggacatttctcaaggtgggctaacccaaggtcaacaaacacaaattgcacgaaatgaacaacggatgtctcagattatggaggagctagataatctagaagaaactttaaatgacagtatacgggaaagtattggtgctcgttctggaaaggcaaagcgtggcagctataaagcaagtctcgaggaagaagatgacgttcttagtgacgatgatgaattttatgatcgaacgaagaagaaatctactcagaaatcaagtgagcaacaatcggttgagactgctgacagccttcttgagaaaaaagatttcatcaccaatgatattgaaagtaaaacaaaattgctggaagaagagaagcataagctgtctcagagtgatacaccagatctcagggatgaccttgatgcttatatgagtggcttgtcatctcaattagatgatctattcatgtgcgcagaaaaaggatataagtttcttattggttttc

SEQ ID NO: 19312 - DNA, 1847 bp, Zea Mays
cttatataagtgcactgcacgtaagtcagtgatccctttttgccttctcacctggcggagcatccactgcgtcgcacggtgccaggtcagctagtcacctggagagactgcatcgtcgcctgcacgaggagcaggagcgctgacaccacgagcaggagcaggaccaggagcagcaagactcttccccctcgcctcagcaggaggtggagactaggaggctgccttcccctgcacctcagccagagatgcccctgcactaccatagggcatcccagctactgacggagacgacgacgacgttggtggcagttcgagccatgacacgaagctctaggaggagccagagccggagggatggatcgctagacccatcactcgcgacgctgctcctaagtgtcacttccacgacgctctcaacatgctgctgcgtcgggccatcgactgacacacttgatccatcgagtaccattgtgtagtctaccagcatcgtcgcgggttatacccggaccagtgggaggctacttgcttggtgcgccgtccagacgatgatctccggggtgcagaggccttctcaaagcactattctattactgagagggatactaccgaggtagccatgcaagatgcagcatgacgtgcactctctcagtattgctcattgttcaacggggtagctaatggccttgacctaaagtactaccctcgtcgttcgaccggcagtgctgaaggtgtgattgtttcacccgttggtgagggcaatcccaggctgaatagcatggtcaacctggccaccgtgctcaacgccgagctggaccacgcccttgactagttgggcacggttcgggcggagggtgtggaattgcgtgctgagtgcgtagcatgccactatcttgatggtggttctcccgcccctgtcgggattcagcacccttaccattcaccgccccgtggtcgcttcgactatggtagccctgactgcaggatccggatagatttggatccatatatcgacggagtcggagtctgtaataatgcttaattcagtgtcttagtcctggtcagtcttagttagagttagtttgcttatcatatgtttgatgcttgtagtgatgaacatgtaatgatgttggatctttgtaacgattgtcatcaaggtgtgggtatcccctgcaacttggtgtagttattaatttagttgggtaatccatttatttccactttcctctttatctgagaagatgtcagtgaagatgatcatttgtttagtgctatgaagatttctgtatatcttttcttatgttgaaagactgcagagtcagatctgatgtgtatgtgctttctacagatgtccgagaataggcgccgagatgcaaggcatgctcagcaggagcagcaggcaacctaggaagatgcagctcagcagcagttgccaccaccacccccgatgaccattgagcagatgttcctaatgcagactcaagcagtccaagcgattggttagaccctagaagtgatgcagcaagtgcagcagtagccacccccacctcagcctcatgtgcatgttcagatgcctcaggtgccccaagacaagcgggcagaattgatgaggggctatccccctgtctttgcccactctactgatcccatggatgctgaagattggttgcgtactgtggagcgcgagttgcacactgcctagtgcaatgatcgcgagaaggttctgtatggtccccgctgtaacacccctggtgttactataactaaaatttgagcatggcatcataagcattggcattgcatatgtttgatactcctagaatgcattcactaggcaaaaatttcaaaca

SEQ ID NO: 19313 - DNA, 1459 bp, Zea Mays
cttttgttgaagatgctctaaaaaagttagctttcgatacttgcacagtcatattggcgggccttgtattagaaacctgtagatttttttttccttttgggggtgaaagaagatatatttggtcggaatttatctggaccgtaaccgttgtccttaggaggactgatgggggaaaagtataattgattttgagacaaaataaaagcaaacaagaaccccgaacacatcaatggaaacacaacacgatcattcagacgatcctgaacacgtacgcactcgtcgcccgtggcaaggggggaagacatggtgacataacttgccattgccaggcacagcacagagagagggccctgtgcctgtgcgtgccgtgctcccacggctgacggctctgaatgaattggaaatgtgaggcaccacgtgacgccgatccaggtgtcgtgcagtagcaacgaacagcagagccaaagtccccgaccggcgacctctcgacctggaagcatgtcagcatccgaaaagaacgtcccggccgggccggccatgcatccttcttgagacccgctgatgcttgactgactgagcaatgcacgcacgcatggatcacgagccgcgactgcctgactggaatgatcgccgagcatttccggctcttcacacgcggacccgcagtggtactgtggtagtacgtactagttccggctctgaatgaagggaagggaagggagtaacagtgaaagctgagcagcaggaagcaaggagtacttgtattagagaggcaaatgaaacgaaagcgtggtcaattcggataaggattcgccgtggctcgtgaggacgagtacggccggccggacgacgactgagaaagagagggacgagaaagagaaggacaagctaatggtaatggcccgtgtctattttcgagcaatgaaaaggctccttttgccgccttgcggagcacacgtcgctgcaggctgcagctttccgggttctctgacttgcgagctcgtccggccggtctgcgatccagccgagcagagcagggatttattagcgtcgccagcttaactgcactgcctttttggattgattggttgccgatctgtttaccacgcagcagcagcagcagcagcagcagcagcagctaatatggcgacagggctttcaaaccggcggtcagagggcaaggcgagcgagcgcgacggccgtccgtcgcgctcgcatcctacgtgccgccggccggttggctccgcgcggccgcccacggccgccccgcgcgccctgccagccacccgtcgttgcggcgccgagaaggacgaagcggtcgcacatgccggtcgccgtcgcctccgtcgcgctcggcgccggatgccgccaagcgagcgcttttccgggcgcgccgcgctggctcgcttcacctcccgttatttatcccgggatagcgtccacctctcgctggctctcg

SEQ ID NO: 19314 - DNA, 910 bp, Zea Mays
aagccgtggtgggcctgacacaaattaagtgggccggtccgggcgacatgcaacaagtgaagaagaggaagaaaggagacgagaaagaaaggaaaccctaggccgctacgcccttggccccttctctctcttcgtcgcgccgccgtagcacgactccgactcggccatggcgacacccccagctctcctattcccttcgccctcttcggcatcttctccgccgtcatccgcgcaggtagaggcggtggtcctcttcaacgtctgcgacagctacgtgcggcgaccggaccaggcagaccgtgtcatcggcaccctccttggatccctcctccccgatggcaccgtccacgtccgcaactcctacgtggtcccccacagcgagtcggccgaccaggtcgccatcgacatcgactaccaccataacatgtacgcctcgcaccagaaggtgaaccccaaggaagtcatcgtcggatggttctcgactggatttggtgtttctgggggaagtacgcttatccatgagttctattcaagggaagtacaaagccccatccatcttacagtcgacaccggcttcactaggggggaagcttccatcaaagcctacgtctcatccaacctgtccctcggtgataggcaactcgctgcgcaatttcaggaaatccctctggatcttaggatgatcggggcagaaaaggctggatttgagatcctgaaatctacgatggtagagaagctccccaatgatctggaaggaatggagtcctcaatggagaagctttacattcttattgatgagatctacaaatacgtcgatgatgttgtggaaggacgcgtggcacctgataacagaatcggaaggatagccaccgtgctttttcttgctgatggattaacaataaccgacccc

SEQ ID NO: 19315 - DNA, 690 bp, Zea Mays
cttggcccatctccccagccgccgtccctgccctatcctccctcaggccaccgccgctctcccctggtagccgtcgcctctccctgctctgctcctctctctcccaagcggctctccctctctctcctcgcttctctcccctcctcttctccagccgctgctaggcaaccggccgccgagcagcgcagccacgctgttgctctcgccaggacgccaggaaccgctgccatggctgcagcaaatctgagcacagttggcttctttgcaggctaaagtgtgttcctacttcctcctgtatacacagtttattcctgcattttttggggtgattaattcctttttcaaggaacgtggatgcgggcgataaattgaagctgtgggtactctgttttctgaaagacaaatgatagctattcaaggagctagaggctgctcaacataaagcatcaacagcaacctctggaacagctgaaaatgctctactggaagctaagtcagtgactgatcttaaatctaaagatttggaggagaagaaaagggagctttgttcactgatacaagaagttggagtgcttttgtgaaggcttttgtgaatcacttgaagcgttagtacttttgtgaatgattttgtaaagtgtttgcaaatatgtgcaaaacataataacatgtgtaggttttgtgaatgatttt

SEQ ID NO: 19316 - DNA, 1565 bp, Zea Mays
gattttgtacttactggagatttggttatggatggtttcatcaagctcttttggaagagatggcttgactcacaacatgttggaaatgatacattgtcattggaggcgccaggaaatctgcaaagttagatgccgaggcgttccaactgttgatatgaagaatctctgttatcatcttgaggagaagtcaggtggaaaagtcattcaccgagtaggcggcgttgtttttctatatagaggaagacattatgatcctaagacccgtcctcgctatccactaatgctctggaaacctgcaactcctgtatatccaaaactcatcaaagaagctccagatgggtttacaaaagaagaagcggatgaaatgagaagaaaagggcgtgatctgctgccaatctgtaaattagccaaaaatggaatatacatcactcttgtcaaggatgtgcgagatgcttttgaaggaagtgacctggtgaagattgactgtgagggtttgaatccaagtgactacaaaaagattggagcgaaactaagggatcttgttccctgtgttcttttatcatttgatgatgagcagatattgatgcacagaggcaaagaatggaaatccagatactcgaagcctcttactctcattccaaaagttccaaagaataatctggcaatgacatctgtcatgaatagttcagatgaagttagtgatgccaacactcaagttgcgataagagaagtattgagacccaaaatgttcaaattatggaagagtgcggtggactcgtctctggcattgctgctggatgacgccgaagcaaataatctcacacccgattcgctcctgactctggttgaggagttcagcgtgacatctcaggcggtggagcactcatttcctgctctgcttgtgaccaatggtgatgcgagcaccgactctctaagtgcagagtacatgaatgacgagcctgaaacaagcgttgctggaaacgaagagggccagctggagcagtcacctgatctccgtgacgatgaacattttgatgtcgacatgtttgagcgtctggagtcatctgtgccattgggatcgctgcctattgacagcatgatagagcggctgaacagtgagtgaagtacagcgagcagttcgttctgtccactgggataactactgatggtcagattgcaatctcggatcgtgtgatgcattatctacgttcctccggaccctcagtctggtgataatctcaagatccgagaatttcctgcgatttggtagcaaacgtgatgtaaagaaactaactgtagtatgcaagtgcgccatgcatttggcaaacgcaccaacggataacacgtctcgtttgccatcgtcaatgagtgcgcttgcatgtatatgaatatctgcatttatactgtgtttaccaaaaaaaaaagtattgtgccatgctccaaaaagatgcggagctagcagtgtcagaagtctataaactctatagtaatttatacttctgcattttctgaatatttttgaaaataaagaatcggtctatggttcagaaaaaagatggggaaaa

SEQ ID NO: 19317 - DNA, 2139 bp, Zea Mays
aaaaagcctcgcccgtgaagcgaactccctctccttcgaccttcgttcttccactgcggcctgcgcgacccgtgcagctgcgcgctccacctggccgcgcctggggcccacaccgcctggcatctggagcattgcccccggacttcgcgcggccgcccgcagccccgctccccaccgaaaagcgaagcgcgattgccatccccacgccaccgcgaagcacaaggtccccgccctgcacgatcagcaggacctcgccacgccgccgctggagctgcgcgtgcgcgtgtgcgcttggaccgacgcgcaacggcctgcctcgaccgcccgtgcacgccactgctcatgcagccgtccgcctcgcccccgccccgaactgccgaggtcgcgtgaacgcccactcccctcaccgctcgtctccgtgctatataggcagcccgcgcccctcctaattgtagccctgcagtcacccagagcagacccggatttcgctcttgcggtcgctggggttttagcattggctgatcagttcgatccgatccggctgcgaaggcgagatggcgttcgcggtttctggggcggtgctcggtggggccgtaagggctccccgactcaccggcggcggggagggtagtctagtcttccggcacaccggcctcttcttaactcggggtgctcgagttggatgttcggggacgcacggggccatgcgcgcggcggccgcggccaggaaggcggtcatggttcctgagggcgagaatgatggcctcgcatcaagggctgactcggctcaattccagtcggatgaactggaggtaccagacatttctgaagagacaacgtgcggtgctggtgtggctgatgctcaagccttgaacagagttcgagtggtccccccaccaagcgatggacaaaaaatattccagattgaccccatgttgcaaggctataagtaccatcttgagtatcggtacagcctctatagaagaatccgttcagacattgatgaacatgaaggaggcttggaagccttctcccgtagttatgagaagtttggatttaatcgcagcgcggaaggtatcacatatcgagaatgggctcctggagcattttctgcagcattggtgggtgacttcaacaactgggatccaaatgcagatcgtatgagcaaaaatgagtttggtgtttgggaaatttttctgcctaacaatgcagatggtacatcacctattcctcatggatctcgtgtaaaggtgagaatggatactccatcagggataaaggattcaattccagcctggatcaagtactcagtgcaggccccaggagaaataccatatgatgggatttattatgatcctcctgaagaggtaaagtatgtgttcaggcatgcgcaacctaaacgaccaaaatcattgcggatatatgaaacacatgtcggaatgagtagcccggaaccgaagataaacacatatgtaaactttagggatgaagtcctcccaagaataaaaaaacttggatacaatgcagtgcaaataatggcaatccaagagcactcatattatggaagctttggataccatgtaactaatttttttgcgccaagtagtcgttttggtaccccagaagaattgaagtctttgattgatagagcacatgagcttggtttgctagttctcatggatgtggttcatagtcatgcgtcaagtaatactctggatgggttgaatggttttgatggtacagatacacattactttcacagtggtccacgtggccatcactggatgtgggattctcgcctatttaactatgggaactgggaagttttaagatttcttctctccaatgctagatggtggctcgaggaatataagtttgatggtttccgttttgatggtgtgacctccatgatgtacactcatcacggattacaagtaacatttacggggaacttcaatgagtattttggctttgccaccgatgtagatgcagtggtttacttgatgctggtaaatgatctaattcatggactttatcctgaggctgtaaccattggtgaagataacactagaactttcgggtttatactgagcctggactataaagaagatttctcttgaagttcaatgagttctcgac

SEQ ID NO: 19318 - DNA, 1512 bp, Zea Mays
cgctgctgttgctgaaatgtttgtgttctcttggatttgctttttttctccctcgagcacctgtatctatcatactgatcaaggatctcaaggggaacacatcctaccagagagctatcccatctgctctgaccacgaggagtgcattgcccgtcctgagaggatcaagatccagaaaggtttcgtggccaaggaatccgtgaaggggcacatggttaatgtcgtgaaaggcttgaagatatatgaagatgtttttacaacatcggagatcatgaaggttgcagatttcatcaatgaaattcgtcaggctggcagaaatggagaactttcaggtgagactttcatattcttcaacaagcagatgaaaggaaacaagagggagatcatacagcttggtgtcccgttatttcaacctaccacagaggaagctaattgtcacacagaaccaatcccccttgtcctgcaggctgtcattgaccaccttgttctttggcgtttaataccagaaagcaggaaaccaaacagtgtcatcatcaacttcttcgatgaggatgaacattcgcagccctacttcaagcctccccatctggacaaccccatttgcactcttctgctgtctgaaactacgatggcatttggcaggtcacttgtcactgacagcaacggcaactacaagggacctctcacactctcactaaagcaagggtccctattggtgatgcgtgggaacagtgccgacatggcgcgccacgtggtgtgcacgtcgtccaaccggcgcgtgagcatcacgtttgcaagggtgaggccatcgacgccggtggatctgagcccactcccgtcccccaccaaggccttgacgccctggcagccgcagccagccacggcctcccaggtgccggcgcccgcgtgcatgacgcagaagcccccggtcagcggcgccatcatcggttatgccccgaccccgcagaccgtgctggcgcccgcggcctggggcatggccatgcgagcgcccgtcatgatggtggccgcagcgcctgcgaggcccatggtgatggcctcgttgggcaccggaggcggcaacatcagcaagtggatgagccgcagcggcaccggtgtgttcctgccgtggacggtcgggccgaagcggtacaacaagcaccttccgccgcgcatccagaagcgccggttctctgcgatgatgtcgcccatcgaggcgcagggctgaggacctgcccgacttcacgtcgccgtcgaacctgtgttttttttttttccttgagggctttcggtccgcctgtaatttagccgggtttgtgacttgtgacaatgtgagtgagtagcggtttagcggagttcagaaccggtagaggagtacgagcgtagggataggtgaaggcagaatcagggcagggttttccttttgttttcatcctgtccccctattttccgttccgagtaaaacttatggatgttgttgtcatacatgcatcagcagctgagtttggattcccc

SEQ ID NO: 19319 - DNA, 3860 bp, Zea Mays
ggcgcggggggagggcggcgcgaggagcggatccagtgagaccgtgagagaaggcgcggacggggaggacgttaacgacgcacgaaacggtttcctgtagaaaagtaatcctttataatggcagaagagaaaggacggagcaaaacagaccccttctttactctaaccatatctgccgcaaaccgcaacacacaatccagagcgaggtcgtggcgtggactccaaatccttcctcttcaggactcaacagcggagttcgctccgaccacgggccctgctgccatggcggcggcggcagatcttgagcctcagttggggatatcgccggcgacacccgacattgtccgcaagctagctcgaccgtccgggacaaccaccgcagttggctattgctgcactgctctgtacaccagcacggctgctggccccggaaaggtggacggcgatggccttgcctcggtgccgttgcatgcccatgaacattctcagtccgccgcactggataatttggtccaagtggactgtgatcccgtgggcactcaggagtccagcaccttgcctgcactggtgggcgagtcctctggcaaggttgcacagcaagagcagcagcacaaggaaggtgttgatagtgccagagatgcaggtgctgcttctcctgcccctacttctactccggagaacatggagcccacacctcggaggagggggaagaagtcgaccaagggggttcaacgtctcaaagtggccaaagataaagtgatgaagctcaaggtgaccacgcctagtacagtaaaaaagaagaaaatgacagaggatgatattcaacatattggtgcccacaggtctaatagtgcaagacgcaagttagatttggatttacattcatcagaaagtaaaacatgtttcagcagagccgagctgatgattaatttgaagtgcattggcaagagttatggtttaatcagtgaactgactacacataagaggagcaagagagggaaaaaaaggaaaatgatggtaggaaacaaggaaagtggtcagctagcacttttgccttacaactggactacaacggttgcggtatcacgccctctaactcatgtaaagaaattgcgggctaaggttttgggccttactgatgaaacaatgcgggtttgtgctgttttggcaaattggaatgggagcgacaatgaaagttttgaaggttttgatattggcaatggacccgaatgggatacaacaagacaaatgtttgaacaatttgtggatatattcattaatgctatgtttgatctaattgggcctagaaaatattctcagtggggaggatccctaattgattctgtggtgggtactttccttacacagaattctgctgataatttatcaagccaagcttttatgaatatagcggcgaagtttcctaagagtgagagacactgtcaagataatgcgactcaattaatagatggtgtcgatagaaaaatgaagtcaaaagaagcatttgataactttgacttggttcattcacattttgatgaatacattaaatctgaggaagaagttgactttgataaaaaggtgaaaagtcaatacggcgaagactacaatagaattataggaaattttgctgcaagtatgaagcagaaaaacatctctacttgggacagtgatcttatgaatttagtgaaagataaatatggaaatccagtgtgcgacgagaacaacttgagaaagatcttagcttcactacgacaaccagtcacagcatctaattggaaagagttacaggaggaagcatataaaaaaggatacaataacaaaagtcaaactgaaacaagtgatgttgtagattgggaatcagttctaaacgctccattttctgaggttgcaaaatgcattgcaatcaggggacagcacaacattttggctgtgcggatactggcttttctcgaccatgtaaagaaagctcaagatggaagctttgacctagattggcttagatttgtatcacgtgaaaaagccaaaaaatttctgcttagtatacatgggattggagtgaaaagtgctgactgcatttgccttttgtcattgaggcatagagcatttccagttgatgtcaatgtagctcgcatagtgacaaggctaggatgggtcaaacttcagcccttaaacggtgctgatttccacctaattgacctttatccgatcttggatgatgtacaaaggtatttatggcctcgattgtgcaccattgataaggaaaagttgtatgaactgcactgtcttatgataacttttggaaaggtagtttgcaggaaaaaaaatccaaactgcggagcttgtcctttcagtgcaagttgtaaatattacaatagttcacttgccaaaaagtcgctacctcttccagagaagcatgaacaaggagaacagcaaacaagcatggttgcttatgggagttgcacaccaagttctcaacaaatgtatcggtatcaaattgcaataagcagcactactactgaaacaccacccatccatagctgcgagccaattgttgagatgccaccaagcccagaatatgaatacaatgaaacacctaatgagcaagaagatttctacgaagattatgcatgtgatattgaagattttgcaccaggagtacaatatgattctgaaataaatatttgttcaaacaagcatacgctgaacaataattcttggacaccgaactgtgggaaggacttggctgtgatcaatccaaagtgtagctttggccaaagtaaaaaactaaaaaataccggtcgtcttaggacagaacacaatgcatacgtcctcccagatggtcatgtaatcctagaagagttcgaagacagagttccgggagatagatgtccttacctactagtggttatttcatgtcctgatgactacaaagttaaaggcacggttctgataccgtgtcggacagcaaatagaggaaagtttccactgaatggtacctacttccaggaaaatgaggtttttgcagattactcatctagccgaaacccaataactgtacctagggaatgtattgggatgctggagagaagcattgtatactttggttcatctatacactcgatcacaaaaggtcaaacaaggcaagatatacaggaatgcttgaaggaaggatatatctgtgtacggtcgttccaccggaagaccagaataccactacgcctatgtagcacactacatgctaccaacaccaaacctgctcgtgagaagcctatgaagcggactaggacatcgccggaggggaagaagaacgggacatcgccggaggggaagaagaacgagagcctcttctgatgcttgacttcgtgtacaagttgtagctgaatgttcctcaaaatataggattaactagttctgtaacactaacaccccggcttggttatgacttagaaactgttaggccatgtttggttcacatctcctaaagtttagtcacttgtttaaaaatgttaaaggaggtaactaaaaaaaacctcttaaataggacattatagggactaatgtttagttcctaaaatttaggagatgactaaaggaaccaaacatagtttactaagccttagtaaacgtgtgaataaatgcctctcttgtgtggcggctatttttatttctgcatattattttcatctgtttaccttgatgttattgcaactggaattgcatcctgaaaattggtaggatcaatccttcaccaaacatttgtaggattaggaataagtgtatttaggccaaccagcattgtgaagaatgtaattctagtcttcttcggcacggttattatcaacatcggaaaggtcaac

SEQ ID NO: 19320 - DNA, 996 bp, Zea Mays
aattgccactgctccaccccggccatggcgcggggccttctgggttggcacccgtgttacagaatgataggcaatcaggccctgaggaagcaaggactagtggttggtcatcaatggatcggcgtcgtgccccactaccaattacaagtgtggggacattatctaagcagaaagcaccgatagggaatgatgctactgtttctagagatgctgtgatatctggaccaaattttatgggaaggtcaagtggatcttctaggaggcctgttgtttcgagtagccgtgatatggtggccactgacagttccgagccttcacgagcacgtgcaaccgacgcaagcccaggggcgttccgcagagcctcaggtcctcagagaagctcacctgtccattccgcagaacagaagcgctcatcctcaggccggcatccgtctaacgtgaagaactacgattctgctctcaaaggcattgaaggtcttcattttgatggcgacgagagggttcagtactagagccgcaggaaattctacatgcactgtaaaaatcataatcaggtggtaagcatcgtgtttcctgttcgggttttggatcaacaggaaatgaaatgctggaaggaggatctggtcacgggttgtgcggtttcaggtggtcctctgagcaaggtaaataaacggtcctatctgaggcgcttcatgcctagctctcataacgttgtcgttgtgtacgtaaatgcctcttgtagcctgaatgtcaggcgcccggattcatgaatctattttattgttgtattccttacgatgttccatcttgggactacaatgctgcaactggtagggcttgatttggaacactggaattcgagcatgtagaatttttaaatcggttcattggacgaatttgtctgtaacacgtacctgacttgtaatgtgatctgtcaggacaactgatgttatttgccaatgtgataatcacgaaaaagaagggagacttagaaga

SEQ ID NO: 19321 - DNA, 2820 bp, Zea Mays
ccggccgccgtggcattcgcttgccgcgccgaatccacctgcctgctcttcgactagttcgcaactgagtcgtggctatcgaggatgatgccgcgtttcagataacagagactgtgagagtgcacgacacacttgacatgcagagatgaagatcagtgcgcttctcacctccgcgggcatcaacattggcctctgtgttctcttcctgtcactctactccgttctcagaaagcagccggccaatgtcagggtctacttcggccgcaggatcgctgaggaacacgatcggctccgaggggcatttatcttggagaggtttgtcccatccactggatggatagtcaaagccctgcagtgtactgaggaagagatcctggctgctgctgggttggatgctgttgttttcaatagaattctagtattcagcatacgcatcttctcccttgccgcagttttgtgtgttttcgggattcttccactcaattattttggacaggatatacaccatgttcgaattccttcagaatcactagatatatttacaattggcaatgtagaagtgaaatcaagatggctctgggtccattgtgtaaccctgtacataatttctgcagtagcttgcattcttctatacattgagtacaagcacattgccaggttgaagctccttcatcttacaagcgcaacaccaaaaccaaaccattttacagttcttgttcgtggaataccaaaggcagataaagaatcatgcagtgatgttgttgataatttcttcacaaagtatcactcatctagttatctcttccatcaagtagtttacaaagtcgggaaagttcagaagataatgactggcgcaaagaaggcatataagaagttcaaacatttcacagatgaaactgtcgatcaaggttgcaggacagttacctaccgctgttgtctgtgtggagcttcttcaaattctttcaagttgttgaacactgagtgtgagcagaacaaggggaaagcggacaataaatccatcttggacttagacgatgaggaatgcacaactgcttttgtatttttcaaaactcggtatgcagcacttattgcgtcagaaatacttcaaacatctaaccctatgaaatgggttgctaatcttgctccagaaccagaagacgtgtattggtccaatctttggctaccctataagcaactttgggctcgccgtattgctacactcctaggctctatctttttcatgttcatatttctgataccggtgacatttatacaaggactatctcagctagagcagttgcagcagaggcttcctttcctaagaggaatattgaagaagaaatactacatgactcagctagtaactgggtaccttcccagtgtcatactgcaaatcttcctgtacattgttgctccaattatgatgctgttttctacattggagggccctacatctcacagtgaaaggaagagaagtgcttgctgtaaagtgctgtactttacagtttggaacatattctttgctaatgtattatctggtactgtcattagtcaattgaatgtgttatcaagcccaaaggacatacctgtccagcttgctaaagctgtacctggacaggccactttcttcatcacctatgtcctgacctcaggatgggctagtttgtcatctgaagttatgcaactctttggtctgatatggaactttataatcaaatacgttctgagaatgagagaagatacagaattcgttccctcgtttccttaccacacagaagtaccaaaagttctgttgtttggactattgggcttcacattttctgtgctggctcctctgatcttaccttttctgctggtgtacttttgtcttggttatgttgtataccgcaatcagttgctcaatgtgtatcgaacaaggtatgacacaggtggtttgtattggccaattgcatacaacacagtcatattctcacttgtgctcacccagatcatctgccttggtgtatttggccttaaagaatcgccggtagctgcaggcttcactgtacctcttatcatccttactcttttgtttaaccagtactgcagaaaccggcttcttccattattcaagacttttccagcacaggatttaatcgacatggacagggaagatgaacgatcaggaagaatggatgaaattcaccacggacttcattctgcttattgccagttcgctgacactgtagatgtgcccttggataaaattgaaatcgttggtggggatgaggagcaaggctctagctcgggtcagtccagtgttaaagaaacgtgcgaggatcccaagaagcacctggctcaccctacactaaaaggactccctgttaaccgcctccggcatgccgtgaggtcggttactttcctgatcagattgcagagaagaggtttatcagaacagaaaatcggataattagttagccgccaaccccctttgcttgttggctatataaatgtacagaggcatacatgcatatacgatcgttcccttagaagagagaagggctaatgtagaagtctgtgggagaacatcatcatgagtgttgaggtgcaattttgttttgtcgcatggatgagtttgttggttctgcgggttatctggcagattcagctacccaaaccttagccttgcacgttgatgaaattaatgctcatggttttgttgtaagagattaatgtggccaaagtgatctagatgtataatgtcctcctctccattggtttgtgtttgagcctcgcaactttagcaggtctgttagtcttcatgcgccaatcatattgagg

SEQ ID NO: 19322 - DNA, 147 bp, Zea Mays
tctggcgttaaaatattgaaagtaaggactcactttagtaagctattttctgcaaaagtatctaagttgattcttgctaaagcctctccttgattcctatttatccagcatacccttgagagtcttttccttagtcgggtaagactt

SEQ ID NO: 19323 - DNA, 2243 bp, Zea Mays
gtgaggatgtgctgcaccgtttcactctcctggtcgcacaaggggcaactatcccgcgagcggtactccggggagttatcaaacgcattggcatattgtgttcatgctcttcatgcaaaggccgaaaagttgtttcaccttactactttgaggtgcatgctgggagtaccaaaaagcatccatcagactacattttcctggaaaatggaaataatctgcatgatgtgttgagggcatgtacaaatgctacattagacatgttggagcctgcaatacgaaaggcaataggcccagcacctcaggagagaatattcagatgcaaatcatgcaaaagttcattcagtacactccgcagtgggaaatttgctttgttttgtgattcgtgtcttgagtccaagggagctaagaataatatcagttcatccaaagttgggcgaagtcaaacttcatctgccaaggtatataagagtgcatcaccaggagcaaagtcttcaagtgtaggaaggcttacaagaaaggataagggtatgcataaggtcgttttcatgagtggcattttaccagagggcactgatgttggttactatgttggtggaaagaggttactggatggatatataaaggaacttgggatctactgtcattgctgcagcacagtggttagtccttcacagtttgaaggtcatgctggtcgagctgctcgacgcaaaccttaccacaacatatatatgtcaaacggcgtttcactacatgagctgtcaatttcactcttgaaaggtcaaaagatgtcaaacagacaaagtgatgacttgtgcagcatttgttcagatggtgggcaactactcctttgtgatacctgtccaagagcttttcatagaggctccatgatttcagcaaaaagaaattcagtacccgaaccgtgctgctttgtgaccaatgtggtagagaatatcatgttggttgcctcaaggaacataatatggctgatctgacggcattgcccgagggagcctggtattgttctacggactgtgtgaggattaaccagacactgcaagatttacttaacagtggtggagaacctgttcttgccatggatttagatgtcattaagaagaaacgagaagtgaaaggttttaatgatgatgatgctgaccttgatgttagatggagagttttaaaggacaagagctcagacgacagcaaactagtgctctccaaagcagttgccattttccatgaaacttttgatcccattatccaggtttcaactggacgggacctcattccagccatggtttatgggaggagtgcaagggaccaagattacacaggaatgtattgtactgtgttaactgtgaacaatattgtagtttctgcgggtcttttccgcatcatgggtagtgaaattgctgagctgccgttggttgctacaagtagggatagacaaggcttggggtatttccaagcacttttttcctgcatagaacgtctgttgtcatctttggaggtgaaacattttgtgctaccagctgcagaggaagcggagtctatctggactgagcgttttgggttcgcaaagataagccaggatgagctgcgcgaatacctcaagggtgggcgaacaactgtgtttcaggggacgtcaaacctgcacaagctggttgcgaaacttgaatgctagttatgtgagaattgtatggcaagagcaaggacatgaagctaagaagcagctcattgtttgtgtgcctctgggattgatgcagacaggaaagaggcaccctgatccctttcttgtaaatgttggtgagcatgttggcattggcatcttgatctgtttccataggtaaggtgaagaggattgtgtaagataaaagggacaagctgtatgtaaagacaagccaaagctgagtgaatttcaggcaccttattgtgtggagggtcctgtgtttgttgagtaggcaacgctcgggctggtgtgagatgatgactgcatttgtgttgtgttggtggtattttcactgctgacatgactgttgtatcggatgacatcttttctgttttatgacagtggcagtgtgatactaggctgttaggaggggacgggggaggtcaaacccaacgtacatcatgagtggagctgctgtaatgtaacagaagtattgcaccccccccccccccccccccaataatatataacatgcttaatttggtgcgaattccttgccgcttgtggagcttag

SEQ ID NO: 19324 - DNA, 1767 bp, Zea Mays
agtcctgatatcataattgccacgccaggaaggctcatgcaccatttgaatgatgttaaggacatgactctttgttcagtggaatatgttgtgtttgatgaagctgattccttgttcagcatggggtccgccaaacatttgcatgatattctgaagaagctaagtgatacacgacaaacgttgctttttagtgccactttgccgagcgcacttgcagattttgcaaaagctggactgcgtgatccgcacactgtgaggctcgacttggacaaaaagatcagtcctgatctcaggctagccttcttcacactgcgccgagaagagaagcttgctgccttactgtatttggtcagagagcgtatcagctctgaggagcagataataatttttgtttcaaccaagcatcatgtggagttcttgaatattttgttcagagaagagggtttagaaccttccctatcctatggtgctatggatcaggaagcgcggatgattcatatttcaaaattcagggcaaggaagaccatgctgcttattgtgacagatgttgctgcgaggggcttggatattccattgctggataatgtagtgaactgggacttttctgcaaagcctaagttatttgttcatagagttggtcgagtggctagacaaggtagaagtggaacagcttatacatttgtcacttcagaggacatgccatatttactggatctacatctttttctttcaaggcctcttagacctgctccaacagaggaggaactcctaaaagacatggacggtataaatatgaaaatcgatcaagctattgcaaatggggaatcagtttatggacgatttcctcaaaccgtccttgatcttgcctctgatggattaaaagaagttattagtggatgtacggagttgatagcattagaaaagccatgtgctaatgctttccggttgtatctcaagactcgttccatgccttcaaaagaatctatcaaaaggggttctaatcaatggctagatgtgatgaagaagaaacgagaagttcatgaggggattatcaatttagttcaccaaaagagttctgaggatccaaggccagaggttgaagaggtggatgacattccaaattgggagaaaaaagaagtttgtggcaagaaacggaagttacagaactttagagacgaggactactacataagttcagtacctcaaaaccatcatttggaagctgggttgtcagtgagggacaatgaaggatttgttgaaaatagattggatgcagctgttcttgatctagttgacgatgaagcttctggtatgcaagcacagagaagtcgatatcactggatgaagaacaaatttgtcaagttgaatgcaggggatcgtgtcaccgctacaggaaagatcaaaacggaaggtggtgcaaagataaaggcatcggctacagggatatataagacatggcagcagaagacacataaatcaatcaatattggtgggaaatctggcaactttgcagaagagcgcacacccagttcaggcgggtatcagagaggcaacaagaagcatttcgcggggccatggccacagatctataccaaatgccaacgtgccctccgaaataaggaaccccgagcaaatgcagaagagcaggcagcagaaggcaatggaaatcacgcggttgaagaacaaatcggcgaaagacgggaaattccagaagaacaggcggcccgatgggaacgggttcagcaaaggggctggtgggaaaggtaa

SEQ ID NO: 19325 - DNA, 3959 bp, Zea Mays
tttacccctgttgcacttgtttactgaaacatctccaagaccaaggtgattgtattcaccaactgtagtctagtttttttcacatcattcaacccatatttcaatgatatcgtttttgtggatcatagttggatgaccaatgataaatgtgataagttgcaaactttattctcagaagatgactggaagttagttcagttggtgcttactttgttccgcaacgtcttggctattcaagaaatcacattgacgcagaaagcatctggagaagctacccacttactcttcctgtctgataactttttggagctcatgttccaagagaatgtgatggacataatcttagttttgactcagcatattgatgagccctctggttaccttaaggaggaaaaccttcttttaatggagatttaccattatctcttcttaggccgagacccaggactgattgcccgagcttctaataaaggatcgtgttaacggagatattgtttcatcagttgattcattgagattgatgatggaagaggaagaaaggaaaaaaagaatgttcaggcaattgaactcagaacatagctcgcttagtgggacttttacgtgcttttctgtggatggatctaaatcattgtgcaaagggaacccaagctctgcatctgctaatagcctcttgaaaatacgtaatgtccaaagaggacctcagaaacggatagcctgggacaatgaacttctgtacgtaccaaaggagggtattacagaaatgcttagaagcttcatggatcaatttttatctggagcatacaatatcctgatgcagtcagtctgtggtgatatcatggatgagcaccactccattgagaaatctgacataactacattcttcaaagttgctcggtttgttctagcttttcaacatgaaaaggcttcaaatgatcagaaatctgctaaagggattcaaccatctggggtttctcctagcaatgaacctgatgataatctgccatttcatggtgatatatgtggacctgttgcggccacgttgaatgaagatatgttcaatatagtcatttccaggtggcgtgagacgtatgaggctcttaaggaaactaacgactacaaaactctttcagcagctgggtctttaatgaagaacatgattgacatgatatatttggtgctaaaagtactccctgaagattcaagggaatctcaaacagctcgtgttttgctctataaactgttttatgatcagacagaacatggtctcactcaatttctgctgaacttgttcagatcgtttgatagtcacaagcaacccaaaagtgatctagtggatttattagaaacaattcatatcatgctacagctcatggaaaagcttcaagcacgtggtgcattaagggttgcaaaaaagacaaaaaaggtcagaagaaagaagtccacaaatgataaaaaggagaattcagaacccaaagtggataatgcagaaccaaacgatgctaatcctacagatggaacgaaatgctcacctgaaacacttccagatttgagaagcgagggtcctgctttagaatcttctccctcagaacctggaaaagtagacactagtggcgcacatgtactggatacacttgtggacactgtagttaacattgagagtaccgcacatgctgaaggtgacccatcttgcacagacagtggcgtaatgaagagaaatctcattgaagaagagggtgagacttcagattcttcagttgatcaccaacctgctacaagtgaagttgattttaatgtttctcggttaatatctagtcttgcaaacaattctgttgtgcaaaatatttgctggctgttgaagcattacaaaagtaactcctaccgtacaaaccattacataatatgcatgctacggagattctgtgaagacctagagctgtcaccgatgctgtatcagctatcacttttaacaactttctatgatatattagcggaacaaaagttgtctagttcaaaggagtacacaaacattgtaaattttctttctaaagttgtgaggaaaatgttgagaacaataaaaaaacagccactgctatttgtcgacatactattttggaagacgcgaaaggagtgtcattgcattgatgctgatgcactactgaatgagcttaagaatgatgttggaagcaaagacagtgaaattggttcaagtaaggggtggagagatcgaataaatatagcagattctcttggtgacgatgaagttgacgtagttataccgcaggcaccttatgatgctgataaggatggagatctatcagctggtgaacatactgatgactttaggaagagtagtactaaatataaacggagcagattgtcactttcagatagtgaggctgatgaaatcgagaggaaccatgtatcaagagattcggtgcccaaagttccaaaacgacgaggtcgttctctttttacggaagagcaagagaggctcataagagacctttatgaaaaatataaggatggtcctaaatgcagtcatataatagctgagtctttagaccccagcgggaagatatcttctgctcaagtttctcgtaagcttacacagttaggtctcaggaatgtcacaaggagaaaaaaggttgcaggtgaatctctttcaactggagatcggactatagaacaacaagacaactcgcttgatgatctgaaccccatgctaggcgaacagaaccatggctccaaggctaaaagctccaggcccagaaggaaaaaattacacacggcaagtgatgaccatgatgacacaagtcagagaaaatcatctgatgaagacacattacaagtacttaaaagcagatcaaaaagtaagaaagttccattggtggatagttcactgagtggatcacagcatcaagaagctcagcatgacccagactctgatgatgcgaccataggatccatgattagaagtagaaaaaagaagaggttatccacgtcagattttgaagggaatgtacgaaaccatcaagaatcttcagacaacaccaaagccaaggactgttcaccgattatatcccaacatgagaaagcattgcaagacatttatcctgatgatgagaccattggatccatcattagaagtgtgaaaaagaagagatcagtgacatcaaatttctcagcgaatatagaagcccaagagtctttgagaaatattaacctacaagatgaaactgttgtttctaatatcatggatgcttctgtaaatcatgggtctgatccagtcaataacagtgacaatactgttgaagatgaacttttggatgattttgaaactgagctagtcaataacggtggcaatactgttgaagctgaacttttggatgattttgaagttgagctagatgatcatgagcatactgaccaaaggatcactgatgatgaaattatgactgaatcagggaaagcaacaaactccgatgctaagggaagggctggtttgaaaagaagacacagaatggttattgacgatgaggatgatgattagtaactgttcaggactgaagaacccgtaactattgaggagtggagtttcaaatgggaaatgggattaaaaaaagaacttttcaggattgtttcccttgcactgctaagctctgagcacgattcaagctgtttcacacctactagtgccagatgttcttccatctgtaatgtttagtggggtcacaatctaatggaattttgcagatgcaaagttcaggctgccctgctgtgtggcctgctgtacagactgataatttcgagtactgttttttttgaaatgaaatactgtagagaagccccccgcagcaatttcgagtactgttggctgtatttgaaactccgaacactgcaactctagcgaatgcgctcagttatactgttttcactttcacctaaagtgctctttagac

SEQ ID NO: 19326 - DNA, 2326 bp, Zea Mays
ctgtgactgtgaggctgtgaccagagataagcagccacagcccacagctccccctggccggtggccgccactccacgctccacgacattcaccaccaccacggcaccaccctgtcccttcagctccaacgtgcatgagagacgccactcgcggtacccacgcggcggcagaggcgctggcggcccgtcgtccgcgccgagcaatggcgtccccactgctctgcggctgcgccctcctcctctacctacttggccacctcgcgacctgccacgccgccagggacaccatcacgccgagcagcccgctggcggccaacgagacgctggtctcgggcggcgacggcaacttcgcgctgggcttcttcaccccgccgggcgccaacagcacgtacctcggcgtgtggtacaacaaggtctccctccgcactgtggtgtgggtggccaaccgcgaggccccgatcgcgggcgccgtcggggacaacccgggcgccacgctgtcggtctccggcggcggcacgctggccattgccgcggggaacgggaccgtggtgtggtccgtccggagcgcgtccagcaggcggctggcgagcccggccgcccagatcctcgacaacggcaacctggtgctgaaagacggtgccggcggcggcggcgccgtggcgtgggaggggttcgactacccgacggacacgctgctcccggagatgaagctggggatcgactacgtgaaggggaagaaccggacgctgacgtcgtggaagagcccgtcggacccgtccacgggccccgtcgccatggtgatggacaccacgggcgacccgcaggtgttcatctggaacggcggcgagaaggtctggcgctccggcccctgggacggcgtccagttcaccggcgtgcccgacaccgccacctactccggcttcaccttcagcttcataaacagcgcgcaggaagtaacgtacagcttccaggtgcataacgcgtcgatcatctcgcatctgggcgtcgtgagctcgggcaactacggcctgctgcagcgttcgacgtgggtggaggcggcgcgggcgtggaacctgtactggtacgctcccaaggaccagtgcgacgcggtgtcgccgtgcggcgccaacggcgtgtgcgacaccaacaacatgccggtgtgctcctgcctgcgcggcttcacacccaggacccccgcggcgtgggcgctgcgggacgggcgcgacggctgcgtgcggtcgacgccgctggactgccgccgtaacggcaccaccagcaccaccgacgggttcgtcgcggtgcggcacgccaaggtgcccgacacggagcgcagcgcggtggactggagcctgacgctggagcagtgccggcaggcgtgcctccgcaactgctcctgcacggcgtacgcgagcgccaacgtcagcagcggcggcggcgggcgcggcggcggcgccggcggagggtcgggctgcgtcatgtggaccacgggactcaccgacctgcgcgtgtaccccgacttcgggcaggacctcttcgtccgcctcgccgcctctgatctcgatgtgctggaaggcagatcaagggcggcacgcattagaatcgcggttggtgtcagcgtctcgctgctggcgcttcttctagcggttgctggcctcctcatctggttaagaaagagaaggctaacgagaacagccggatccagcaaatggagcggctcacgcagcaccggccgtcggtacgaggggagcagccatggtgacgatctggagctgccaatatttgatctgggcacaattgcagccgctacggatggtttctccatcaacaacaagcttggcgagggtggctttggaccagtatacaagggtaaactcgaggatggaatggagatcgcagtgaaaacactctcgaagacatccgcacaaggtcttgacgagttcaagaacgaggttttgctgatagccaagctccagcaccggaatcttgttcgccttctcggatgcagcattagcggacaggaaaggatgcttgtttacgagtacatggcaaacaagagcctggacttcttcctgtttgagaaagacactgtggtgcttgactggcaagtgcggtatcgtataatagaaggcatcactcgaggtttactctacctccaccaggactcgaggtacagaatcatccatagagatctgaaggcggccaatgttctcctagacaaggagatgactcccaagatttcagactttggcatggcaagaatatttggcaacgaagagacggaaattaacaccttaaaagtgtggttacatgtctccggagtacgcaat

SEQ ID NO: 19327 - DNA, 3753 bp, Zea Mays
gcgagtagaggcggctgacgaggtgacgcgtgcgtgcgtggcgtccagcgtccccctcccccgtctctctccctttctctctgcagtctgcacgccaaaaaaaaaaaagtcttcagccatctcgacggctcgtcggctcgaccacttcgcctccccaccccgccggaaccctaaccccagccgcgagagctccacccgccgcgccgtgccgatgggacggtcgttgtgaattgaagtagcttggaagagcagtgttatgcacagcgatgggagacaatgtcctaaaactcagggtgggcttctcagggtaaactgcattatggattctggcaacagttcatgctctagaacacgaagtgggcttctaagattaaagggcttactggattccagtggtgtttcgagttctagaactcgaagtggccttttaaggataaagagctttgtggattccagtgatggttcatgttcgaggtcacaaagtgaccatgtaagatgtagccctcctattgtcgaggctataataaatgacgaagcagtcttgaaggagtctcctgatggattgatgaaaaaagagatacctgttaggactcaaaatgagtttgttagacagaactctgctgacaaggctgtaaccaaggacgattcaggcatgcggacgcttcccaatgggagtttgagtgaagatatgccttctagaacacggagtgggctggtcaggagaagccctactgttaagactttaagcaaggatcaatcagtcattaatgggctggctgatgggtcactgaaagaagacatgcctcttggaacacggagtggccttgtcagaggaacccttgctgccaagactcctgatggatggatgaagaatgacaaggctgctggaacacggagtggtcttggtggtggaagattggtagccaagactgtaagcaaggacaaaagggctgttgagggtttgcctgatggatggcgaaaagaatacaggccaaggaagaatggttcatttctggatgtgtactacattgatccagtcagtggatatgaatttcgctcttttaaggatgtgcaccgttatcttgaaactggagatattagacagtgcgccgtgagaccaaagaagagtaccatctgcgaagttcatataatagaaagtcaaactcatgcaagtgcatcaccacaacacacgaggcctggtactgcggataagggtattcagtgtgaaatattaacttcggatggtatcatggtaccattgggggaactgattgctccatataatggaaatgatactgaacatactgtgttaccagagcctgagaacttgaaagcaattcaagggtctgacaacaagcttgagacttcggaacacgtgagtgttcaaccggtttctgcacgtaatggttcaaggcaaaccaaatctgttaaaaggaaagaacgaaatgcagaggtcaaatccaagaagcgcaaaaccagttctgctgtgactgctgttcgagcgtcgccccgcttagctgcattgaaggttcagcttgaagtgagcatcaaacatgaagatgccatggttagcataaatcatgtggaccaggtacagactatagaagagagcgccattgatcaggcacacaaaagccaatcgggctctgttgatgagatacatggtaatctggaaagcactttcagtcagttacagttgagccaagcagacactgctaatggaatgcaggctatgcaggaaaacactaccattcattcacaaccaagccaattggatactctgaatcctacacacagaagccaggagaatagtggcaatcagttacaatcggtgctcacagattcttcgattccaaaacgaaccacacaggaatgcactatagacgagccaagccagccaggcataaatcatatacacacagatcaggagttcactgggaatcaatttcggtcgaacctaccagatgacactgttatttcattaagggatattgaagaatgcacagcccactcaaagccaagcaataccgacagtactggacaaattcaggccaatgaggaaaacactgccaatcaagtacagtcgagcctaacagacacagttattccagtaccggttattcaggaatatgctactggttattcacagctgagcaaagctaacacctcaaataaaaaacaggccaatcaggaatacatagctgatcaagtacaatcgagcctaacagacactgtcattccagtacaagttattaaggaatacacaactggttatccacatattaataaagctgacatttcaaatcaaatgcaggccaatcaagaaaacactgatgatcacttatatttaagtcaagtaggctgtgtcactcaaatgcagataattgaggaaaatttgcccaagcaacctcagctgagccaatcaggcactgggggtagaatacaaattgatctggaaagcactaccaatcacttgctaccaaactatgatgaaaattctatgttgcaatgtggtttatcttgggctcctgaacagaacagcggagcccttagtacagatttctggaaaaatgttgaaactcaggcttcatcggtttccatgccaataaatggagcacctgttgcaagctttccagcaaatgttagattccacaatgcagcagcagcagcagaacctgctttaccgccacaggttgctccagctgaagcaggttctgatcagtcggggttggcctttcaatctgttttcggaaacatctggtcggatccttgcatcgagtttgcttttaagacccttacaggtgacattcctgttctggacgacacaacggctgtcacagactactttccggagcaacaagacttgaataaaggcccagcaccaaaccgtgcaggttctgttgataattccagaaaccacacacaagtcgatgtgaaccttccaccacctgctctggatgatttctacaatggcaattggttccctccccaatgaattcagtatgggaggaaacaaatgcaataacattttgtacctgtgaaaaacaaatcagagaaggctaatggccagattacaaagcaatggtcgtgcgctaatgatttctacaatgacagttggttccctcccccaatgaattccgtgtagggaggggaaaaatgcaatgacatttttttagctgcggaaaggcaaatcagagaaggctagcggccaaatcccaaagaatcaatcgtgcactctgaactgaatgtgtcatcccggaggacacattttgtaaaaaaaaaaaaacagtagctttatagccttattagactgttaaaacacactcgactgatctggttccatcaacaaggcttcacggagactgtcgagtacctgatctgggtcatgttttccatagtttgcttctgtgcagttgcctaataagcccattcgttgtaaactagctagttctaacttaagaaagctccctcagggcctatgcatgggtctctgattattgtgcagatgaactgttgttctggacattttgaacatgcaaatgtggaagcgtcactgtcagttgaattatgtttcagccgaattgagaagcgctaatccgctgtttgtgtagagtttgctgaatgttgatgcttgtgcttggttacttggatcagtgttttttagggggctcggcttgcagtaacgatgcaccttgttatatatccagaaaaccttggttgtcactgttttactttcatcacttacaacttgac

SEQ ID NO: 19328 - DNA, 3448 bp, Zea Mays
caccctccgttcctcgtcgccactcgcgtgccgtgccgtgtgagtgaccctcgtcgcgactcgcgtcgctaggatgagatagaaacgaaaccggcccccacacccggctcgctcgcatgaagcaatcgccggcgtctactgcagtctccgactctgggatgctgggccgccgcctcgccttgctcccggcggcgaccgtcgggcgcgggggtaggacgacgcgggcgcggatgacgatggggtgcgtgctgctcgaccacgtggcgccgcggctcgcggtggcctcggccacgctcgtgggtgcccgggaggtgatcgcggcggctgccgccgcgggcgcggggggaagcggcgcggtgcacggcgccgtggcgtcgacgctcgcgcaggtagcggtcacggccgtggcgattgcatcgggggcgtgcctttcgaccaaggtcgacttcctctggcctcgcatcgaccagttgccagatactcttatatttgaaggagtggaggtgacaggataccagatatttgaggatcccaaggtgcagaaagcaatagaatttgctagtacagcccaccttgggcaatttaggagaacaggggatccatatattacacactgcatacacactggaaaaattttagctgccttggttccgtcaactggagaaagagctgttaacacaattgtggctggcattcttcacgatgttgtttgtgatacatcagagagcttgaagagcatagaagagcagtttggggctgatgttgctagcttggtatctggtgtatcaaaattaagctacataaaccagctacttcgcaggcatcgacaaaaaaatactggtgggagcactcttacttcagaggaagcaaataatctacgtgttatgttattggggatggttgatgatcctcgtgtggtgctcatcaagctggcagatcgcttgcacaatatgcggacaatttatgctcttcctgtacctaaagctgaagctgttgctcaagagacattggctgtctggtgctcacttgcttctcgattgggagtctgggctttgaaagctgagctggaagatttatgctttgctgtcctccagcctcaaatcttcaagaaaatacaatctgaacttactttaatgtggaatcgtaccggaaaatctaaaaatatgagaagatcatcaattcgaaacgaattacttgcttcaatgaaagatgggaatatggtgtccatcaatgatttgtttagttcatgtaaccaagaaagaccaaatatgaaggacttattgcaggcagttttgccatttgacatctttttggatcggaagaggcgttcatacttccttagcaatctcaatagtaattctggagaatctataccaaatcctaagatagttgacgatgctgctgttgcattagcatctttagcatcttgtgaggaagaacttgagcgagaattactcatatcaacatcgtacatacctgggatggaagtgactttgtcgagtagactcaagagcttgtacagtatctactgcaagatgaaaagaaaagaagtaggaattaggcaagtgtatgatgctcgtgcattgagggtgattgttggagacaaaaatggtgccatgcatggatctgctgtccggagttgttacagcatccttgatatagtacacagtcactacacacagcagttcaggcatctgatagctcaccgctggaggtccagattagaacccagcgaatgcatgagtatgcagaacatggacttgctgctcattggctgtataaggagagcaaagttgagtacagaagtagcatgagtaagagaataagacaaagtacatcatattcatctagttcttcagaagatgaaagttctgtacaggatgatatcccatcaaagtacagttcaatgaaagtggggcatccagtgctaagaattgaaggtagtcacttactagcagctgtcgtagtcagtatagataaaggaggaaaggaattgattgttgctgtaagttttagtcttgaagcttctgaagctgtagctgagctaaggtcatcttttcagttgaagcgttgggaagcctatgctaggcttcataaaaaggtttctgagaagtggtggtgtgcacctggacatggtgactggtcaacaaatctggagaggtacacactatgccaggatgggatatttcataaggtctgtacagctgaaacattagctctttatcagtttttgtttcttcttctcagccttttgttctgttttagattatatgagaatgcaaaactgatattgcatgcacatttggaatcatcgcaccaactgaaaaatttagagatacaagttactgctggtgccctaaactcctattatgtgattatgtcgtgggtttgattatatcctgtgcgtctaagatgtcttgtttcagcaagaccaatttgggagacttttacctacatttattcaaataattgatttggcggaagaggaagaggaagagtattggatggttgtatctgccatattcgagggaaaggaaacttgcagtctaccatctgaatcgagttatgctgataaatcatcatctgaacctccaagttctactccattaagcgaccccatcaacaataaggtgcatttgctcagaaccatgcttcaatgggaggagcaagttcgtcgtggcgcatctttggcagagaaaagtctcagtgcaagcatctgcacaaaggcaatcctgcgtgaggtggccataatattctggcctaatggcaagattatgagaatgagcactggtagcacagctgctgacgctgctagaagaatgggcgtcgaagggaagctgctctgggttaatggccaactagtgctgccccaaacagagctaaaggatggggatatagttgaagtgagggtatagatgcaagtaccagattccagtacaccttcctcagggttattgatcatattggttcctcagttcttgccctatcttggcaatgcatcgaacctcaattgtacagtccatttgtcgaaatgaatcgaagaaagaaggattaggtccagtaagtgttgtgtcatacaagagttcactgtgtacataagaaactgcaagtataaaagctgtctgtccagctgtgcttctccttgcccatagttacagtggtaatgtaaatttccgtaagtaaagatgtagtaatgtttagttagtggtccacatttcagcgtgaagttatgaagtgcagtagcgctgcaagtttttttttatatatgtccaaagtagatgtctcatgctgcctaaaaaagatgtccatgtcccgtaatttggcaagccaagattttcaacgttgtttggtttgtggagtcaacctatgcttgatgtatcatgaattcatcccttaaattttggtggaaatcctcatgaatatactactccgtccgtcctaggatata

SEQ ID NO: 19329 - DNA, 2107 bp, Zea Mays
taaggacaaaagaaaacaaaaggaaaaaggaaaggacaagtgctcgaggttcttgctccgctcttctttctgcttgctcatcccagccccagcccactgaaactctcgaatccgcggccgccccctccgcgatcccgacgtccgtccgccttgctcgaactcgacgctctcttctcctcaacgcgctgcacctcccccccccctcccggggggcggcgcggccaccggggccctctagcgcggctgggctgattaggtggagtagaatggaggcccggccggagtgggatctacgcaagatgagggagctgcgcttcgttgtgttgcttctggtgatatccttgccgtgcttctctgcatccgatcgccaaggagatgctttatatgatatgaaacaaaaactgaatgttactggcggtcagctttcagattggaaccaaaatcaagttaacccttgcacatggaattctgttatttgtgacaataacaacaatgttattcaagtcactttggctgcgcgaggattcactggtgttttgtcaccaagaattggcgaactccaaaatttgagtgtcctgtcattggctggtaacaggattactggtaccatacctgaggagtttggcaatctatctagcttgacaagcttagatttagaggacaatcttttagttggagaagtaccagcttcccttggcaacctttctaagcttcagctgttgatactgagtcaaaataatttcaatgggtcaattcctggtagcatagcgaacatttcaagcttgacagacatacgcctggcatataataatttgtccggtcagatacctgggttgctgtttcaagtagcacgttacaagcgaggatgatcgacgaattgcgtttggccagctcaaaagatttgcatggcgagaactgcagattgcgactgataatttcaatgaaagaaatgttcttggacagggaggttttggtaaagtgtacaagggagttcttccagatggcactaagattgctgtaaaacgactgactgactatgagagtcctggtggggaggctgccttcttgcgtgaggttgagcttatcagtgttgcagttcaccgcaatctcttaagattaattggcttctgcacaacacaaacagagcgcttgttggtctatccatttatgcagaatttgagtgttgcctaccgcttaagagattttaagcctggagaagccatcctggattggccttcaaggaaacgggtggctataggtacagctcgtggactggagtatctgcatgaacactgcaaccccaagatcatacaccgtgatgttaaagctgcaaatgtattgcttgacgaggatttcgagcctgttgtcggcgattttggcctagcaaagctagtagatgtgcagaagacgtctgtgacaacacaagtccgcggaaccatgggtcacatagcacccgagtacctgtccacagggaagtcttccgagaggacagatgtttttggatatgggatcatgcttcttgaacttgtgactggtcaacgggctattgacttctcacggctggaagacgaagatgatgtgctattgcttgatcatgtaaagaagctacagagagaaggggagctggactccatcgtggacagcaaccttaaccagaattatgacggcgaggatatcgagatgataatacagatagcgctgctctgcactcaggcatcacctgaggaccgtccatcgatgtctgaagtggttaggatgctggaaggcgagggtttggcggaacggtgggaagagtggcagcatgtggaggtgacaaggaggcaagaatatgagcggatgcagcggaggtttgactggggagaggattcgttctacaaccaggaagcgatagagctgtctgcaggtagatgataatctgtggaaacggatggttgtaaatgcgcaacgaagtggtgcctgctgtgccgtatataactattatttgtagagtagctattagatagatatgttcataagattattcaaacaaacttgctcggcgatagcatgaatgtggatgaaattagatgcataaataaataaatggaagtagagatgaaagtggtaa

SEQ ID NO: 19330 - DNA, 1316 bp, Zea Mays
tatctctaaagatttagccttgggagcgaattggaaacaactatcaagatcacagggtgagaatgggccttcccagggtgagcgcatatcaacattagatgaggggaaacgaacctatacactatttcaaggccattctggaccagtttattctgcggcctttagcccgtttggggatttcctcttgtcatcatcttcagactcgacaattagactatggagcaccaagctgaatgctaatcttgtctgttacaaaggacacaactacccggtttgggatgtccaattcagtccagttggccattactttgctagtgcttcgcacgacaggactgctagaatttggtcaatggataaaatccagcctttgcgaataatggctgggcatctttctgatgttgattgtgtccagtggcatgtaaactgtaactacattgccactggctctagcgacaaaactgtaaggctatgggatgttcagacgggtgaatgcatacggatgtttattggtcataggagtatggttttatcactggcaatgtcacctgatggacgatacatggcctccggagatgaagatggaacaatcatgatatgggatctctcgactggccgttgtgtttcaccactactaggacacagctcttgtgtgtggacacttgctttcagggtcgcaatctgattcgattatctgtagccaaacttagcgtctaggcttcaaagcatagcacaattttgggctgtgaaggagcattgcttgcatcgggatcggctgactgtactgtaaagctctgggatgtcgcttctagcacaaaaaccctgaagacagaggataccaaaggcagctcagctaaccgactgagactgcttaaagctctccctacaaaatcaactcctgtttatagcctgcggttttctcggaggaaccttctatttgcctctggtgctctctcgctaagctcgtcgtaagctgtgttttttttttgcagaaaactagaactggtcctgttttgacattgagtagtgaagctggcatttcagagactgcctattgtacagctaatattttcattagcaattccaacgaactcagcatgtactgccgaattgagcaccgcagattcgttgtagcgggttgtgatattgtaacaatattattaggtaattacgttctgtaaaattgttttttaggttgtgaccttatgaacgcaactaaatgtacaagtgctgacaggcgatagcgtgaatgcaatggtctatcaggtctggagtttggtttagtgaccagttctagtaccaaggccgtttaagacaca

SEQ ID NO: 19331 - DNA, 1046 bp, Zea Mays
agaaaccagaccaacaacaaaaaccgactagcccaggcaagcagaaacccactgtctccgcttccgctcccgactcctttgtctcgtcctcatccatccaaccaggcgagccaacaagcaagcaaaagtaaacggggcgaggagctggagagacgccggcgacgcgggcggagcacgtcgtcgccaacgccggaggggaggcagagtacgtgcgccgcatgcaccgccacgcgccgaccgagcaccagtgcacctccaccctcgtcaagcacatcaaggcgcccgtccacctcaactactcatccatcataactgtccaccccgagagcattgacgggaggccgggcaccctggtgatcgagtcgttcgtggtcgatgtgcctgatggcaacacgaaggacgagacatgctacttcgtggaggccgtgatcaagtgcaacctcaattctctcgcagaggtatcggagcagctagcagtggagtcacctacgtcgctgatcgatcagtgaagtcacctgcgtcgcccatcgatcagtgaccaccggtacaaaaaaagacgtcaatcagcaacaaataagaagaagcttcgaaggctggctggagagttcaacctttttgagaccggtggtttggccatcgtcttctgcgtgtaatgtctcttggaatatggaagtattagtcgttgtgtaggattaaacatctgtagtagcttgtatgctagggatggttgtttagccttagaaactgcacctagatacctcatggcatgtatgcatactgctagtatgtgtagagatcagggaaagcatggagcgggttttgcctcttaggtgcatggagatctgtctttttttccccctccattttgcggtggcgactctattggttggggttcttggataaatatactttcccgcgaacgcatagggccggattttggaattggttcaattctcgtaattattgtattctctagtgttattgggatttggggtttggaattgccggactgcgataagtgatgaaaatgtagacattaaagctct

SEQ ID NO: 19332 - DNA, 1091 bp, Zea Mays
cagcccagcacacagcccataacgatggcccccggcctattcgggctcgcctaccatctctcctccggtccttcctatcataccggcgggcggcgcggggcagctaatcggcaatccggcttcgcctcgtcgcagtccaatccgcactcaccgccgccctcccgcccctcacctgcccgcggcagtgtcggagtaaaccctaccggacctatcgtcacgcgactgcgggagttgcttgcttcttctgccgctctctcgctccgtcccttccgcccatggagacctcgctgcgcttgcgcagtggcggcggcctccgcatccacgccaaggagaagctgcccctcggccacagctcgctgctgcaggctcatgcggagctcgacctccacacaagccccgccggagttactaccccgagttatctcgctctctttgtcaggcacttctactcgcagctatcagccaatctcggagctggcgtccagttgcacaacggcgatgacctcgcctacagttttcgcgccaagaaggccgtcctgttcaaaccagataatgggttcctaggtctgaaccttaaagggcgcctacttaccgataaagagttgaagccgacgaagacaactggatccgttgaactggcatggaccatacttgacttgaaacagggccaagacgtaaggctcaaagttggttacgaattgtgtgacaaggatcgtcgcacaggggctgtgattgggactggtcgttgccgtagcactgctcctcgcctctacatcctcgacagcttgcgccttacttagttcacttcatcatctacgacccgtgtgctttctgcagcctcagttcgtgccgcctcttttgcccaatggcatcaccgtctaggtcatttgtatggctcgcgtctgtccaccttaataaaatcaggttgtttaggtcatacgtgatctgaatgaagtttccattgtaagggttgtcatcttggaaaacaaatacaacttccttattttaccagtgactctcattctgctagaccatttgatcttgttcactctgatgtttggggcccaactcctttggtttcaaaaggtgga

SEQ ID NO: 19333 - DNA, 1769 bp, Zea Mays
cctacccctgatggggaactgaggaccacgtctgttgcaggtatgggtgttctcggtggagcacctcctgcaagctgcccagcgacccggcactgcgcagaatgggcccgaatctacttgaggtactgcttgtgcagccagaaggaaggtgctgccctggcacttgggctaatcagtgtcataagctggggcttcgccgaggtgccacagataatgacaaattacagacagaagtcaacagaaggactctctgtcgcttttcttatgacctggattgttggggatttgtttaaccttgttggctgcttcctcgaacctgctactctgccaactcagatgtacatggcactgctatataccatcacaactctaattcttaccgtacagacgatatactatagccacatctaccatcgtcttgaagcaaaaaaatccagggcagctagcaaggctcaaaagcatcaacgtgcggatgcatcattacgtgaaaggcttttgggtgccaaggacggtgtgttatccagaaacaacgggtcagatgctacagtccttattccaagctcacctattcctgttaatgtgaaattggtcgaccaataccatggaagcagccccaacaccgactactactacatgtcagcaagatctttgtccaggagtccagtgccaactgctggtacatggttgggcagtaatcgtcaatcgttaatgactcctccacaaacgaatgatcaaaggggatctttaattggtgaaatcgctccagcacattctgcaccatctactgttacaaaaaatgccctctcagtggcaccatggatgggtcttctattgggtacgtgtctcttgcacattttgattggaaacacacatagggagatgccaagtggaactgtcataccagttggaagaaggcttttagtgtttgtggagggtcatggaaattcatcgctcagccatggcaatggaagtgaaattggacgctatcttggttgggctatggcaataatttatatgggtgggcgccttccccagattttgttaaacatgcaaagaggccacgctgaggggttgaatccattaatgtttacctttgctttactgggaaattcaacatatgtaggaagcatacttgtaaatagcttggactggtcgaaagttggaccaaatctcccgtggctcgtagacgctggaggatgtgttttgctggattcttttatcattcttcagttcctttatttccattatcggaagcaaagggagctttcagatgagcacgacaaagcagataaagcctgacagaaatggtttcttcttcagtacaaaggtctggttctcctattatgaacatttgttatgctgcactgtagttgtggtctgatgggaacccttgtacagaattcgcaattttgagtataataactgaagctgaaatgagtacctcatacaactggctctgggtagcagcatcattcttacgtgaagagcaccactcatactcaggagtcgggacagatttggagcgtcatttcactggttgctgcttggggagggtagttctcacggcgtcatctcttgtggagaggcttgtgcacttaatttgtcttgtagtatcaaaacgtcttgtataatattatcactgttctcgaatattggttcattatctctgttctcgaatatttgttctcaaatatttgttacctgttagtttatttttgaaacgacggagggaatatttatttatatgagagattagatgtaactggtct

SEQ ID NO: 19334 - DNA, 2584 bp, Zea Mays
ggcaaagtagcaattttttcgactgcgagacgacaccgggaagagagaggagccgcccgccgccgcctcaggcctcagtccagacccctcgtctcactcgctccgccgctggcgattggtgaagagagctccgaggtgggctctactcgtcgcggttctcgcgaggtccgccgatccgcgccccgctctggatctctggctgatttgttgttctgcaagaaaagtggttctggaggaggagacagaatacagaattgggtcaatgagcagaccaaatgtgcacaacttccaaatctgagttttgagacccatcatagtgcatccaaccttccaaatgatactggtagttccaaaatcgaacctttcaaaccatgtgatgagcagtacactgattacactccttgtgaggagcaaaagcgtgcgatgaccttccctagagataacatgatctatcgggagaggcattgtccaccggataaggagaagctttattgcctgatcccagcaccaaagggttatgttgctccttttcgatggccaaagggccgtgattttgttccttatgccaatgtaccacacaagagccttactgttgagaaggctatccagaactgggtgcactatgagggcaatgttttcaggtttcctggtggtggaacacagtttcctcagggtgcagataaatatatagagcagcttgcttctgtcatcccgatagctgaagggaaagtgagaactgcactggatactggttgtggggttgcgagtttgggtgcttacctgttgaataaaaatgttttgaccatgtcatttgcaccacgggataatcatgaggcacaagtacagtttgcattggagagaggtgtccctgcatatattggtgtcctcggatcaataaagctgccatttccatctcgtgtttttgacatggcccattgctcgagatgtttaattccatggagtggaaatgatggtatgtacatgatggaagttgacagagtactaaggcctggtggattttgggtgctatcaggcccacccattggctggaagattcactataaagggtggcaacgttcaaaggaagatcttcggaatgagcaaagaaaaatagaacacttcgcacaacttctttgttggaagaaggtatctgagaaggatggtatcgccatatggacaaagaggttaaatgacaagtcttgctccatgaaacaagataatccaaatggtggtaaatgtgatttgacaagcgacagtgatgtgtggtacaagaagatggaagtttgtatgacccccctacccgaggttaatagtgtagatgaggttgccggtggtcaactagagccttttcccaagaggctttatgcagtacctcctcgtataaccgatggctctgtgcctggtttctcagttgagtcatatgaagaggacaataacctttggcggaaacatgttaaggcttacaagaaaatcaataacttgcttgatactggaagatatcgcaatataatggatatgaatgctggtctcggtagctttgctgctgcactagaatctccaaaagtatgggtcatgaatgtcattccaacaattgcaaatacttccactttaggtgtaatctacgagcgtggattaataggaatgtatcatgactggtgtgaaggattttctacttatccaaggacatatgacctcatacattctaatgatatcttcagcttgtaccaaaacaagtgccaatttgaagatatactcctggaaatggacagaatcttacgcccagagggtgcaatcataattcgtgacaaggttgatgttcttgtaaaagtggagaagatagccaatgccatgaggtggaagacaagattggctgatcatgagggtggccctcatgtacctgagaagatactcttcgcggtcaagcaatactggactgctgaaaaaacaagcagctaacgttgttcattttcatttttttctccagtcacagctaacttgccccctggctgtgtttattggaaaaatttctgtcgattatacagcccatgtttgttactgaaaatataaaacaacccccttgagggggagtaaattatgtgggatttagctgtgaacttgggatttgattattccactggtgccgagacgcagaagacatgccaaaaggatcaattggcattgtactagtgactcatatctgatcagacagatgcaactgcttatagttggaaccctgcagcagtccgtcaggaagttatgaactagcagtgaacttatagttttgtataggactcctttgcccctccactcactttttttttgttgtatctcagaatttcatcaactggattgtatctcaacccataaggtcttcctatcctattttattttaattgacaaacattttgggcccaaggatgcaacttgtgaccttggttactaatgagatgataatgttttcttttttgttgtggatgtaagttggttactaatgagatgatatgttttctttttatgtaagttggagcgaaaggggctgagttggttaggtgatctgaattttcatgatgctgtgatgaatgag

SEQ ID NO: 19335 - DNA, 142 bp, Zea Mays
gtcaagataggtattgtaagataaagagcatggaggatgccgcaatgagttcgtgagaggtctagtccatcatcttcaagtcaaatatggttgctggatcgttgtcttcttatgatgtaattatttagctattttgtacagg

SEQ ID NO: 19336 - DNA, 113 bp, Zea Mays
ggagtggtagagggggctatgcgcgagggagaggttgtgggttcgattctcaccggctgcgtagccgcgaaaaatgccgcgacttgcgactttgacggagacgggagggcggg

SEQ ID NO: 19337 - DNA, 1106 bp, Zea Mays
cgtggtcttgtttgtggtcatccctgcccactggctgcgatgcgtcggtgctgctgacctccgccaacaacacggcggagcgtgacgcgccgcccaacaacccgagcctccacgggttccaggtgatcgacgcggcgaaggcggcggtggagcagagctgcccgcagacggtgtcgtgcgcggacatcgtggccttcgcggcgcgcgacagcatcaacctcacgggcaacctgccgtaccaggtgccctcgggccgccgggacggcaacgtctccctcgacacggaggccaacagcaacctgccggcgccaacgttcaacgcgtcccagctggtggccagcttcgcggccaagaacctcaccgacgaggagatggtcatcctctccggcgcccacaccgtcggccgctccttctgcacatcgtttctcgcgcgcatctacaacggatccaccccgatcgttgactctggcctgagcgccgggtacgccacactgctgcgcgcgctgtgcccgtccaacgccaactcgtccacgcccacgaccacggtgatcgaccccagcacgccggcggtgctggacaacaactactacaagctgctgccgctcaacctgggcctcttcttctccgacaaccagctgcgcgtcaactccacgctcaacgcctccgtcaacagcttcgccgccaacgagacgctctggaaggagaagttcgtcgccgccatggtcaagatgggaaacatccaggtgctcacggggacccagggccagatcaggctcaactgcagcatcgtcaacaacggctcgtcgtcggtggggatccagcagatgacagtgcccaactcctactctggcgccaccgcgtcccttgatgatgagatcgccacgagctgatctagatcggcgcggtgtgatgtgatgatagatatttgcattgtgtgtccatctttaggctattaattagtacgtttgctcccggtacgcgcgagagtgcgtagttcgtgtgtcattcatatgcgcgtacacgagatttccagtatcaccatgcatgtatcccgtgaatcatcatcagtaaataaaactggtgctctttgagagtctattattatc

SEQ ID NO: 19338 - DNA, 1649 bp, Zea Mays
cggcgagccaacttccctctcattcgtcttccacaaaccctataaccctagcaccgccgccaccatgtcctcgtctccatcttcagtgaaccgccgtcccccgggcccgctagcgttggggctggagtccttggcgaagaagaatacacataggaagaagctcaccgtcaaacctcatccagatccagtcgttgccctccaatggtcggatatggaacgtctcgtctcttcctttggattcagcagccggtgctcctcctctggatctggtggtcaactccatcacccgcagcttctatggcacctcccctagtccccctccatcgtcgccttcacccaccgcttctatatcgccacctctctcattgtagaagaagacactgaggatctgttctttgaccatgccattggtatcaacgttccaaggtcccgcttcctaccagttaaggcgacatcagatttgaagctagtacagtctgatctatataccttggttgatggcttcgttacacgtaattcagccagaacaaatccatcaaatccctcaattgaacttggtcctgagttcaagaaggttgggagcttccttggtcgcttcaagtccatacctagcattgttgagcttgacatcttgaaggtttccggtgatgtttggttcggttctggaattgtactgaaggggaaagtgaccatcactgcaaaacctggcgtcaagctagaaatcctagacggagcagtgattgggaataaggataattttggaaaaggaaagagaaaacaataccagatgccttacaacctgaattagggatgaaactgctaattgcacatggaagtcaccaagaacttggtaaaggtgattcaatgacaaatctaatgattaacatgtgcgatgtggttcacatgttaatgcatgcaactgaagtgcattaccaatgtcccaagagggtaagggtacagtctgatgtatctgaaaggattgctaatggaactagtgttcatgttaaatatcctatttatgatcaaacagtgtaccttaacgattatcataagaagatgttgaaggatcaatatgagggactgaagacaatcgagcagattacaatggactcagcttcggtcgagaccaatatgttcaagctctgcaaggtgaggtttgttcagtttggccaaaaaggcatcccctacctgaacacctacgatggtcgcgccatccgctacctcgacccgctcatcaaggccaacgacaccatcaaaatcgatctggagaccaacaagatcatggacttcatcaagtttgacgtcgacaacatggtcatggtgactggcgggaggaacaccgagcgtgtaggagtcatcaagaacagggagaagcacaagggcagcttttgctgcttggagctttttgctatgtctagttttctcctatttgttgtacaggaaaacttagaatagaattcaaatttggtggtcacaaaagtgtggagactttaattcatatataaagttaggcttaacattagtgcaaacagttgtattttagtttagatttagagtacacttatgtatgcgttgtttgacaatgcttatttatgatatattgaatggtacttatttatattatattaattataatgttgttcaatata

SEQ ID NO: 19339 - DNA, 4905 bp, Zea Mays
gaaaaagagagggggaagagttaaagctaagcgaggagaaaggctgcagtaagcagaggaagaggcgtcccaatcccacggtgcctcgacctcgacctcgaccgcctcccgggctcccacgcccacccatccccaccaccggctccttgctgctgcgctccaccctccgccgcggagccctaggcggagctgcggatcccgagatccccggcgtcgccgccccggagctcgccgccggcggcgggcgcggcccccctcatgcctttggcgccccgatcggagccgacgaccggtggccgcctgaggaggcacagcagctcggcgggcgccggccgagaggcggcggcagcgggggcggaggaggagcaggaggagggggagggcgaggaggatggcgctcttccgcaagttcttcctcaagaagaccccggatcggctgctcgagatctccgaccgcgtctacgtgttcgactgctgcttctcgactgattccatgggtgaggatgagtaccgggattacttgagcggcattgttgcgcagttgcaggaattttttccggacgcatcatttatggtatccaatttttggtctggggacaaaagaagccgaatttcagacatattatctgagtatgacatgacagtaatggactacccacaacagtatgaagggtgtccattgcttcagcttgagatgatccaccatttcttgaaatcatgtgaaaattggctatcggtggaaggtcagcataatatgcttttgatgcattgtgagagagggggttggccagttcttgcattcatgttggctggactgcttttgtatcgcaaaacatacactggtgagcagaagacactagaaatggtctataagcaggctcgaagggactttatacaacagttttttcccttgaatcctcagccttcacatttgagatatttgcactatataacaagacaaggaggtggttcagaatggcctcctattagcagacccctcatcttggattcagtagttctccatgttgttccacggtttgacgtagatggtggttgtaggccatatttgcgtgtgcatgggcaagactcaagccccggtaacaagagtgcaaaagtcctttatgagatgccaaaaacaagcaagcatcttccacattatggacaggcagaagtccctataaaactaagtgtgttttgccgtgtttatggagatgtggtccttgaattcatccatattggcgataatatagagcataaggaaacaatgttccgcatcatgttcaacactgcattcgttcaatcaaacatccttgcgctgaatcgtgatgatattgatgttgcttggaatgtgaataatcagttcccaagggacttccgggctgaggtacatttttcggaccctgattcattcaaacctgctgctaccgtcgaggagatagctgatgatggagatgagactgatgttgcttcggtagacacaggagaggagttttatgaagcagaggaggattggcatgatgctagaaaagaccaagaaactcgatcaactgatggtggaatatcattagatgacgttgcagatggtggggtggcaactgaagaaaggagcagcctagaaaagcaccaattcaatgagggtgtgaagattggtgtctcccagaatttaggtagcatgaatgagaaaggggcaagtgcacctaccccaacttttgacaaccaggaaggtttgcagcagcctcgtgaagttcttgcaaatggtaaactaagcagcactaatggccaagagaacagtgatgtgcatgatatacaggtggttgctacatctgttgattcagagggacacaagtttggatctacctgtcaggaggacatgaaaggtgtaattgcacaaactttagtcaccacagttgatccaagttgcagtgatgaaattgaatgccaggctaatgaacaaacaaaaatatcggaataccctgatttggactacactgcttttggttctcctagaagtttgtcacgtacaaatggtgatacccacttgagaactacaaaaaatgaagggttgcagaacggtgatatcaagattatcactgagaacacaataagtatggacaacgatctagtgatctatgaagagaaaactatagttgtcaatggtaacactgtacaggaagtaaagaatattgtcaatgaaaagagcattgcagccaagatagacaaaccaattattgagagtaggaactcactgaacaacaacaatggcaagattcaaatcgctaaaccttctgatacatctaatggcaaattggatgggtgtagattagaatcttgccttgaggaagccctacctacaaagaaaaccactgtccatgacaggattgttgtcttaccagccactgatgtaggaactgagataaaaaccaagcaagaggggcttggtgacaagcaggattttgcacccccacccccacccccacctcttgcttcacgtgcaggtccaccaccacctccgcctcctccaggtgctcgctctggacctccacctcctccgccccctccaggtgcacgaccaggagctccaccaccaccacctcctccaggagctccacctcccccacccccacctggaggtggtggaagaggacctccaccacctcctgcacctagagggcatcttggtggtcctcctccacctccaccaccaagtggacgtgcaccaggtgtgccacctccacctagagcaccaggtgtgccgccaccaccaggaaataatccatccttaggcagaggacgtggggctgtacgccctctgggatcagcttatggggctgctgcctcacgtaagtcaacattgaagccattacactgggttaaagtgacaagggcccttcaaggtagtctgtgggaagaattgcagcgcaacgatgactcacagagtgtttcagagtttgatatatcagaacttgagagcctttttcctgcagctgttccgaagtccgatgacagctcaaaatctgaacgtagaaaatcacttggatcaaaaccagaaaaagtgcacctaattgagttgaggagggcgaataacacagagatcatgctaacaaaagttaagatgccactctcggatttggtgagtgcagctctggcgcttgatcaatctaccttggatgttgatcaagtggagaatctcataaagttctgtcctacaaaagaagaaatggaacttctcaagaattacaccggagacaaacaaaatcttgggaaatgtgaacagttcttcttagaattgatgaaagtgcctagaatggagtcaaaactgcgagtattctccttcaagatccagtttggttcacaagttgctgatcttagaagaagcttgaatatcatcgactcttcatgtaatgagatccgaacttctctcaagttgaaagaaataatgaagaaaatccttctccttgggaataccctgaaccagggaactgctagaggtgctgcagttggcttccggttggacagtcttctaaaacttacagatacccgggcaacaaataataagatgacactaatgcactacctctgcaaggtacttgctgcaagatctccacagcttttaaacttctatgtggatcttgttagcttagatgctgcatcaaagatacaactaaaaatgttggctgaggaaatgcaagcagttagtaaagggctggaaaaagttcaccttgagtatgatgcttcagaaagggatggtccagtatctgaaatttttcgtgagaaactgaaagagttcaccgacaatgctggagctgatgtgcagtcgttatcttcattgttttctgaagtgggtaaaaaggctgatgcgttgattaagtattttggtgaggatcctgttcgctgcccctttgaacaagtaatctctaccctcttaacatttgtaacaacatttcgaaaagcacatgaggagaacctgaagcaagctgagcttgagaagaaaaaagctgaaaaagaggcagaagcagagaaggccaagaacgcacaattaactggcaaaaatgactctaaaccatcaaatccaagacggcaagctaaacaaaccttagagaggacaaggtctgcaagcagacgaggaagagatgttgggtgataacccgaatggtcagtaattttctgtgcttctgatctgctcgcgaggctaatggacgaccgctgggcaagagaagtttcatggacggacgctggcatccgtcgggtgcagcgcgatcgcatcaaagaaaactctacaggccacccttcaacggtctcactggagaatgccgacgtctgtttttatccatgtcggccatcagggtccagtgctaacttctgactgctgtaaagaattgctaacactgacgctaactccattctttcttttcttttttcatgttacttttccattctttctaacaacggtggccaagtacagccatggcttcgaaaaactaccgcctggtgcttaggtggaaaattgtaaaaaataggcatctgggtgaaaaaaaggtatggagataatctaggtggcaaagagtatcaggagtaaatatgtgatgcaaactcagccagtagtttagctgtaaagttttgtagtgagtgtgtattgccgccactttgtattctatgatcatgaagcagtgaaggcggcgttttctttacgatacgtagtcagatagccttgtcggctacgtgtcgcctgtgtacgtgtgatatatgtgctgtcaattgctgttatgattcaaccttgataaaattaggcatgattcaaatgcatcttttgttagcgtcctaaattgattttagttgaaaataaatagaaatagagtctgtaaaaatgagagtccattgtcacctcaatggctctgtagaaggact

SEQ ID NO: 19340 - DNA, 2204 bp, Zea Mays
cgggattttaccttccaggcagctgctgggctcgtgacccacgccgtctcggaccaacccgagcgccgaaccccaaggctcgcgaccgcgacactcttgtgtcctcctgctctccagatctcgccgtcggcggcggcatgctcccctccaccgtcggcggccgcggccgctacctcatgctcggcatcgcccttgccctcgctgccctgctcgcgctcgcctccgcttccgagtccgaccacaagtacaaaactgaagagccagttaagctttgggtgaataaagttggcccttacaacaatcctcaagaaacttacaactactacagccttccattttgtcaaccgtctgagaaccctacacataaatggggtggtcttggagaggtcctgggtggaaatgagctgattgatagtcagcttgaaataaagttcttaaaaaacgtggagaagggcttcatttgtacacttgagctagatgctaaaaaggtccagcagtttgctgatgccattgaaagctcatattggtttgaattttttatagacgatctgcctctttggggttttgttggggagactgacaagaacagtgaaaacaagcattatctttacacgcacaagaacatccttgttaaatacaatgataacaggataattcatgtaaatctcacccaagagtctcctacgcttcttgaagatggtaagaaattggaaatgacatattcagtgaagtgggtagcgactgatgtgtcatttgcacgccgttttgaagtgtacctggactatcctttctttgaacaccagattcactggttctccattttcaactctttcatgatggttattttcctaactggtttggtttcgatgatattgatgcggactttgagaaacgattatgccaaatatgctcgtgaagatgatgatctagagtccctggagagagatgttaatgaggaatcaggatggaagcttgtccatggcgatgtatttcggcctccccaaagtttgatgtttctttctgcacttgcgaggggctatcatcacaaccttcattgtgtgctatgctcttacatcttttatttctggatatgttagtggtggtctttactcaaggaatggtggcaaaaactggattaaagcgatggttcttacagcgtccctgtttccgttcttgtgtttctcaattggcttcgcgctgaatacaattgctattttctaccgctcattagcagcaataccatttggaacaatggttgtcatgtttgtactttgggctttcatctcctttcccttggtgcttttgggaactgtcgttggtaggaactggagtggagctcctaacaatccctgccgagtaaagactattccacggcctattcctgagaagaagtggtaccttacaccttctgtcatctcattgatgggtggcctgcttcccttcggtagcatcttcattgagatgtactttgtgttcacatcattctggaactataaggtgtattatgtctatggcttcatgttgctggtctttgtcatccttcttatagtcaccatctgcgtcactattgtgggtacttatttcttgctgaacgccgagaactaccattggcaatggacgtcgttttcttctgcagcctcaaccgctctgtacgtgtatctgtactccatctactactaccatgtgaagacaaagatgtcaggcttcttccagacaagtttctatttcggctacacgctgatgttctgccttggcctaggcatactttgtggagctattggctatctagggtcaaccctttttgtaaggagaatctacaggaatatcaaatgtgattaaatccctgctgcttaagctagcaacagaaaaatcatatgtattgtcaggaggcatggcctaaaaaaatggattttaatggtagaccctgattttggaactgctgaggacttgctcccctttgttcgttgttatacgcatttttgtttgcctgcttattcctgcgagatcgtcctcgcaatgtatacctgtgatagtcgagcattagtctggagcacctgtgttcatcattctcttttttttttgtttctgttactttattcggtaggatgtaatcagtgaatgttcgtgcggcgctctactaattaaggcaacaaggggtaggctccttcctctggtcttgttgttatgccttccttcaatctatc

SEQ ID NO: 19341 - DNA, 1971 bp, Zea Mays
aggtcttgatgaccacggcgttgtggcagacatttgttggaactcccttttggatggcacctgaggttattcaaaattctgaagggtacaatgagaaggcagatatctggtctttaggtatcactgccattgaaatggctaaaggtgaaccccctctggcagatattcatcccatgagagttcttttcatcatacctcgtgaaaatcctccgcagcttgatgagcatttctcgaaaccaatgaaagagtttgtctcactatgtttaaagaagaatccagcagagaggcctagtgccaaggagcttcttaagcatcgtttcataaaaaatgcccgaaagactccaaagcttttggagcgaataagagagcggccaaaatttgcagcaaaaagcatggatgccacacaaaatgggcaaacacatgatgaagaggaggattttggtacaggcactatcaaggtcaataggacaaaagatacagctccatctttgagtcaaggaacagttaggaaatctgcagtcagagatttttctgatagatcagagggcacaggaactgtccgagttgtttcaaggcctcctcaaatcgcctccacgaaggatggtagatctgatatgcctcaaagtccaaaagcaccaatacgcacagctgatcgagaaaatcagtggaggtcatcagggactggatctgaagaatctctctctctcagagatactcagagcggacgagggagagtagaaagttctactgatgacaatgatcactctgtaagtgggtcaggaactgttgtgttacgctctccaagagcatctcagttgtactcaacagctagcaaccacagtgccaagcctcccagcagattctcctcttatgaagatatgtctaatagtgggacagttgttcggacccaaaatgaagacccagaaactccacgatcttcaaggtcaaggctggggatccaagaaaaaacatcaaatgctcctcttgaggatagtgccattaaccttgcagaggcaaaggctgctttgcaggctgggttaagaaagggaaatgctcgagaaagaccttttatcaacaggcatgaaaagggatcacatgagcatagatcttctggagtaaatagtcaagaggttcaaagcgaggatgtggacacgcagaaaggtcacaaattacggcaattacctgatgggcagtcagcctctcgtgctagttctgtagcttcacctgcagtctcatcattgctactcccttccctgaaagaggctactggtgacaagtttgatcggcctgctgttcatgccttccttgattccttgatggatttagaacgtgatatacctggatcatgcgaagtactggttggcagattgctacaccggctagggagctcaaaggattcctcattgcaaggtcttcaggagacggcgatgtcaattttcactaaggaacctgaacctccctctgaaaaagcaggcgacaagaagttagctaatatgccaccattggctgctcctaccgtgagcccactggcaaggttccttctcacaaggtggcaaaaccaagtttctcaagatcttaactctgtttgatccctgcgatgcagaaaagtgatttcatgttcgattcggtgtataattaatatttttcagtgtacataatgcaaactttagaactttatttcatccagtcggtctcaaccacctgttatttcatttgttttgttcatggcgaatactccctctgtccccaattaaaatttgttttacaattaatgtatgtgttgtatatatatgtttagtttcataatcatccatatgaatatggatgtaaaaatctagagctagtacgagtactatttttgggctagtttgagaacgtcattttccaaggattttcattttctcaagtaaaattagtttattttttcttaggtcatgtttttctctttattttgaggaattggaatctaac

SEQ ID NO: 19342 - DNA, 1518 bp, Zea Mays
tgcagttactaattggcagattgggttttgttcctaactttttagcttcaatttttgtcttgaatggcaacacctctggatgttccactggatgatttgattaagagcagaggtgatggccaaaggttggctcgtggttcgtggcgtgggcgtggtactggcaacttccgtgaaaggggacttggggtgtcttcgcggaggccacttggtgttaatacttggtcctcatcatttgctattgccaagtcattcaataaagcaaaggattttgtgtggagacatgatctctttgaggatagcatggtagcagctgggctttctgggatagaatctggaacaaagctttacatttcaaatttgcactatggagtgacaagtgaagatctacaggagcttttttcagaaatgggtcatttgaagcactgtgctgttcattatgacagttatagacacccaactggttcggctgaggtgatattcaccaggagaagtgaagctctcgcagcactgaagcgatataataatatgcgccttgatgggaaggccatgaagattgaagtaataggagcagaattgggtctatcagctgctgccgtaccccagattagtgttgttcctggtgcaagcagaagagggcagagagaagttgttatgatgcctggtggaagtgggtttggacaaggtgcatctggcccatctagttcgcttcctgggtggaagcgtggaggctttgttcgaagaggacaagggcgtgttagttttcctcaaagagggcgagggcaagtgcgcagccgtggccgtggccgtggccgcagtagctttgttcagagccgtggacgtggctatgtgcgcaggggtaatgcagagaaatcagccaaacaattggacaatgaacttgacaactacaactctggtgcgatgaatgtcgactaagttaatccatcgtgacatcattcaatccaacctggaagttggaactatgttgaagctaagcttgttttctgtcggtattctgtcaaatgtgcacacttctgtcatgctctagtggcatcagttgaagattagatattccattattcctactgcaatagtcttgtgatatcagaatttgctgtaattgaatgatgaattatgttttcaaccgttgaaaggtttgctgtcaaaatttcaatattatcctagttattgtcagaattttcagtaggcattagccaaaaagattggtgctgactactggtatatcagaatttgctgtaattgaatgatgaattatgttttcaaccgttgaaaggtttggtgtcacaatttccatattatcctagttattgtcagaattttcagtaggcattagccaaaaagtttggtgctgactacaggttgaggtgctcttcaaaaaaatcctaatgtacctagaggtgacaatgagctttaaattttgggaacatattcggtgcacccaagccttggtgcgtatatgatacacatgaattaataaagttcataaaaaatctaaaaaaa

SEQ ID NO: 19343 - DNA, 2234 bp, Zea Mays
agctgaccaattatatccactttaccaggccacacatgttgcagcacagtatggtcagactgcattcatttaccgcattgttgcgaaatggaatgctgatccagatatccctgataatgatgggaggagccctttacactgggctgcttataagggatttgcggactccatacggcttcttttgtttttggatgcttataggggacggcaagacaaagaaggttgtactcctttacactgggctgctattcgggggaaccttgaggcatgcactgtgctagttcaggttggcaaaaaggatgatttgatggtgaaagacaaaactggcttaactccagcacagcttgctgccgataagaatcatcggcaaattgcgtttttcctcgacaacgctagaagggtacatgacagaggatgtggtgcgaacaccagatttgggaaattgtcaaaattaggccttgcaccttttctttggtgcaccattattggcatgcttattacatacgtacactctgttatattaggacaatatgtcatgactatgacagcaccatttgggatgttcgcatggtcaggagtttttcttgcaactgctgggttggtcatgttctataaatgtagcaggaaagatccgggttacatcagcataaatacaaggggctcgcaaaatcaaagggacgatgaaccactgctgaagatggagttagaaaatcctgcgcttctttttggcaactggtcacaactttgtataacctgcaaaatagtcagacctgttcgttcgaaacattgttctacatgtgatcgttgcgtggagcagtttgatcaccattgcccttgggtatctaattgcataggaaaggacttgtaagggatccagattctccatcatcttttggtgcttggattcattattctgcgtttcagcatcctggggttgtttcatttctcgcattggattgtttccttttctttggagttgcagttcttacagtttctcaagcatcacagatagcaaggaacattacaacaaatgagatggcaaattccatgagatatgcatatctcagaggcccaggtggcagattcaggaacccgtatgatcatgggattcgcaagaactgctctgacttcttgttaaatggatacaatgaggacactgaacggctagaccagacattgcacactgatgaggagatgggaatgatacagatgacaagagcggtttcgcagaatggtgacaatcatttacatcatggtaatggcacggaacatagttgcgctgattcacaggcaagcccaaaacctcatagccaagtgggttcgcctcagtgttgtgatcacagtaagaggactgataggacactgttgggcctaggtttgggccttgggcgaaacagtgcatcccggcagtatgttcggtctcttatcccattgtgatctatcatttggatatcatgtgttcgtttcagtgtagattggatttgttcactgctccggccccatcttttatacgtgcccttgacatggttcaccatgtaccattggctggtcagggacattgttgggccattagcacaggaatactgagatatatctagtgtttgtagttttggggtgaactcagagaagttgaaggtaacgacttggcttgcgaatatcagctgatctgcactcgggaaatatcagagagcttgtgcagaaaaggtaacagttatgggcttatggcagatgcagtagcatgagatgtcttcataattgttgtgtacatcaggttcagtggtcttgggggcctccttcttctgaaggtcttaaaaacacggttaaccatttattttcagtatgttattaagtattacaggagcttcgttactagaaaaacttcgacatagatcaatgaaagcacgacgaagcaagctttgttacgttgtcacagtaagtcgatgtagggagaatgtgttgttcaagctgctgagtgcaaatgataatattgtccctgtgacatttgtaaatcttgtatgtaatctttgagggtatgaatgtaatatcgtacgaattgtacgattgcttataaatagatgaacaatactgttcacactgaattgagattgcattcacgctttcgctttcaagcaagccgaatatacaaatgtaatgtacatcatgtatctctttgttaatatatgagatgtatcttgatgttgtttgacatttgatatgaaataaataatcagcat

SEQ ID NO: 19344 - DNA, 1886 bp, Zea Mays
atcattgctttggagcctaagcaagtgaaagttaatccggtgatcacgccaccgtctttcccagtatcaaaaggtgtcagaagtaaaggttccagtcaccgggacaccaagagttccgggtggtatcaacatcaggatgatgacaacttcaatttctataagccgcaagcacagaagaaggattttgctgacaatatgtcaccgtcttctaccgccagttatggtagaacagacagtgagcatgggtcaaacaggagcgttcagttaaaatcagtgcctgccagcaggtctagattttcaaatgacccaaaggatatattatgtcaaggagatacaggcggtcaagtggaagcttcaggacagtgtacagtcagtccacaaggtccaattttagtggacaaacaaatggatccgttctccagtcaatggaaagagaaagactatagtggtggaaaccaaatcataagaaaagaatgtgacataaataccaaatcagattatgaagccaacgctagaggtgaaagtctcggtaggaaatgcatacagaagagtaaagaaggtcgtaagggtgggtttgaagatgaattcagtaatggaagaacacatggacaaaaaggtagacacggtaacactgacagtcctgaagatggaatcgttggaaacaaatacaaacataaggccgatgatgttgttataagcagccttgaagataaagatatgagcattaagtatgaacataatggtagctttagatttgaggaacttagtaagagagatgaaaaatgcaacaaaaaggatgacaacaatattcttgaacttgagagcatagctaggggatgtgaacaggacagaatcaaagatgactgcggaaaactgctgcactcagatagtagaaatggcaacacggtggccaagaattattcatcagttaatgaacacacaaattcaagttctcttgtttcctctgtggccgaggtagatgatatacagtcttcagttggcaagaatggggattcatccttttttactggtttcctcaagaaaggtttaaaggacctttctttattcaaccagtctgtagacagtgctaaggtttatatcaacggtcatccaatctctgaacgagctctccggaaatcagagaagaaagttggtcctgttggccctggttcatattggtacgactaccgtgctggattttggggtgtcttcggacaagagtgtagaggcatcataccaccattcataaaagaattcaactatccaatgcccaagaactgcgctggtggtagcactggggttttcgtaaatgggagagagctccaccagaaagattttgatttgcttgtagggagagggctccctcgaatacctggaaagtcatattctgttgagatatcaggaagcgtgatcgacgatacgactggcacgaagctacgtggtcttggaaagcttgcacccacttttacacacctagaaagctgccaattaatgggagtccaggtttgttgatctgttaggattggtgacagcggtagaaaggctttcacgtcttgaagctcgacagcgatgcagcctccggacattgagagaagaaatggagagatgtcataactcatacgcattcgcatcatcctacttggaattaaatgtcgtgtttccatggtgacagctccggccggcggcatacagttcctgtctccctctcgtttgtaaaattcgccacaccgtaggtgctaggtagcattcggagcatgtatccgtttcgggtttgtgatacagtggcgcaactcttcggctatataaatgtacctagtactttgtaacatgttgtccagtatgcaacgacgcatcagatttgtatacctctcgaattcgagccagag

SEQ ID NO: 19345 - DNA, 2332 bp, Zea Mays
aattaaaaaccgcagaaaaggaatcaatccgaccatccataaaaaggacggcgacgcggtcaccactgcggcaccgccgccgccgccatcctcgacccctgaagtgaagaggcaacccgaggacgcctctcccatccacgcgcgaatcctaccgccctcccactcccaaaaacctagccgcgcgcgccacctgcatcccatggcggcaaccgcggccgtggcggggaccgggtcgtccctctcctcgcgccgcagtcgcagcgttgtctcctcgtccttccgcgcagctgcctcgcgcttccgctcgccgagatgcgtgctcgggagcgagcagctgcgggtggcgcatgaagggaagcggatgagcggcgccgagtccaggaccgcgtgggcgccaaaggtgcccgcaccggagtccaggcttgccgcactgccaagggagctgcgggactccaggatgaagatcttctccggcacggctaaccgtccgctcgctcaggaaattgctgcttacctgggtatagaactcggcaagatcctgatcaagcgctttgctgatggagaaatttatgtgcaactgcaagagagcgtgagaggatgtgatgtgttcttgatccagcccacatgctctcctgtcaacgaaaacctcatggagctcttcatcatgattgatgcatgccggcgggcttcagcacggtctattaccgttgttattccatactttggttatgccagagcagacagaaaggctcaagggcgtgaacccattactgccaaacttgctgcaaatttacttactgaagctggtagtgaccgtgtcattgtatgtgatattcattctacgcaagcgttggggtacttcgatattcctgtggatcatatatatggacagcctgtgattctggattacctggccagcaagacgatatctgaagatcttgtggttgtttctcctgatgtgggtggcgttgttagagcacgtgcattcgctaagaaattattgaatgcccgtttagctattgttgataaaagaagacagggtcacaacatgtcagaggtcatgaatttaattggcgacgtgaaaggaaaagtggctatcctgattgatgacatgattgatacagcagggacaatcactagcgcagcggctttgttaaagcaggagggagcagaagctgtatatgcttgttgtacacatgctgttttcaggttttctagttggctttatcgaatgtacttctggttttggtattttttatggtcacatcctatatgatgtggcttcatctctgagcactttctaatatttcgctgcaagaacattcacaacactgtacaaaaaagtacaccaggggtaatagtatctgttaacacctgtaggccatattaactttgctaatcttgggggcacccatattatcatcagcatcaatcctaacgatatgattgcttgaatcttatgcaatatgttttctacctcgtggtatcttattgtaggaaggtgcctgagaaatcttttcggcgtagtcacttgtctaaatttgactgctttcaataaatttgcctgtttgatgctcagtatgctactttatttcagaaagtagcaggacgctttatttgccctcccgcgattgaaaggctttctggaggcgtctttgaggaagttattgtgacaaactccatcctgctgccggaagacaaatgcttccctcagctgactgtgctttcgatggcgaaccttgtgggggagacaatttggcatgttcatcgcgatggctccgtcagcagcatcttccaatagcagaaacgagcgcgtagcatcgtcacctcgtcttgcgttcgtgtgcttggtatagagaaggcacccagtgcctgtgctgcttgcgtattttcgtagggagtcaattttggcggcaaggtataataaggttgtattgcccgatgtacggggtgataaataaggtggttattgccagtgtacgtgggataataaggttgtatgctggtgtaggtgttctgcaggctgcagcgtgttactaattaagtgcatctcttgtcctattatgtattgctgaggtagttgttgtcgagttgaagtttcagtgtctcagatacatggggatagtgatgtacccagcactcggtcactagtgaagtcctggtcattggaaatatgggagcaccaatttctgttttaaggtcggcattgtagctcaagctgttaatactcaaaattgcctgattgtctatgagcaccctgcaatatttactggtgtgatgctgcatatttgctcatatgagtgtcgtccaagattgaatatgcaaacagcgc

SEQ ID NO: 19346 - DNA, 3163 bp, Zea Mays
cccgcctctgctctcctttctcccgtccccgcacaaaaacatttgccccccacccggccacccctcccgagtcccgactgctactgccgctgcctcctctccctttccgcctgccttcgctctcctcgtcgtctcctccgtctagggttctccaccccacccgccccgccgccgcccgatccgaggcagatgccgcccgcagccatggcgctgccgtcccaggccccgtctaactcaggggatccgctgtacccggagctctggcgcgcctgcgccggcccgctcgtcaccgtcccccgcgtcggcgacctcgtcttctacttcccccagggacacatcgagcaggtggaggcgtccatgaaccaggttgccgggaacccgatgcgtctctacgatctgccttccaagctgctctgccgcgtgctcaacgtcgagctgaaggcggagaccgacaccgacgaggtgtacgcgcagatcatgctcatgccggagcccgagcaaaacgatgtggctgccgagaagacgagctctgggtctgctgcgccaccgaggccagcggtcaggtcattctgcaagacgctcaccgcctccgacaccagcacacacggcggcttctctgtcctgcgccgccacgctgacgagtgcctccctgccctggatatgtcccagtcgcctcccactcaggagctggtggcgaaggatctgcatggcatggagtggcgattccgccacatcttccgcgggcaacccaggaggcatctccttcagagtggttggagtgtttttgtcagttccaaaaggcttgttgctggagacgccttcattttcctcagaggagaaaacggtgaacttcgagttggtgttaggcgcgctatgaggcagttgtctaatgtaccttcttcggttatatctagccaaagcatgcatctcggggttcttgcgactgcatggcacgctattaacacaaagtccatgttcactgtctactacaaacctaggacgagcccttcagagttcatcattccatatgatcaatatatggagtcagtaaaaaacaattattctattgggatgagattcaggatgaggtttgaaggggaagaggcccccgagcagaggtttactggtacaatagttggctgtgaaaatcttgacccactatggcctgattccagttggagatacttgaaggtgcgctgggatgagccttctactatcccgcggccagataaggtctctccctggaagatagagcctgcttcatcacctcctgttaatcctctccctctttctagaggaaaaagacctagacaaaatgcacctccaccttcccctgaatcatctgttctcacaaaagaaggtgcaaccaagattgatactgattctgctcaaacaccacatcaaaattcggtcttgcaaagtcaagagcagatgagctttaggaacaacctgactgaaagcaccgactctgattccactgttcagaagcagatgatgtggtccccatcacccaatgggaaagttcacactaattttcagccgagacctgctatggataactggatgccattgggaaggcgtgaaactgacttcaaggacacccgttctgccttcaaggatgcccgcaccgcttctcaatcgtttggagatacacaggggttctttatgcaagcttatgatgacagtcgtcaccgtctttctttcaacaatcagtttcaagatcagggttcagctcatcgctttgcagatccatacttctatatgcctcaacaaccttctctgacggttgaatcaggcacaaggacgcaaacagcgaacaatgacttgcgtttttggagtgagcggaattcgatgtatggtaatccaagtgaccaacagcagggtttcagctttgggcaaaacacatcaagttggttgaaccagccacttccccaggttgaacagtcacgagtggtcaggccgcatgcaacggttgctccatttgatttagagaagactagagaaggcagtgggttcaaaatatttggtttccaagttgatacaaccaatccatcacctgtccaattgagctctccattgtctgctatccgagagcatgtggtacaaactcgaccatcggcaccagtgaatgaattgcaacctgtgcaaattgagtgcttgcctgaggtgtccgtaagcacagctggaactgcagctgagaacattcagcaagtccagcaaagttcgaaagatattcaaagcaagtcccagggcgcttcaacaaggagctgtacaaaggttcataagcaaggagttgcgcttggccggtccgtggacctctctaaattcaccgactacggtgagctcaaagcggaactagacaagatgtttgagttcgagggcgaattggtatctgctaaccggaactggcagatcgtttataccgacaacgagggtgatatgatgcttgtcggagatgacccgtgggaggagttctgcaacatagtgcgcaagatctacatctacacgaaggaggaggtccagaagatgaactcgaaatcatccgtgccgaggaaggaggaacccccagcagcaggcgaaggctgcgccgccgccgccgcaaacgagtaggatgtctgcctgcactgcagcaagcagttttagatgactaggaggtggtgccagcccgggtcccagggaagtaaaaactcctgagatcttttgcttgtccgttgcagccccatcccccgtccgtttgggttttagttgggaacgtagaaactactgtctccgcctgcttctccgaagctcgctgttggtagcaagttttattgctagtattattgttattgctgatttgctcccctctgcctttgcgatgtaaatatttgtgtacccagccccagccccagccccagccccagcttgtagtgagcagtaacaagcagtagcggtaccttcggtattaaccggcagctagctatttcgcggcattttaatccctgtaagcgtagctctgtggcgtgagatagatgacaaacactgggtatatgtatgtctgatctttctcactgaatgtaccataagagagtttgtagagtacctgacctgtgaccaaccccgttcctgtcagctctctggtctcagcaacacgctgtgtgatgccgcatatggtcaatgcaag

SEQ ID NO: 19347 - DNA, 89 bp, Zea Mays
attacctcgtgtggaaattccttggcaggtaaacatccttgatagggccgaattgctcaaatgtagctcgaatatcttctggcctgcag

SEQ ID NO: 19348 - DNA, 1445 bp, Zea Mays
aacgggagcgaagacggccctccccgcaatcccatcgcatctgctccaccaccggcacatcgccgccgaccttattcctccgccgctcgaggagtcagccgagccaacggagggagaccatatgggcgcggaggcagcgcatccgcagcaacagcctccctcctccgtccgaccctgcagggaggcggcggcgcccgcggtgctggggctgcagctctcggcgctgatcgaccacgtcgcgcgcgtcgactggtccctcctcgaccgcgtccctggcgaccgcggcggctcgcagcagccggtggaagtgttgccaacacaatccgtgggctctcagctggttttggaatatcaactggaataattggagcttgtggggatgacaaccagggacttttgtttgtcaacaatatgagctttagtggtgtagatctcacaaggttaagggccaaaaaagggcacaccgctcagtgtgtgtgcttggttgatgcaagcggcaaccgcaccatgcgtccgtgcctatctagcgcagtcaagatacaggccaatgaatttagaaaggaggatttcaaaggctccaagtggcttattgtgagatatgcacaacagaacatggaacagattattgaagctattaggattgctaaacaggaaggcctttcagtatcattagatttggccagttttgagatggtccgtgactctaggtctaagcttattaaccttttggagaccggtaacattgacctttgcttcgccaatgaggatgaagctagagaggttatagggggaggtctggaatcagatccagaggaggcgcttgcgttcttgggcaagtattgcaaatgggctgtggtcacacttgcttcaaagggatgcatggcaaagcatggcaaacaggtcgttcaagtgccggccatcggggagagcaacgcggtggacacaactggagcgggcgacctgttcgcgagcgggttcctgtacgggctggtgaaggggttgccgctggaggagtgctgcatggttggggcgtgcagcggcgggtcggtgacgcgggcgctcggcggagaggtgcggccggagaactggcagtggatgtacaagcagatgcacgccaggggcatgctgctccctgagctcaagaactgaactaatcatgctgcagctggtgttagctgcatgctgcaccagctgttgtatctctcagcactcctacctttcccctgctagaatattgaaccactcctgagattgaaccaatcagatggagtgtattgataattgcacttcatatgtgtgctagtgtactattcccttggtctaaaatatcatgtcattttatcttttcaagactagactagacacacaattattattattattatgtaaattgatacaaaccatatgtagatatatagacgaatttgtttttggaaaaacgaaaa

SEQ ID NO: 19349 - DNA, 2774 bp, Zea Mays
gccgcaagcacaacaccgaaccgctaaacccactcacgcactcgcgcccgcatcactcaccgaccagcgacggcggcgggtttctccgtccgccgccctgcccggtcacccatgtggaagcgcctcctggagaccaccaagcaggtcgtctcctccaagcaggccatcccctacgcagccgtcacccccaagcccgcgacccccgccgccgccccgtcggcatccaagcgcggcgcccctgttgctgcgccgaagctatccaccctgaagagtccctcctacaggcgacgcgccgccgccggcccagccaccaccgtcacgcaggcatccctcctgcggctcaagcaggccgcggcctcgaagaagaccaacttgccgtcctcccccccactgaatgacgcccacgccctagatgaggatgacccgccagaggctctcaccaaggcgctcatgttcgtcatagatgcacctgaagaggtggaatgtacgacttccccggaagcgctaccggagggctccgaagatgttggggaggttgccaggggcaataagatattggactttgagtggttccaggccgaaccatcgagggacccgctgatgctttggaggagggaggtggccagggagaagaagaaacactacatattcaagaatgtggagagccaccactacacaaatttgatgcgtatttgcgctaataagcttgggatggaatcgacaatagaatttcttggaaacttggggcgggaaacaggggtcaaggagttcaattcgatgattaaggtttgcctaggcaaggcaaaggcttgcagggatattgactctgctgtggagtatatttatcgggcgtatcaccttttcaataccatgaaagataaggggttcacgattgagaaagatatctatgacccattcctcttgtatcttatggacacggggatgtttgaggaatttgaggtgttcagtgcattctttaaggaggcgaatccgaagtccttctctagaatagcttattatgagatgttgctttgtattagagttcaagatgaagaaaaaatccaggaactttgtcactctgttgaagactacgatgagaaagttcactatgacctagcagagagttacatgctggcctttgctgaaagcggcagaaaggaagatctggttgccttgttggatttggttgatctatccaaagtttcaggttcaaagtacataactaatattttcaaatcattgggcaagctagaactagagaattatgtggagaaacttcttgagaggatgatgtcaaaaggatgtgctgatcacgacatttcatccttgattttggagtataccgcaaatataccgaatataatggttgaagacatgctagtggcatttcataaatggcatgagaagtttgaggtagcaccctctattgatgcatatgacaagatcgtctctatctgttgcgattcatcaaagaaaaactacaatggagcacaaatggtcatgtctcaaatgcagattgctggagtaaaaccagattctgagacattcagttatttgatagcgaattgtgagtctgaagagaacatttctaagtactgtgaccaattacggcaagatttaattccaatgaccagaaatatatatgttgcactcattgttgcatacgcaagacttggtaattttgatatggccaagcaggttctactcgataaagaaataccatgtaagttcctcagtgacatcaagagcgcacttgtaggagcgctggcattaaatgggcaagtgtcggatgcacttcgcttgcatgatgagataatgcaatccggcggctccctggaaccaaaagctgccattgccttgattgagcatattcgaacagaaggtgaactggatagaatgcatcaacttctcgatgggctgaatgactcaaacagctggtttgatggctgtggcagagtacttttatactgtgtccagcacaactatcctgatgctgcaattgatctacttaagcagatcagggagaaagatgaaatgagtacatatatggttgttgatcaggttttttgccaaatatgggacatggagaccacaaatttggattttggaatggtgtttcttgatgctgtcaaagagcttggacttaatgtttctcggacaagccttgactttcttctcagcgcatgtgtaaaagcaaaggatttgcgacgtgcccaacagatctggacagaatacgaatctgctggtcttccacacaacgtgctgagttccttgaggatgtatcaagcttttctttcatctgggggacgtaaggcggctaagaagttgttgaaaaagatacaaaaggaagatgctcacgtgcgctacataacatatgcttgtcgtgcgacatactgcagtaaagacttcaagccttctgctacagttaggttaagttccaaaggaagagctagatcaaaacctactaatgaggggtaagaggtctatttacttttaccacttccgttgcagtgaaatactgaaacgggatgaaatcaattcttttgttctgggaaattcgctcgtacttgttaactcctatcgctttggatcttagagactagggtgatcattgctaacatcggattatatcttaagcaattggtggagccatggagattttctgattttattttttgtgtgcatatcatggtcaatatgaagccttcacctataggcttaaaggacaagggaattctaaattgtagccgaacagataaagaccctgcccttcg

SEQ ID NO: 19350 - DNA, 1599 bp, Zea Mays
cgcgttgtgctgcgtaggacacgtatggcgagctagcctacagataagcctggggaatggtttcatatgcatccggctcgcgcaggtttctggcatcgagcagtctgcgagatctcgattcgtctggaagacatcgctactaccccagccacagtacccattgggtatttatctgctcccttgctgaagctggaatgtgcagctcgatcggttagcgctacgagtcctcgctgaatccagccaaatgatccccttgagcttgccagttagagcacggtgagtcagcaaagattaaaatagcctccgcacctaatataatgctggccttccgtcagaagtaacagctagctaagagaagcacaagaaaaatctggtagcttgagttctgactcgaactcagagatggcttatgcaagccccgggactgatgatacgtcgacagatctagatactgacgagaagaatcacatgttggagctagggcagcttgtgtcccttacagcttctgattccggcaacaaagcaaaggacaagctactaggtcaaaaggcactgcgccgtctggcccagaaccgtgaagctgctaggaaaagccgtctaagaaagaaggcatacgttgagcaacttgagaatagcaggctgaaacttagccagctggagcaggaactccagcgtgctcgccaacagggcatcttcattcctactccgggagacgaccagcagccaaactctactagtgaaaaagcaggtgctttggcgtttgacaaggactacgctggatgggaagacgagcacaggaagcagataagcgagctgagggccgcgctcagcgcacacgccggtgacgacgagctccggcgcatcgtggacggcgtcatggcgcatcaccacgaagcgttcaggctcaagtgcgtggcagccagggccgacgccttccacgtgctgtcggggatgtggaagacccccgtggagaggtgctttatgtggctgggcggatttcgaccgtcagagattctaaagttcctcgcaagccatctggaccccctcaccgagcggcagctcgcgagcgtacacggcctgcagcagtcctcgcagcaagccgaagagggcatctcgcagcgggtgcaagcgctgcagcagtcggtcgcggagaccctcgcgtcgtcagggtccccgtgcctgcctgtgcctgcaggtcgtgctcctccgcctggcgacgacgccgctccagactgctcggggacgatggcggcggcggttgcgaagcttgtcgctcttgaaagcttggtgcatgaggctgacggtctgcggaggcagactcttgagcagatgcagcgcgtgctgaccacccgccagtccgcgcgggcgctgcttgtgatcagtgactacctttcccggctacgcgctctgagttctctctggatcgcacgaccacgggaatgaattcagctcggcttatgtatctttgtttgacccggccgtggagaaaaataagaatcgaagatgcctccgctccttccatcatcactgcatgtaattgtaatctgaacatcattataaacagccgtaaccgttggccatcatcagggttaaagacgc

SEQ ID NO: 19351 - DNA, 1782 bp, Zea Mays
caggaagcaggggctaacctccgagcggcgaggatgaggggcggcggcaggatgattgacgatgaagagcgggtgggccacgcggagatcccgaccagcttcggccccgagctgcgcgcctgcctccgatgccgcctcgtcaagacctacgactaggaacccttctccgctggcgccgctcccctcccccctcctcacgcctaggcctgcggtctaggttcaccagccttccgttgaagggacggttcgaggactgggggtttcgtttctcctggtgcggtccgttctcggcggcggctaagaattatctctttgatggaccccagtaggagttgggcagctcgttggttgagaattggtaggttcattccgggttgctacacacttgctgtttcggaggaacttcaagaagagtatcaggggatttgccaagacaacaacgtgtagtatgtgccacccaagcgatgtctagagctcctgaagcagtatgaataatttagcttatataaaatggtgcatgtgcttgttgccaagcgaactgccctgctttgttgtatctgagtgctaatcaggacccctaattaaccctttcgtgctacgaatgggttttttagccaagatggcataaaacattagcacaaatgtcagacacatgaccaagacaagttcataggccagcaattctgttcaacaaacacctcgtcttcgtcgtacacggatgtggataccaatttgcagattgcgagccacgagcccatctaccagtagcctctccagtgtccatactgagaaatttatcgcaccagcaccactgtcacaatacaatggtacaggtactgcaccgtgcacgtgcccacaagctttcgacatctgcgtgtcagcatcggttatcatcaatcaccaagaatgactggaccgtggcgcgctggtcctctgcgctggtcctccgggaggtcagatgatacgggcgtaacttatctaagaacaatcaaataaataatttaattcggctgagcacaaagtaacatttgacccgattaataatccaacagtcaatgtttaccagtactttaaagagaagaacacagcactaccaaatgctgaagtaattcacacaaacagatcaaaagctagtcttacaaaaccatcggtagttacacagcttgatcggtcgacggactccacaaatgacacggtacgaagtctttgcggcaaatcatcagcattcagatccaggtcaatcgaccagtcagcgattctgttgctagaacctctcccacgccttctattgctgaagaagggtaacgagcaccaaaaaatacaaatactcgcatgcggcatgcaatcatacctttcctactctagatgcattagtgcagtatttcatgcaaaacatgaaccattaacttgcaagcctacgtgggtatgttcaaagaacagttggggtagccagataaggatacccttttatgaccataagcatgtcaataaacttgaattgcgtcacaagtgtgtatacagctttaatactcacctgcttaagacatgcgcttatgcattctcgataagacatgtttggcaaaccgcagaaatgaattgacagcacatccagtgcatgcaacgattaattgtgcacatgcagaccttatgatccaaaaacccaaaacaggactatgatagatcagtgcagacacatctaaatccaaatactataatgggggttaacacctatagcatgtagatgcatggggcgatgcataaatcattggaatcttacttgtc

SEQ ID NO: 19352 - DNA, 688 bp, Zea Mays
atctgatctgatctgttctgttctgtcatgcacgcgcatgcacaatgcactagctacggcctacagcgctggcgctgggaccgggacggcgggtaccaccaccggcaccacgaccgcgggcggtgcgacgacgggcaccctgagccctggcgtgggcatcggcggcctcaacggcacggggatgggcggcagcaccggcctgggaccggcggacaacaccctggacgccgccgcgcccggcctgctccccggcgccgcatccctcgccgccgccgccgccgccctctccttgctcgccctgctgcagcattgattacgtgggctagctgcttgctctgtggtccgtgaaaaagaaagggggcacgggggattgtactggagaatgtgaattggttcggttggttggaggacggatccgatttcacttcacccatctttgttagtagtggcaggcggtggttgggggcggtgtattctttctttcttttccttatgcctttttgatgtatggtttatttagcggtaggatgccagtctctttcctacaaggaccattgtctctcctctctctctctttctttttaaattttgtttatttataaaagttgtacttgctatcctcttttcttaacctctctgtttttattagaccagtttcaataaaaattcttaagaagtattgttttta

SEQ ID NO: 19353 - DNA, 5195 bp, Zea Mays
cagtctgtacccgcttgagctcgggccaagagcgccgatacacgatacggcagccgagcacactcttccccttcctgacctccacttcctagctcggccccggctccgcatctatctatctctcgccctgccgtctccggagaccggagctgctctcacatccccacgcgcgcgccctcgaccccgaccacgtcccccgcccgctcggcgctcgcacagtccttccagattccctcgtccggggagcggcgctgaggtctcgcaccgatgagctcgggggccatcggggcctcggatcctgggggtggcgagacgaagccggtggcgggcggtgacgtcacgacgtcggaagctgcgggcgaggtgcctgctttcgccgccgatgtgaaagtggaggggaaagctacgttggcgacggatgtggatcgtgaagggggagatacggcggtgagcgacccgctctacgcgaacgagtcagctggtatggttggtgccgaaggccacggagatgagcccgcggagggcctggaggcggtgaatggtgaggaggagatgctagaagcaggagctcgtgatctgctcactgagacggagaagaatccggttcttgtggtacatgtgcctgctgctgctgctggtggtggttctgccattcctgaacatgctgaagccgaatctaacaaagttgaagatcatgtaaacgtggagcctgggacaaagaataatgaaagtgataatggcatagctcattttgataaggaaatacagaacaatgtgcctgatgacatagaggaaagctccaaggaacatgaaggtgatggagcacctgtagttgaccagacaaataatgcatctgaaatgctcccacaaaccggagagcagtttcctgatgttgaaaatagcacggacagcaacctagaggctgctagtctgggtagtgtggatcagggtgctagatactgcctgcctcctcatgataaaggcgggtttcaagttgctgatcttgtctggggtaaagtgaaaagtcatccttggtggcctggtgaaatttttgatccatcagatgcatctgaattggctctgaaacatcagaaaaagggcagccacttggtagcttattttggtgacaacacttttgcgtggtgcgatgaatcccagttgaagccttttgtgacaaattattcacaaatggagaaacagagcagttcagatgcctttgttgggtcagttaataatgcacttgaagaactgtcaaggcggatactgtcaggtatgagctgctcttgtttgccagaagagcttgctgataatggcatgtcctatacagttgataatgctgggctcaaggatggagttacttgctctgcagttaatcggcctgaaatcttaaactgtttcagtccagaaaaccttcttcattatattaaggagttagctctatttcctggccaaggaggtgatctgttggagttagttatagcatgttctcaacttacttctttctatcgatctaagggatgtcctgaacttgcatcatttcaaactggcgatgcgtgggttgaggatggtctggattgtacagacactttgtccacccagaatgtaatggttgaggaacctgtgattaatgaagtgcatcctactcaagataagcccaaaaggggcagggggagacctcggaaacaaaaacctggtggtgaccaggtggtgatggagaaaaggagcatatctaatcaggtcaatgatactagctacaatgagaaacaagtgggtatggactttgataactatggcaacctacagaacaagaacaaaagaaactttgaatcatttgaagattcagagaagtcatcagctccaactggtggtagttctttcaagattggtgagtgtattcggcgagctgcaagccagctgacaggatctccgtccattatgaaggctcagaatgctgctgaaggagagaatggggaatttgatatctttagtgatgatgctggtgatgaacttactgtagagaaacgagcaaaaaggagaagtctgcacaggaatcacactgcagatcccaaggaattactatcacagctatgcttggttgcaacagagccaatgaatggatataatttctcagtaatgataatcagttacttcagtgattacagaaactatattgtttctactactactgaagcaaacatcgttgataaaggtacatctaggagagggaggaagagaaaagaagttttaccttctcctgatgtagagacaacagatcatatgcaggactcgtattggtccggattgagcttgcataatcacccaatccatgacctcagaaaagagagtcccactacaaggccaagacgtaggcggagatcctcaagtcatgcatatgtacctttgtcagaacttggggagccagtacctaaaaaacagatacaagtgatggaaagatctatcatccatgttgacgagaagatgattgatgagttgaagcccactgcacttgttttgagctttgccaggtcagcttctattccttcagaattggatcttgttaagatgttcagtcgctttggtccactgaaagaaagggaggcagaagtacacagggaaacaaatactgttaaagttgtcttcaagaaacgtgccgatgctgaaagggcttttagcgctgctggcaagtatggcacttttggaccttcgcttcgaagttaccgtcttgtcagtatgccattttctctagagacacagtcagcaaacaatcctgtgaaacatcctgaaaatcatggcatggagattccaggttcaaatcagtccgaagctcctaaggattccatggaagttgacctggtacagaaaacagatgaagtagaagttgcaggagaaccgtcgtctgaagaagttgagactgtgaggcaaatatctcaagtgcaagctgcagacagtacatttgtcagtcaagacaggtttgatgaagctggaaatattgacgctgagctaattgaccatgttaatcaaattgggaaagctgcacaagctgcatctgtatctgaagagtcacgagatgttgagcaagtttacactcaaaaggaagtgtcagccaatgatctacccacagagacagaaatcttaaattctgatgctataacaaaagagttgcctcagaatgctccagataatgtggaaactgatatagtcgaagatccaaaacagaataatgccgtatttgaagcagtcactgaagcaccaagtactgcacaagatcatactgaggatgatactggtaataaagttccagaagagcacatggtatctcttgagttacaaagtcaaacccctggtgatccacccacagagacagaaaccttacattctgatgctatagtaaaagagttgcctcataatgctccagataatatgcaaactgatatagcggaagatccaaaacagagtcacaatccaggagatgctgtatttgaagcagtcactgaagcaccaagtactgcacaagatcatactgaggatgatactgggaatgaagttccagaagagcacatggtatctcctgagttacaaagtcaaacccctggtgatctacccacagagacagaaaccttacattctgatgctataatgaaagagttgcctcagattgctccagataatatgcaagttgatatagctgaacatccaaatcagagtcacaattcaggagataatgccgtatttgaagcagtcgctgaagcaccaagtactgcacacgatcatactgaggatgatactgggaatgaagttccagaagaggacatggtatcttctgagttacaaggtcaaacccctggtgagaaactagtggggcaatctgcaactgaacagatggtgggatctgaagatccaaagccgcaagccgaaaattttgttgctgaacctgttgtgctgggtgcagtcgggcaagtagaaattgaactggaatccaaaactactgttgaagtgtcaggcgaacaaggctatagtattgagcagactgttcaagtggaagctctaattgaagcgtcaggtggacaacttgaggtgggaaggcaaattccagaagatgaatctattgcttgtgcaactactgagcactctatggttgtcgatgaaactgtggaggcaaaagtggtactactcgatgagagtatagagaataatgctgctgtcataggagtagtcgaggagactgctgaaggtgaaactaaggaggaagcatcagacgagaagggaaaaatagaaaataatgaagatgctgacaaattagcaccagccgggaaggggaaaatagaaaataatgaaattataattgacgcaccagatgagaaaacagaaaataaagcagatgctgacacaccagctggggagaccaaagaaggtgaaattacagtagaggaaacagatgagaaaatagaatctaaagttactgctgaacctgtaatcggggagacaactgaaggtcaaactgcagctggagaaccagttgaagaagctagaacagctgaggacatggtagaagatgttaaggtgctagatgataaatctacagcagctgagaaacctgtagagaatgccacagttgtggcacatgagaattcgactacagttgagaatactctgaaggatgcgattgtcgcgccaccagatgcaaataccaccaacgccgaaaaaactgctattggtgccacaattgaaacacaaaatgaggacgctccagcggagaggactatagaggatacctcggttgaggcaccagatgtacaagcaggtgcaagtgagtaaaccagcttagcgatcctttgcattcctgtcagtttctgttgatatcgacgtagtttgctcaactgattctcttgtctagatgatgtgttctgtatagaaaacctggaaccactttagcatcataaggctgttaggttttaaataacttgggcatctatattttgccccttatttttcctatataaacttcatctagttgtattcgatgcgcacgtgtgagtttgtcataaacacaattttctcctatatgtcagttcagtgctcaggcgatcagtgactgagtggaagtctttgggctatctacttggatcaaatgattctggtaccatttgtcgtctgtaaccaactgtgttctcgaatccttctaccatattacctag

SEQ ID NO: 19354 - DNA, 737 bp, Zea Mays
ctgttcctgttgtggtcagctcccagttgctcgtggtgataacactggggaatcaattcctatgctcctaaggataccccgcttctttgatccatggggtggttatgatatgataggctttggtgacattatcttccctggattgcttgttggattcagctatagatttgacagagcaaacagaaagggtgtcttgagtggatattttctctggctaattgtgggatatgcagttggccttttcattacgtatcttgcgctgttcttgatggacgggcatggtcaacctgcgttgttgtaccttgtgccatgtacattgggggttattgttattcttggttggttaagaggtgagctttatgaattatggaacttcggaaaaagtccaggagaaaattttgtcaatgaaccatgacaacaaaatccagggaagatgtattcttcagcgtagtagatagcttgaggatgtttattaggaggcaccgtgtattgcaagatgttatgtttagcattatttcaaagaaggatgctattgtgtttgaaaaaaatgatatacatgtaagatgcaagcatgtactcccacagtcgtaaaataatccaatataagtgccgctatatagttccaaaataagtgtcactagggttggaaacgagttgagcctgacttggctcggtcaatttggatatgtttggttgcctggtctagtgcacgaccaggcccatttgaaaaggtcgac

SEQ ID NO: 19355 - DNA, 781 bp, Zea Mays
caaggaaaggctgcgtacccaaatgggtccgatccttcctggaccctgcgcaagctatgtgcaaagtgagtgaaggagagaatgctttttcaaaaataggggaagcactagatcacttgaatagccgcggtactggctctggttcaagtatacttggcataagacggatacctcccgattcaggacagtcaaatgcatcttatcatgacgactgcacagcggcccctgcagcaaacagcagttcaaggttgccgaacggctgtgattcggaagctcaatttcccaaagagttgatatcatcctgcgttgctatgatgcttatgataaagaactgcacggagaagcagtatcaccctgctgaagtcgcgcacatcctcgattcggcactgtcaagcgtacaaccgtgcagctcccagaacatcccgatcttcagagagatcgaaatgtgcatgggcatcatcaagaaccaaatgctggcgttgatacccactccaagtggctaagcttcaatcctgccgcgggtatttaactaatgtactctgaaaacgaaaaaacggatacctgtatgtgatgtgcaatattcctttttttgctgttgtctgtatgtacaaggcgtgtgttattattcattgcctgttattattatattcaactggggtaaaaaaaaatatcatgtactctgtctccctttctccctctttctcaaggatgcatttcactccatctttttatgtctaactaataactaattggtaattgctttctttgtgtaatttcattg

SEQ ID NO: 19356 - DNA, 2480 bp, Zea Mays
aaaggagataaaaagtccccaaaccgaggcgggagaaaaggcgcgaggagcgaaacaaaccaaaaaaggccgctcacaggtcacgacatgctggccagtgggcccaccacgcactctgactgcccggcggaaaacctttctcgtcctcttctgtcgtctcacctctctctctctctctctctctcacacacacacacacacacagtctcccctcaccagcaaaaggacaagcagaccctcctccggtcctcccactcttccctgtccctctgccagctcaaccctctaccatggactaggaggccctagccttcgccgcgtgcatgtctgctcgggtgcagggacataggcatggaaccgcccgcccccgcagcgccacgaggggccgagcgcgccgaggctgtcgctgcggagccggcttccggggccggggccagagtcgaggtgcaacagacggggcccgagggctccgtgaaggcgagccgcggggggcgggaggtgccgctgcggctgcgcctcgggagggcccgtcggcgggcgggacctgtcacaccgacgccgtcgtggaagatggaggacgacggagtccgggaggggccgtccgcgcttgcgcctgcggccgcttccgccgcggcgaggaggagctcggcctcggcgcgccagctcggcgccagtctctgggagatccacgacgtggcgcgggaggtacgccggagcaggcgacggggtgggagggccatcgccgccggtcgggagcacggcggcggcggagaactggaccagccacagagttcaggtggcattcgtaggcatgttgcagactcgtcgatgaaacatcataagttcgatcaagaaagaagccatagaatacaacctttttctcctgcaagttatacaagctcagttggggattccaatgtgaatctaactagaagtccgactcgttctttgggcatcatgggtagatctatgggggaaggctatagccttaaaacatcaacagaactattgaaggttctaaatcgaatttggagtcttgaagaacagcacactgctaacttgtcagtggttaatggattgaaactggagttacagcaggctcagacacatattcaagaactcctgcaagagagacggcagtacagacacgaagtttcatcactgatgcgacaactctctgaaaacaaacttgttagaaaaaacaaggatcacatgaaggttgacacagctgtgcgttccctgcaaggtgaactagaggatgagaagcgtctgaggaggcattctgaggacctactcaggaagttgggcatggagttgtctgaaataaagtcagcgtttctcaagtcagtcaaggaccttgagaaggagaagaaaggaaatcgcctcttagaagatctttgtgaccagtttgcaatgggcatcaggaattacgaagaggaactcagagtggtaaagcaaagaaatgtcaagaattatgagctcaaatttgataattcggtgctccatatgtcagaactatggcttgatgaacgaatgcaaatgcaaaatacagatgtcaatggggaattggctcataaaaccacaataacagaaaggctcagcggtgaaatacaggcctttcttctttctaaaaaagcaggtagctctatgaataatgaaaaacatatgaatgataatactagattacgacgtcaatcacttgagtctgtccatttgaatggagccaccagtgctccccagtttgctgaagatgatgacgactctattgctagtgatttgaattgctttgaactgaatatgcacgggcatatgggatcccgcagaagtggcacaggagccatgaatgtgcataaaagaagatcagagcatcctcatgttatatctgctgaaggtttatgcatgtccagtgtgccagtttatttacagaaaggcattgcaaggcccagtagcagcaaattgcagcctgccagtaaaataccagaaatcagctcacaaagcaatgccagaatcactccagcagaagagcagaatggaagcacaggcacccaaattattcaagggtccaacaatgggtcaacgatgaacaacccagatgcacatcatgttgattacctggggcaggaatcctttgatcatttctcccgaacaagtctcttttgtgaaggcactacttcgggggatctgggtaatgtcgggagccccacgcggcaactgaaataccaatccacatctttggaccccgagataacggaatgctcacctgaacagccagtaggtgtgatggagaacaccctgaaggcaaaattacttcaagcaaggctagaggggcgacatgcccgattaaaggcatcaggtggctcctcaactagtaggagaaagtgagagtgctgcagattccggggtttgactgtttgaagcccacacgaagaaatcaaaggatgacgaagccgaggctgaagctaaggagtaaaaaggcgaag

SEQ ID NO: 19357 - DNA, 3182 bp, Zea Mays
gaggaggccatcgcatccgccggctggtcctgatcccggtcccgggtcgtatttgggcgccgccgcacgcagcaggaggaagacatcagcgcggggcgaagcgtcgagcccatctccgccgcgggaaccactggcatttaggatggtggacaagaatgatgggtcagagggtattaaattcaacacatcaaacctcattcaaacaaccgaagaggttgcaagagcgtttatcgctgcggcctcggctgccactgcacagtctgcacggacatctgtagtgtattcatccaaagatgagagtggcagcccaatgcagaagcttcagcagcatttttcgaaaatcatgaaagggttttcgtccgcaccagacctgtcaggaacttacaatccggaagtccttacaacgcaaaagcggcagtggtcgaggtaccagatgaagtcattgggtgataggtgcatcagagaaccatcacatctgttcgagagcatagtgattgttgggcttccacctcacgcagatatccaggagctggaaaacattgcattagggagaaatgatgaagatggaaaaagatcaaaaaatttatttggcaatagtcaccaccaagttcacgcaataacaaatttggaaccacaggttctttttgcataccctccagagaagcctcttccactcaagtacaaggataccctctctttctgccttcccggaggtgtacaggttcatgctgtcgaacgtactccttcgttcagtgagctgaatgaaattctcctgggacaggaacagcttaaagaaagcaaccaatcatttgtgttccgcctacaggtggctgataactctgcattatatggatgctgtgtgcttgttgaagagatcgtacagagaccatcaaagttggtatcgatgctcatgaatgaaaaacccgtctttccacgccggagtcgatatgtgataactacgccccggtgttattgcatcctatccaggcttccattctttgaactacattttggggtgttgcagagtattcttatggaagaacgtcttgaatggctcacagatggtgttagcatgctaacttccttatcgcttgaggaatcctgtgagaacgatatctgtgaaggaactgcagttacagcacagaaacattatttagatagcaacacaactgatgtggataaatcatctgaatctagcaatggagtttcgtcaacggagctgtctgatactgacagcagttctgggtgtagagaaaaccagcttgactttgtttctaaagaacaacagcaaaatagttcttgtgaagaacagagtaattttaaaagagaaatagtcacttgttctgatgcttccgaagtgtctgatcattttgttccagaagatacatcatctgatcagtctggagttaagcaccatgaacttcattctgcaccaagtatcccggatgaatctggtgcaaggaactgtgatgattccccgaaggaaaatgtggatgatgaggagcttgatctcttcattatagatactattttaccacttatgcgatctcgcctttgtgaagattgtgaatcatctccaagttcacagggttctccttctgaaggcagaaattttgacacccaagaatcggattcagaggagccatcttccattggtgatggagacttagttaaacacaacaacatactgcagtgggctaaggcaaaaaaatatggttctttgcaagttgtctgtcaatactaccagttacagtgtcctgctaggggttcaacacttgcttttcatcccttggagcatttgcattctttgagttttcaccggcctggtgaaacagttcttcacattgctggttctactattgagcttaggtcacgtgatacaagcttagaggttgctgagatgcgcaatgcactctttgctgaggaggaatcgactgctttgtccacatgggcagtggcatccatttgtggatgcctcaggttggaacatgtaatgacactttttgctgccgcactcctggagaaacagattgttattgtctgttctaatctgggaatgttatcggcttcagttttgtccatcttacctctaatacgaccgtatcagtggcagagtctcctcatgacggttttgcctaatgacatgatggattttctggatgccccagttccatacatagtgggcgtacaaaacaagacatctgatgtgctcaaccggctaacaaatgccgtagtcattgatgccaacaggaatcagattaagtcctcttcagtcccacaactaccacagcacagagagttgctttctgccttgcgcccgtatcattcaatacttgttggcgaaagttatcttgcaagaaaacgccctgtttatgaatgcacagatgcccaggtggaaggggctaaaggtttcttggcagtgcttagagactaccttgacacactatgctcgaacttgagatctcatacaattaccaatgtgcaatctaacaatgacaaggtttccttacttttaaaagagagctttattggttctttcccaagccgggataggccttttatgaagctttttgtggacacccagttgttctcagtacatacagacctagttctctctttttatcagaaggactaagtgtctggcagacttgaatgtctgcctcgtcttgccaagcctttagatgttgagctaaactgtacatatcggcagctcagtgtttgtgcaaagagctcgaaggagaagccatataccgtcagaaaaaagtggtagattgccaggatccagttatgggtattgaagaagaatgcttgtagctgcttaagttagtctggtgcggtaatccaaggttttgttggctgtagttggtgcccccataagaagccttgtatggattgttcctgcaaatgcctgtgctgtaacggaaccgtgtctgtggcaaaatctccgaacatgaatgcgtccatttggcaaatctaagcgtgcaatgggacatcgaagaaaatgtaataattcgtggtactccctccaggccgaatcagttgacgctatggtatttaataacggtcgagctttcttattttaaactggatttgtagaaatattaacaatatttgtattattagaaaagtttattactaaaacagattcagagatttatataacaatactagttatgtgcttt

SEQ ID NO: 19358 - DNA, 2658 bp, Zea Mays
gcacgaattgaagatggcactagcaagtagtgtttcgtctaaacaaggaaaagaaagttaggattttggtgatttatgagcttgttcaagaatacgagtggttgaggaagtaagggcatacgtttttggcttttatgcattttgtttgacgatctcaaaagttcagcgggtagcctatcaagatggccgaggaaactgccaatgacgctcaggtggcacaagataacgagattgctctcagcaatgaggcaatccaaggtgatgagttggtccatgttgaagagctgtcccaaggtgatgatttggttcaaggaaatgagctagttgtttctgaggtgacaactcctactattggaaccagacgcaggagaaagaagtctttggtatgggagcacttcactattgaagccgtcgcaggtggggccactagggcatgctgcaagctctgcaagcaaacctttgcttacagctctggttcaaagattgctgggactagccatctcaagaggcacatcaccttgggctcttgtcctaagataaagaatcaagagcagaggctggcgctgccttcaactggagggactgacaatgatggcgagggaactatagagcggcgaaccaagagacgctacagatacactggttatgcaaatgctgcttttgatcaggaccgcagttgctcatacttggcaaagttgatcattcagcatgactacccacttcacattgttcaacagccgtcatttgccatttttattgaaagtctgcagccacgtttcaagattgtggatgttgaaacgatggaaggagaggtatatgctgtttatcagaaagaaaaggagaacctgcttcaagcattcaacagtatgcctggaaggatcagcctcactataggattgtggacaactagtcagactcttgggtacgtttcacttgcagggcagtttattgactctgagtggaaagtgcaccgaagaatgcttaacttcatgatggtgtcatctcctcattcagagaatgcacttagtgaggcaattagcatgagcctttctgactggaatatgaaggacaggctattcaccatcacattggataatgaatgctcctcacatgatatctacagtgcaaatctgagggaccatctctccaacaagaacaatctcatgcttaagggacagctctttgttgtgaggtgctatgcccatatccttaatgctgttgccctagatgtcattgcttcaattcatggtgttgtatacagcattcgtgaaagcataaagttcataaaagcttcttctgcccgcgaagagaagtttgctgagattgctctgcagctggagattcccagtaccaagaccctctgtctggatgttacaacccagtggaacaccacctatctgatgctgctggctgctttggattataagcagactttcactacactagaaacatgtgatgataactacaatgaagctccatcagcagaggattggaagaaagttgaggctgcctgtaattacctgaaactgctatacgattctgcacatagtatcatggcggcagcaaacccaactgcaaacatctttttccatgaagcctggaaacttcagctagagctggcaaatggcacaggccacgaagatcccactttcagtagcatcgccaaggatatgcatgagaggttcgacaagtactggaaagattgcagcctcgtgttagccattgctgttgtcatggatccacgtttcaagatgaagctcgttgagttcagttactcgaaaatctatggggctggggctgcaaagtatgttaaggtggtcgatgatgctgtacatgagctgtataaggagtatgtggctcagccactcccactgaccccagcctatgttgaccaaggcgaagggaataatggaccagccaatgcgaatagcagtcaaggggctcctgcttccactggtgatgggcttctagacttcgatatgtacctttctgagatccaaagtagccagccctcgaaatctgagctggagcagtacctagatgaatccctcactccacgtatccaggagtttgatatcctgaactggtggaagctaaacacggtcaagtttccaaccctctctaaaatggcccgtgatatcttggccattccagtgtccatggtaagcagtggcagctctatattctgtgctggaacaggaagtcacatgctcgatgactacagaagctctctgcggcctgagattgtggaagcacttgtttgcgcgaaagactggctccagtattcaccacctgccaccgaggcaccgagttctgcactggtgaaggctcaaggatcgtaggtttgtcgtggtcactgcctgccttgtggaagcaaagcaagaatccatttacccatctgtcgtatctctgagtgtagttaactgtaggtgtattgtaggctgagattgtgaaccgattttgatatattctggtatctatcacgtaaaggtgtaacatgtgttgaactctgctgaactcgtggctgttctgatgtcgtctgactttgcagtttgcacacttccctatgtgcttgtacaagccgtgggatgtatcttgtttttgtattaaatttgttttataccgtggattgatgtctcagtctatatataagcagga

SEQ ID NO: 19359 - DNA, 978 bp, Zea Mays
atttgtggtatgaagaaactttgttgaggtattatgcaccagctttggggttcttgatgtttgctgttggtgtaaactcaagcgccaaggatttgattgaaacaataaaaaggccagatgctattgctgcgggctatatcagacagtttgtcaagctcgtcaccgtcgacgaccctttcatcaccacggactacatggtttcgggaggatcaacgggctcgtggccagggtccccctctagaaatgtggggaaaattgatgaggcatcagaactgaggagaactgtcaatacttccaagatgtgaatagtgggggagacattgattgtgagtgaggcggtggtggtggacacgcgcaggacgggacggacgaagcatcttccaagccggggcagagcgctgtcgaagcagccagcaacaaaagctttcgctggagccgctggtggagtacagagacgtgggaaccaggaagggtattgctgttgaccgattagttgggtctcaagatctcagaagtaaagacgattttctgacaagagcactggaacatattcttattctcaagacgaaagggataatcgatgagaagaagaaagatgacgaagatgacgatgaagaaagcgaggctaagaataggagggttaggtcctcaactgctcaagcctctgactcagactgaacctaagatgaggattgaggactcaccttttttgcactttggattttgtttgtttgttctgtgatgtgctgtattgtactgtaattgatttgtgtaaccatgtatcggtaccagacaccacaacaagaacatgtacaagagattctttagcatccattgtgtgtaaaagttagggtttgtggctgccttttatttcatttttccttagctgtcataggatggtacaacacaacaagaacatgtacaagtatgtcatagcttgtctttcttgcttcttaagacattgttctgccttttggc

SEQ ID NO: 19360 - DNA, 2413 bp, Zea Mays
catcccctctcttttccgctctttcccctgcgacttcaacctctctcaatctcctctccttgtccactggcttgggcgtgcctttgcgtgcgacgggagctaggaatccacggcatcggaaaagtggccgcctgaagaaccgatttctccaagattttgttgtccgtcctatcgcttgcaggatcggattcgccgtctctggccatggttctcgccggcctccgccggcacgtcggccagttcttgaccagcagtaatgagcttatggcggcgtcgctctcggccgtgagctgcgcggacgaggtgcagaaggcggagggggcggggtgccgtgacgacgccgcggcgctgcggctcaagaaggtggccatggcggcgatactggtggccggggtgctcggggtggtcctgccgctcgcggggcggaagcggcgcgcgctgcgcacggacagcgccgcgttcctggcggccaaggcgttcgccgccggggtcatcctggccacggggttcgtccacatgcttcacgacgccgagcacgcgctgtccagcccgtgcctccccgccgcgccgtggcgacggttcccagtgcccgggttcgtcgccatggccgctgcgctagccacgctggtgctcgacttccttgccaccaggttctacgaggccaagcatcgcgacgaggccgcgcgcgtcaaggcggcggcggccgccgcactggttgcgacctcctctgggagcgacgaggacatcacggtggtcaccgtcgatgaggacgagcgcaaggccccgctgttgcaaacgcactgccatggacacggtcacagccacagccacagccatgtgcatgagccggtgcaggtagagggtagcgaggcggaggtgtcggcacatgtgcgctccattgtcgtgtcacagatactggagatggggattgtgtcacactctgtgatcatcggattgtcactgggagtgtcgcggagcccatgcacaatcaggccacttgtcgcagcacttgcattccaccagttcttcgaggggtttgcactaggtgggtgcattgctcaggtgagaattgcagtcaactgcggttgagagctgatccgttctcatgacttgatcaacaattgatttgccatgttttaatagcagcctgctgtataattttgcacatactgttgaaattcttgattttcttgatactctgcacactgtactgtaagtacattactttcatgtgaggcttgctcctttatcaatttgatggttgggcaatcggcctttaagaacatggacccatccttgaaagttcaggattcaaacatttggcttcaataatataactgagcattgtacattgttggaatatatttctctctcccaatttatgcctgtttatccatgtaaatggccaccttcgatttaacttctaaaataaactatggttgtctagtactttgtgaatacccgccagccgaaaattttagtacttcatgaaaagtattgcggagttatgacaattaggttggatgtccatttactgattagattgcttcagcactgaatggtcccagaaaaaaaaatacatggtgatgtctatgcattactacttagttactttgtcttcccttttttttcctttaatttcttttttccttcacttcttctactgtgctgcttccttttcttacttcaattactaatggagacactaccacatttctcccaacaggcacaattcaagaacctttcagcagttctaatggcatctttcttcgccatcacaacaccggcaggaatagctgctggggcaggcatgaccacattctacaatcccaatagcccaagggcccttgtggtcgagggcattcttgactcggtatctgctggcattctcatatacatgtcactagtggatctcattgctgtagatttcttgggtggaaagatgacagggaccctgcgacagcaagtgatggcatacatcgcattgttcctcggtgcgctctctatgtcatcacttgcaatatgggcttgagacatgaccttgattaaatatcagataaaaggtgaagcagtgtccatataaaatttctggggtatatgtacagttttaatgtgtagtatcttgttgtatggtagcttccttcgggatcatcataggataacatgcactgtttttcaagggcatgaaaaaaacaccgctgatgtactcaagggtgaactatgtggtttctttaagcgatgagcaagcaatgatatgtttgactgccgctgaatgactgcatgcactgctgtaatggttgtgtcaattgtgggtgtggctggtcttggcatttcagtatctgcaaagtgtaatggttgggtagtcttctgtcaaatatgaaatattgacaacgttgatttgatctgcagcaaa

SEQ ID NO: 19361 - DNA, 4951 bp, Zea Mays
gaccatgcgcggccctcgccgcgccgggcgccgacgtcggcctcctcagaaggctactaccgacagggcggcggcgcgtacgaccgctcctaccctgacgacccgccgcctgtctacacgccgtcgcgctcggaccgatactggccggaggacgacggcgggcaatacaagggtttcggtcggtatggcggcggtggccgcagggacggccgtgacatgaggggttcgtaccggaggtccccatacaggggtggctacggaagcgacttctcccgaaaccatccagagcagccccctcccccaccacccagaaggtctccgttgaggtcagtcgctgttccgatctgctatgactcaccgggcaatagagttgacaggggggatagggacaacctcccacgggtgacaccatggcggagaagggaaagcagatctgagccagcagacgctgttggacttctctctgttggccaaaccacccggctctctgcctcagggaaggaggcttcagctcagcctctgtccgtgtctggtcctcatgggaccgaggacgaggcaccaaggaagaaggcacgccttggatgggggcaaggtttggccaagtatgagaagcagaaggtccaagggcctgtggatcctgctgaagctgttgctgatggaagtccagctgatggcgaactgaagaccacctctcctgtgcctgtgcctgtgcaccctgtgcctgtgcctgtgccttatgttgcacctgcacctcctgctgcaccagtgcttgcgcctgcgccagcaccttctgctgctcctgcacttttgtctgcccctatgcaatgctcatctccagttaccgggccaccatattgttcctcagcacctgaagataaatcttgtgaaatgatgccaaatgcggtcactaactctactaaagatgtcttggaggctgatgacacaactttcaataatgaatttctgatcaagttagatcagctcggtgatgatcctgttatttcccttggaaacatgcttgttgaacttatccagcacgaggattcttgttctggggattcaaatggcccgaccagtacatataagctgctcctactgaaggaaagcatttccaaggagattgaaaagactgaactcgagattgattcattggaaggcgaacttaaatctgtgaatactgaggctgcaactactcttgaaggttctcccacaggggtgacacatacagaaaatctttcaccctctagtgggacatccaaggttcctggaagtgtggagatctgtgatacatctgatatgataaaagaaccaggggagctcattggttctcctaaggtacctgtggtgcagtatgatgatgtcaaaagtgctgatatgatggaaattgaaacagctccagttcataatgcaaaaacagttccttcagaagctggtgctatatctcctgtagtcgctgagggtaaggcctgtgcagctgctgatcttagctcattgaaagcttctgaagaagctgggtctcaaaatgatattgacaatggcaggctggaaacttcttcacgccaagctaatgctgattccatgaaaatagaaattagtgatgacctaccagtgaagaaatggacataccatgatcataagtctgatttgctcagttctgtcacatctgcaaatagtgctatagccaaagaaattaatgaagtgctatttaaatcattgcctgctgatacacctcgccttgatttgtttgcatcaagtcatcttctgagccaaaggaagagcgatttgattgtcaaagaaaggcttggagtatgtaaaaccaggctgaggttgaaagagcagatgcttacaatgaagttcaaggcatattgtcacttgtggaaagatgtccaactattttctgcaaataaacagcgttcaaagtctaataagcgcactgatcagagcaaccgaacatcacaaattggatctcagaggcaacgctcctctaaccgctcgcgattaaccatgcctgctggtaatttaagtacattctcaactccagaaatgtcagatgttgcaatgaggttgttttcagagttcaaaattaagcggtgcagaaattacttgaaaatgcctgcactgattattgatgagaaagagaaggagtggttgaagcttatgaacaagaatggtctagttgaggatcctgttttagttgagaaggaacgggtgatgataaatccgtggactcaagaagaaaagaaaatttttatggagttgcttgctaaatttggcaaggatttctccaaaatcgccagtttcattacacataaatctactgcagactgtgtggagttctactataagcatcataaatcagatagcttccgagaagtgaagaaactattggaccttcgtcaacagcaacccaccagcaattttcttggagcgaaatctggacataaatggaatcctgagtcaaatgctgcttctcttgatatgcttggggtagcatcagtagtagcagcccatggccttgaatatgcaaaacaagtggagaaaatttctgcgaaatccctcatccggactgcatatgggcccaatgtgacttccgtggctaataaatcttctgataaggagtgcattgaccatgtgcctttgcacgagagagaatctgtagcagctgatgtactagcaggcatatgtggcactctctctcctgatggaatgggctcatgcattactagttctgctgatcctggacagaagattagcatgaaaagagtggagcatgtcttgtcccaagaaaatgacaaaaccgttgaggaggaagacacactctctgatcaagagtgtgaagttgacccagttgattggaatgacgacgagaagtcaattttcattgaggctatgaataactacggaaaggattttgctcggatctcgtcatgtgtgaagagcaagtcatatgaacaatgcaaagtgttctttagtaaggctcggaaatcactcggtttggatttgatccatcaaggggcagccgatgttagtatgccagctagtgataccaatggagggaagagtgatactgatgaggcctgcgctgtggaaatggattcagctatctgtagcacacagtcatgttcaaagattgcgatggatgtttgtcctactgaaggagccattggagggcctaactctgttataatctctaagcaggcagaagcatatatatcaaatgggtgcaatgctgatgttaaaattgaggaagatgagaaggtagctgataaaaattgcagcattgttgatgctaagaggtccagtgatgctactcacgaagctggtcctattgacatcaattgcccaggaagcacagataagctgcaaggaactgatgatgtcgttgacctagtaaacatgcatagtaatagtggcatcagctcttcagctaagcatgcagtggccattcactcggaaatgagatccactttacattctgtagaggtccttcaaacagacaaaggtgaaggtactggtactgatttgtcctgggtggaagaatgttcacaccatgctctggataacacaccaatgaaaaatggaaattctggtgccccggctttcttggcttcagatagtggtatcaaggacaatgttcgcatctcaaacataactgctgcttccaccgttagtcctgcattcacttcaagttatcagcattctgtacctggagatatgcccctgccaaaaccaaagccacttgttaccccgcttaccccaaaggatttaatgcctgtgcagttcagttcagtgcttcctgaccccactgcaattcgtttcgagggcatagcctcaataactacgcccaacttcgaggacactggcaacagagtcagtggtgctctaggggctaaagagatgagcaagtacccagcttttagagacccatctgaactgcgagtggcactgtgaatacttcacaggcggatcggttgacccaaacaaaattgcagaatggcaggtccagcagcttgtgccttcaaaacaattccgatggcattcaatggcccagagaccacgaaggaggactggaaggctctttgaggccttgctctcgcaatacaagctccgagggtgatgagcaacaaaagcggcctggtgatgtcaagttgtttggacagattctcagccatcagtcaaccctgcagagttctggcttgtcttgcaatggtaacaagagcaagcctccctcaccaaagatcgacacatctgtgagatccatgaacaatccaatggaccgtgtggtttgttcttccaggcctggcaccactccacatctgggtctggaggaaagattggcaaggtgctatggtcatctggatggtagcacggcacagcccgagccactgctcgtgatggcaaagcgccagcggtccttggccggcgtacagttttactcggctaagaacggcacgcttggtgtgttaccagattaccaacaaccttcgacgcagccacagcaatcagatcccaagcgtgtggaaaggttgtctgatccgcagaagaggaacgtgctggaactcatctcgggtttccagcagcccggcagagtcgcccgtttcgggggtgctggcatcctcgtaagcggcaacgtctcggaccctgtggctgctgctctcaaggctcagtatggtcccggttctaagattatgggcagcgacgtggatccttggacggacataggaagcagctccatacccttttggtatagcttgacatgccagcagtggcacagtgccgtaggttccctagaggtgaactagatgtttgtcagcatggtttgattttgccagcctatgcagaaaacctcacttggtctttgtaatgtggtaatgccatgtatcagtatcctagtctgatggagttttggttgagacagttctcattgcccgctggttcatcttctgtttct

SEQ ID NO: 19362 - DNA, 162 bp, Zea Mays
aagttttgaagttttcttttgtttaagccttgtttgttctattaaacccaacttagggttaggctccccactctagggtcttatttgcaaaagatcatatcactacaacttgtttgaaatttttgcctagtgaatgcactctaggtgtgtcaaacatatgaa

SEQ ID NO: 19363 - DNA, 1533 bp, Zea Mays
cttctggagcgcgttcgcttagtatcaatccaggctctgatttggtggctgaagctctgtttctccatggcgcttcgtttcgagatattaggaagattcaatcgcgcccgcgcagctcgcttaactcttcccccactttacttgtcaaacaccactttttatgcctgttggaactcaaggtttcgttgctgcatttggctgatattactgaggaaggagttacgtttcagtcacctgttgatgggaagcccatgctcttgacacctgaggaatctattcatattcagaacaatattggagctgatatcatcatggcacttgatgatgttgtaaagaccacaattactggcccgaggataaaagaagctatgtatcgcaccattcgttggattgacaggtgcatagctgctcacaagaaacctgatgtccagaatttatttgggattgtgcaaggaggattggatcctgttcttagagatatctgtgttaggagcttggttgagcggaatcttcctggatatgcaattggtggtcttgctggtggcgaagacaaggattcattttggcgtgttgttgcccaatgcactgctggattgcctgaaaataaaccacgatatgtcatgggtgttggctatccacttgatattgtagtatgcagtgctttaggtgcagatatgtatgactgtgtttatccaacacggactgctcgttttgggactgcacttgtgcctgagggtgtcctaaagttgaaacataattcaatggcgactgatgaacggccaattgatcatacgtgttcatgcatggtctgcaaaaaatatacgcgcgcctacttacattgcctggtcacaaaagatgctatgggttctcagctgctgtcatatcataacttatcatttatgatgcggttaagtagagacctccacatgtctattcttgaaggacgatttccagaattcgtgcgaggattcttgagggtgcagtttccaacgggagacgttccgcagtgggttcgcaacgcgatggaggtcgctggcattgacatatccgagtgctgtgcttccaccaatgtctgacaccaagcgtataggggccacctttaactgtaccggttgactgcaaatggagttgtgccgagttaagactcttcggcaagcaaaagacgacgacaggctttcacaaagaagtttttttccgtcatacatgtagggtctcacacggattcagcataggattttccaatagtatgctgaagcttggcgacaggttttgttagtgttttgtgttgtgtttggaaaccgcagaggtatgctatgctattcttctggggtctaggttatgcttcgtcttaatcactggatgtgatttttagtggtacggtcagatcaaaggaaggtgtacccaactctgacgaatattttttgttataacgaaaagaatgttatagtccttgcaatgatctgaacctgactggctgactgggtctgcagcatgcagcagctggaacagtccagtcccggcgtgctgctgctg

SEQ ID NO: 19364 - DNA, 1319 bp, Zea Mays
cagacagagagagtatgttggtatgtacaaacaaagcacatgtgcatgctggctggagaggtagatatgacggagatcagacaccaggcaagctgcaagcacgtacaagaggggtcaatcaatcaaaggagtggtaaatcaaaagtgcaagctagcccatcagagaattcaggaccaaaccaatgcagcagcaagggccagccaggccgcaggaatcatcagactgatctgagctgcgggccgtcgtccaaggtcaaggagcaggtggcggcggcgccgacgggctccggcgacaggcaggggcaggggagaggcaagatcgagatcaagcgcatcgagaacacgacgaaccggcaggtgaccttctgcaagcgccgcaacggcctgctcaagaaggcgtacgagctctcggtgctctgcgacgccgaggtcgcgctcgtcgtcttctccagccgcggccgcctctacgagtacgccaacaacagtgtgaagtccaccattgagaggtacaagaaggccaacagtgactcctccaactctggcacagttgcagaagtcaatgcccagtactaccagcaggagtcctccaagctgcgacagatgatccacagcttgcaaaacgcaaacactaggaacatagtgggagattccatccacaccatgggcctcagggatcttaaacaaatggagggcaagctggagaaagccataatcaagattagagctagaaagaatgagctgctatacgctgaagttgactatatgcaaaaaagggagatggatctgcagactgacaacatgtacctgaggagcaagatcgctgagagtaatgaaacggggcagccggcgatgcacatgacgatgggagcgccgccgacgagcgagtacgaccacatggcccctttcgactcgagaaactttctgcaagtgagcatgcctcagcactactcccatcagctgcaacctacaaccctccagctcgggtaatcccaaacagcccttcagttaacaattgtctcagctccacactactgcacacacgcatgcagttatatcatgtgccaaatcgagatctcaagtaactctacgtacgtttgcttaattattaataattgtgattagtgcaactgttagggtatatatatttgtgagtgccaccactgtgtgcgtgcatttgtacgtgtgaatttagctgttgcatctactactattgtaccctccggccaggccatatcatcagaaacgcgggtttatttacgcatacttatatatatatgatttgtgtgctttatatagattgaaaagagtatgttggcctc

SEQ ID NO: 19365 - DNA, 5261 bp, Zea Mays
cacaggtctccggcgaagtctcctcccgaccgccctccgcatctcgtcgacgacgaaaggaaaacctcacaaatcctctggatgcggggtctagccgcctccgccctgtagcaccagtcggatcgaagaagcacaagcgcttcgggtcggcgcgcacctctccctcatggtggcggcgcgaggggcccgatctgggggctcggttgcggcggcggcgctggtctcggttcttctcgtgggttgcctcgtcgcgggcggccagggggcggagatccgtcgccagaaaaacgtgcaggctgcgctccgggccaagtgggctggcacgccgctgctgctcgaagccagtgaattgctttcgacagaatggaaggatctattttgggattttattgacctctggaaggatctagagaaaggctctgaatgtttaacagcaaaatgctgtgcccagaagattgttgaggatgcccacatactactcaatgaaccgctctcttcaatttttgagttttctcttacccttcgatcagcatcaccaaaattagtgctttaccggcaacttgcaaaggagtcattatcttcgtttcctattgatgattcaccagagaacatttctggtcatggcactggaaaaacttttgatggggctgtggatcctggctcttctggaggaacttgctgctgggtagacactgggaatgttctattgttcaattcagccgatctgcatgaatggcttgggggattgggcaagctagctatggattctactgaacagcctgaactctttgaatttgaccatatatatcgtcgcacaaatattactgctccagttgctatattttatggggctgttgggacaaaatgcttcaaagagctgcatgttcaactagtagaagcatcaaagcagggaaaaatcaggtatgctctgcgtcctgtcctaccatctggatgtgagactacgtccaccttttgtggttcagttggtgctgtagatgcagtcaccttgagtggttatggggtggagcttgccctaaaaaacatggaatacaaagctatggatgacactgctataaagaagggtgttcctctagaagatcctaaaacagaggacctcagtcaagaagtcagagggtttatattttccaagattttggaacgcaagccagagctaaatgctgagataatggccttcagagattatctgttgtcatcggcagtgtctgatacacttgaagtctgggaactcaaagatctgggtcatcagacagcacagcgaatcgttcaagcatcagaccctttacagtcaatgcaggaaatcaatcaaaatttcccaagtatagtttcttcactatcacgaatgaagcttgacgattccatcaaagacgaaattattgcaaatcagcggatggttccacctggcaagtcattgatggctttgaatggtgctttgatcaatatcgaggatcttgatctttacctgttaatggatatggtccatggagaattatccctggctgatcagttcgtccggttaaagttgcctcaaagtgctgtcctcaagatcctgtcagctcctccaccagcagaatctaattctttccgtgtggacttccggtcttctcatgtgcattaccttaataacttggaggaagatgccatgtatagaagatggagaagcaacatccaggagctcttgatgccggtcttccctggtcagatgcggtacatccgtaaaaaatctgtttccactctgtttatgtgcttgatcctgcttcagcctgtggtgcagagaccattgacatgatggtatctctatatcaagatagtgtccctataaggtttggtatcataatgtattcttcaagattcatcaatgttgttgaaggaagtgatggcactcttacaaataatgatggagaagacacttccattttgataacaaggctttttcttgtacatcaaagaaacatactcaacacagttggcattccaatttctcggcaatatacataaatcaaggaatggtgaagatgactacaatgaagagcttgttgaggctcatcatgttgaaggggcatttgttgattcactattatcaactgctaaatctcatccacaagatgtgctgctaaagttgcaaaaagagaacatgtacaagcaggaagctgaagaaagctctcattttgttcacaagcttgggttgtatagactccagtgttgtctgttgatgaacggacttgtccatgaagcaagtgaggaagcgaccatgaatgctatgaatgatgaacttcctaggattcaagaacaagtttattatgggcatatccagtcccatacagatattttagagaagtttttgtcagaaaatagctacaagcggtacaacccatcaattactggcaagaatgcagagaagaaatttgtttcgctctttgcatcgtaccatcaggacagctttatatttaatgacatgaagtacttacagtctcctggaactacagatgatgcaaaacctgttactcatctacttgccattgatctttcatcaaaagttggaacaaaattgctttatgaggccatactttacctgatggacggatctgatagagctcgtgttggtctgctactttatgtccacactggtggttcatcacctattttacttctgaaagatattttcgatagaactatttcttctttcagctataaagaaaaggtattagtcttcctgcatgggctcttgaaattttatgatgcccaacctttgcccgcctcatctgttgctgatgattggactagaactatgatggaaaaggtctataccttagctgctgaaactgctttgcctgttgatgactataaagcgtggtttaaaagtttctctgctgatacagttctcaaagggatggataagttatctgacttcttatttgggcaattggggcttgtgtttggtagtaatgctgtgatcaccaatggacgggtttttattatgaatgaagggaaatcatttctagccaatgatttaggtctccttgagtctatggagtatgatttgagaacgaaatacatatttgaaataattgaagaggttgagtttgccagtgttgaccctgatgacctaacaaaccaattctacagcgacattgccatgttgatctcatcgtcgatgtctgttcgtgaaaggacatctgaaagagcccattttgagattttacatgcggaacatagtgctatcaaattgaataatgcaaattcaagtattcacattgatgctgtcattgatccgctaagtcccactgggcaaaaacttgccccacttctacgcatactctggaaacaaattcagccgagcatgaggattgtacttaatcctattagttccctcgcagatcttcctttaaaaaacttctacagatttgttcttccatccatggatgattttagcagtacagatcattctgtacacggacctaaagctttctttgcaaatatgccactgtcaaaaacacttacaatgaacatagatgttccagaaccatggcttgttgaatcagttattgccatccatgatttagacaacattcttttagagaatcttggcgatgtcagaactttgcaggcagtatttgaacttgaagctctcctcttgacaggtcattgcatggaaaaggaccgggaccctccccgtggtctgcagtttatccttggtactaaacaaagaccacacttagtagacacacttgtcatggccaacttgggttactggcagatgaaagtctcccctggtgtatggtacctacaattggctcctggtcgtagtgccgatctgtatgagctacctccgaaactcattgccattgatagcttgagaggcaaactaatgcatattgaagtgcaaaagaagaaaggcaaggagcatgaggacttgctaaatgctgccgatgactaccacttccaggaaaagacggataacaaaggctggaataagaaccttttgaaatgggcttctagtcttatcactggtgatgcttcatcaaaaagtaaagctgataaaaccactgaccgtaaggatgcaagacaaggggaaaccataaatatattctctgttgcttctgggcatctgtatgagcgtttcctcaaaataatgattttgagtgttctaaaaaagacacagaggccagtgaagttttggttcattaagaattatctatctccacagttcaaggatgtcataccgcacatggctcgggaatatgaattcgagtatgagctcgtcacatataaatggccaacatggttacacaagcagaaagagaagcaaaggattatatgggcatataagatcttatttctggatgtcatttttccactttcactgaggaaggtgatttttgttgatgctgatcaaattgtgagagcagacatgggagaattgtatgacatgaacctgaagggtcgcccgcttgcatatactccattctgtgataacaacaaggatatggatggttttcgattttggaagcaaggtttttggaaagatcatctgcgaggaagaccgtaccatatcagtgcgctttatgttgttgatttggccaaatttcggcaaactgcttctggggatactcttcgtgtcttctatgaacaactcagcaaggaccccaatagtctctccaatcttgatcaggatctcccgaattatgcccaacatacggtgcctatattctctcttcctcaagaatggctgtggtgtgaatcttggtgtggaaatgccacaaaagcaagagcaaagaccattgatctatgcaacaatccaatgacaaaggagccaaagcttcaggtaaaattatgtaccagtggattttttttttgtcttgatctgctaaacttgtactgcctctttccagggtgctagaagaatagttccggagtggactggtcttgacagtgaagcacggcagttcactgcacgaatcttgggtgatgatgtcgagcctgcagatgccacacctccgccatcggaggcaccgaagcctgaagatgatcaggatgtgaaagatgagctatgatcgcaagatgtttccaggcttggtcttactgaatgaaagtttggtgactcgacagtcatcagttcagaacacaggcacacagctagtggagcgcagagggatagtttaacgcaggtgcaaatttgtcaaaacactacacctggaatcctagactacgttgattcagcaggtgttgttgatcttgctgac

SEQ ID NO: 19366 - DNA, 1613 bp, Zea Mays
aggtcccgtgcctgcccgctctctcgacgatttccatctctccctccattttgccccctcgctcttctcttcacttcctccgctccgcttgctgtctcctagtccttcccttagggtttgtccagctccgcgctccgcctcgctcgctagctccctctctcgtcgatcccacggccccgatcagcgcgatctccgcgcggccatggtctccggcgcggcgcacaacccgggcgggggcgccgccgcccagaccacccagcgctcgccgccgcagctgggggcccggacggccctcgccacgccgccgccggtctccggcggcgctgcgcactccgcgtctactagcggcggcaccgctggttcaccaccgtccagccgcagcgagcagcacgcccccgacggtgctgtcaagggtcccgccctcggcactgcgcccgcagcggcggcggcgtccacgcctgccagcgacagcacgttcctccgcttgaataatctcgacatcaacggcgacgacgcgccgtcgtcgcaggctcccacgagcaagaagaaaaggagaggcacacgggcagtgggtcctgataaaggaaaccggggactgcgccagtttagtatgaaagtttgtgagaaagttgaaagtaaagggagaacaacatataatgaggtggcagatgaacttgttgctgagtttacagaccccaataataatattgaggcaccagaccctgataaccctaatgcgcaacaatatgatgaaaaaaatattcgacgaagagtttatgatgctttaaatgttctgatggctatggacattatatctaaagataaaaaggagatccagtggaagggcttgccgcggactagtataagtgatattgaagaattgaagactgagcttgtgggactgaaaggtagaattgagaagaaaagtgtttacttacaggagctacaagatcaatatgtaggtttgcaaaacctgattcaacgaaatgagcaattatatggttcaggaaacacaccttctggtggagtggctttgccattcatcctagtccagacccgacctcatgcaaccgtggaagttgagatatcagaagatatgcagctggttcattttgacttcaatagcactccatttgagctgcatgatgactcatatgtcctaaaggaaatgcggttctgtggaagagaacaacatgatggaactcaagagtcgatatcaaatggaggtgagagttcaaacgtgtcaaatatttattggcaacaagcacagcgtatggagatgccaaacaatggcacagttaggttatcaagctcaccgcctattccagggatattaaaagggcgtgtgaagcacgagcagcactagcgcttcggttttggttaactggcgttgtcgtcctgagagcagtttgttttattacttttctccgttgtgtaaagcgcctgtaaattattaggcaagggggagggtagtagctctgatctgatttagctctgattggtagaacgacgggtgtaactatatccttgattcggttctctcggtatggttgagaaaagggttgacatgtaatttgtagagcattataaaaactaaaattattgaaaaaaaa

SEQ ID NO: 19367 - DNA, 2308 bp, Zea Mays
ggaatctcttgcgtttgtatgaattttgcatgacctctaaagaacgattgcttgtatatccatatatgctaaatggcagtgttgctgaccgcttgagaggaagctatgcattctaaagggtgtctttccacgtcagccaaagaagaaggtggaagggaaccacaagacctactaccacacaaaggatattgcattcctcgctcatgaccctttgatcgagaagttcagggagattaaggtccatcgaaggaaggttaaaaaggctgttgctaagaaaaacagggatcttgcagacaggctgttgaatcggccaccaacttacaagcttgataggcttgtccttgaaaggtatccaacattcgttgatgctcttcgtgacttggatgactgccttacaatggtgcatctgtttgcggcattacctgctgttgacggtgaacgtgttgaggtcaaacgaatccataactgccgcaggttaagccatgaatgcttgacatttatttccgtgaagggcatatattatcaggctgaagttcaaggacaaaagatcacctggctaactccgcatgctcttcagcaagtattaactgatgatgttgatttcaatgtgatgctttcttttctagaattctatgagactcttctaggatttgtgaacttcaaaatctatcattcaataaatgtaaattatcctcctattctggatccacgtctggaagctttagctgttgagctctatgcattgtgccgatacatgtctgctggttccagaagaatgattgggaattcacaaactgacgaagtaatggaagataaggatgagaaaagtaaagctgaggaagtaattgaggaagagaaggttgtgaagaataaagcaagctcaaaagcagatgaatctgagttcagattagcacagcttcaacatcagctcccaaccaatgaacctggtgcactgatgaatcttgtagaagaatcaactgccgatgatgcagatgatgatgatactaaagattgtaaaggtttatttaagaacttaaagttctacttgagtcgagaggtagggagtccctgttatttataattccagcatttggagggactgtttcatgggaaggagaaggagctccatttaaagaaatagacgaagatatcactcaccaggttgattccatttgcaataatttattacaccaaagtttaactatatagacggagacattgtgtaccatccctaaagtaagatgccactctaagtaccacgacagcaatgccatactagggcaatagttactacaatacaatttttgtatgtggctaactgttcatattttacactctaccatcatatgatcatatctagcgaagtaaaataaaatggcctgtggatttttttatgcttgctagtatccatattgtaataaaaaataggagtataatatcacatcctcacactataacagtttaaagaatgaattgctcaaacaactagaaaaatctgagcaggaaaagaaacaccttgaagcaagtcttaaaactgagatgcaaaataattcaaatttgcaaaaatccttgaaggagcttcaagagaaatgcctaagcttcggcagccgatgcgtgcagcggctgaaggatgtgtttcattctattggagccagctctgaaaaatttacactttcagctgaaaacttgcccaacacattagaatatattgaaggcgaggttgaagctcttgacgaagttattggtagccatgctgacttctgcgccctggtagcttctcggggcacagctaccgcttttctgaaagctggttgcacgcatggaaaaattgttaataggcccaactacagcttatcatcatcagatctgatagatattccaagcctagctcgaagtatcggaaatagatttatgacccagatttgggtaaatggcgggcggaaaatggcgggtgacgaagctcgaagtcatcttaagccggtaaaaagcttatatttgttacttttaccttcttcttgaaatttgcacctttcttattctgttctttaatactcgtaggatgacgaagctgaagtataacaaatctgaagtatgacgaagctgaagcttgatagttgctacaatattctttcctgtaaaaattctggagagacttttgtaatattattatgtaaaaactcatgtaaatttgtacataccttgtaatatattttgtttccgctatctgtgtacaatctgctttgttgtggacgaaacttcttttttgagccgaaggcgaaaaacatattcccttcttttcgtacataac

SEQ ID NO: 19368 - DNA, 4804 bp, Zea Mays
tcttgacaggcatgtaatgttagctaagagtgctacttgtgcggacaaggctgtggtaaggaaaagattggtatcaagcaataacactcatgccaaagtagaatctggcacctgtaatgtctgttatgccccttgctcctcttgtttacacccacatattcgggttgtggattcgaatgttgaatgtgcatcctctcagacatgctccacaaggtcagaagtaaaaaacaattcactcgttcgtaatgagaaagggctttgtagtaaaggagaaaacgatgatgagtttagtgcaacctcaggtcatgtttccgactctgtggttgcaagagcatccattgcagacgattcatcagaggttaacatgccatcaaaacgcaggaggctgttaaatgaaaacacaagactacctagagcagaataccttgaagacagcaactcatgtgttactggtatatcagcagaaggcaaacttcatgtggataagaaaaaattatcaacttctgcatccagtcgagatttgactgctaaagattataaagtcaacagcatggctaaccacagcaaactaagaaaccaatgtattgatgaatcaaagaaaggatctgatggtcgtgacatgcatcctagctcatctggtagattttcccctgtagattcttctgttatgacaaaaaagatgctgcgaacccagtcttctgtcagtgcattgagcagattatctcctaacaggcaagctcatgaatttgggaaagcactggataatttatctcatcaaccttgtgagaaggcttctcttttgaagaataatgaacaactacgatgtgggcaattgaacccttgtatagctggtgaaaacaatcatggcacactggcaggctacagtaataggcatgcggacaaagatgttttctcattgaaggatctagacaatggtaccttgtgctcaaaagatgaaatccaagaacatggtggcatccattctaatgatgatgttaagaagaatgtgtgtggcgaacaagctttggatcaagattgttcaagggatatatccagtgacagaaagttgaatatacaacatgatgtgacagactgtgggaattcagaaggtttgatagatgttaatgtttgtgatatatgtggagatgttggtagagagtatcttttagctacatgcaccagatgccttgagggagcagagcatatttactgcatgcgagtgaagttggaaaaagttccagttggtgaatggttttgtgaagaatgccagcttaaggaagatcagaacaatacaagtaactatggtatctcggtggttaatgtgacagaaggaaagaaccaaaggacagaaagtcgaagcaagcctaagacattgcaaattgttgtgcctgattttgatgctctggaagtcacacacagcgcattgacagctgatcggtgtgatggtaacagtaaaaggttgcatttagcttcgactgatacacaaacacggcaactaaaggataccaccccagctgctcaaaggttggatgtgaagaacaaaaaatcattaagtgttacaaaccgtaacaaactgcaagttcttacatctgatttagacacacgaccacacaattatggaacatcaacatctggagtctataccaataaaagtcaaagttcagaatttttgttaaaccacaaaaagctgcgagtttctactgacatgcagtcgccactctcaagcgaaggcctacggagtccaccaatatcatgcaagagacatgcagagagtatgtcgtcccctaagcctaggatcgtcaaggcgggtacccttggaaaacaagatgtcatctctcgtgcgaactcatttaagaaatctaacaagggaggtttaagttcagttgataatattccagtgagaactacccaggctgtcaaaagttctgactctcagacattgtcacggtcatattccttggggaacatggtgaatgctaaagctccagttccttcaccaagaggctttttatccaagcagctatccttcaacagcaccaacaacggaccaaaggtcaaacagttggctgatggggtgtctagcaagttaagacctgcagaacattccccaagagatcctagagataagaaatccatcaaaaagattgtacaatcaggatccttcaaacacgagggttcagattccatagttgctggatcatcaaaaaaaaagcaaacatttcatttgtctcaagatgaaaaaccaggagtactgaaggtaataaaggaaaataatttaacagaaagaagggcttcatttagcttgaaaaaacgaaacattccttcatctccaaggcctgacagctgtatgaagtcaggggaaagaaaaaatgatcaggatatttcaaggtctggaacaagcatacttaaaagtagcaaaaaacctggatatgctgaaaagaagcagaacaatgatttgtccagaagtgataatggcaaggaagatgttaccgtgcatccaaaaacaatggaagtttctggtaaagatgcttacgtagtgaagacatctgatccaccagttcaaccccaatgtgccaaaaaggatagaccaaatgatgttgaggatgacgatttactcatttcagtgaataatgttaacatagcgccaaatgagcatgccgaggtggttcccacaacatttgctgccatgacttatgaatcagatttgcaagatgttccaagagaaagcacctctgatgattcagctccaaaagtggtatgttgccaacaaaagcttttggaaaacacaggagatgattctggtaaaatcgtagaggtggttcaagattcaggagatatattgtctgtgactccacatggtcttcagatggcacacaatctatacccccctgacaataaattgcataaaccagatttgaagaaggaagcttttgctgatcaatcttccgctcttgggaattgtttaaaagattttgttattccagagcagtcttacatctggcagggtgggtttgaggtttcaggacatggaaactcccctgaaatgttcgatgggtttcaagcttacttgtctacttgcgcctcatccaaagtacgtgaagtaggtgaacaattacctgacaaaattcagctagcagaagtcccacggcattcctcatggccactgcaatttaatgaagtaaatccaactgaagataatattgctctttttttctttgctaaagatgttgaaagttatgaaagggcatatggaaaactcttggataacatgcttcttggtgatttgtctcttaaagcaaatattggtggcactgaacttctcattttcccatccgataaattgccagagaggattcaacgttggaatggtttacctttcttttggggcattttttatgcccggaaagcaagtagtccactagagcttcctacaaataattgtccattagaacaaatcaatgaacctgttatccagcatgatattggttcgcctaaggcacatcagcctttgggtatagatttgaatgagtgccctaatgattatatatctgatctgtctctttcacttggatcagagagtgagaagtctggtgcatctttagatcgtaatattgtattagagtccaaacgtgaggatagaagtctgaatgcaagtgaaatacatcatgaagaaactgcaggcacaagacaaattataccggggcatccttctgttgcttcctgtggaactaatcttcccacaatctcaacaggaggtcatgacatgattcaggattatctggctgctgctaaaggtagcacaggaacaccaggtggaaacaaaatggagaaaacagatcagaatgaaactctgttccgtttttcgcagcaactaggtgcaactagatcaatctcacatgagatagaacttaataaacatggtcttttgccctcgcactgtcatttgagtggatcaaagatatgtgatgatcaaaccaaatcaactccaaattcagatatgggtcctttggattttgacatcaccaacaaaaggcagaagacttatgggaaacactcttgcatttttggagatgcaatgacacctatgaaatgcttgtccaagatacatcccttaccggctggacaggataatccatgcgatgttttacagcattgtcatcggggcccttcagatcctgcctctcttaaaaaacctttacctgatcatttcatccacgttctttcatctgacgacgaagattccccagaacctagtactagcttaaataaggcatcatcgaaggcagatgagggctcctccattttatgctcactttccctatccatggtggcaacgaagcgtaatctttctggttcagatattgtagatgatgaaccactgtctctctctcttgggctccctagtgttgtcggtgggagagcagatcaggagatgaagcaattcctgccggagaagccaggcataaacacttaatgcccctttagatttgcgagtgtacagttttgtgcagctgtatggagtttagacagggtagaagtatggtatagctgttaaattatgaatatttttcatttttttctctctcactgttatatgcatctgctgccgttgttagtgataatggtgtgatgatgttactatctgccatatctatgagatatatggtgttagtttcttgagatattatgggtatgacataaaaggatagatcaaaatgtgaatgtttgtgaattcattttgtcatggtttaacttgcattttctatcccgtggcaagtcttgggtgtatcctatcctaatttgc

SEQ ID NO: 19369 - DNA, 581 bp, Zea Mays
caaagagtgagagcctccaactcgcaactccgccgcagcagagcacgcacgcagagaagctcatcagtgcccatcccctgctccagtgaggagagagatagagagtcgccgccgccgccgctgccgccatgaagatcctagtcgcggtgaagcgggtggtggactacgccgtcaaggtgcgcgtgaggccggaccggacgggcgtggagacggccaacgtcaagatgtcgatgaaccccttctgcgaaatcgccgtcgaggaggcgctccggctccgcgaggccggcgctgctgctgaggtcgtcgcggccactgtgggccccgcccagtccgctgaaacgctccgcaccgcgctcgccaatggtgcggaccgcgccatccacgtgctccacgatccggaccccgcgcggcccctcctcccgctcaccgtcgccaagatcctccgcgctgtcgcgctccaggagaagcctggcctcgtcatcctcggcaagcagtaacaggcgattgatgatgattgcaaccaaacaggacaaatgctagctggattgcttcagtggccacaaggaacctttgcctccaag

SEQ ID NO: 19370 - DNA, 324 bp, Zea Mays
ataaatttgccctgttctctaccatcttgaggatacaatggaagcacttgcggccgagcctagaatagaagaaaaagaatctaagacccgtatagaagcagttgctcaagtattggcttcatcaaaatttattcaaattgttggtcttgtagctgcaaaaaagagaagcaataatgttggtgatgtgacacgtgtacaagcagcaatgttggtcttgtagcatcaagatttggttattgatgaatgatatctatgataaatatatgtgatgatcattgattatagtttaattataatgggttgtgcttcttatgctacattgcc

SEQ ID NO: 19371 - DNA, 3953 bp, Zea Mays
gccctttcggctttggctcttttagtagaagtagagatactcaggttcagttcagcacgcgtgcgctgtctccctctctcttcgcgacgactgtgcgaccgccgccgccgacctacgccaggttccccgatcttcgttgggcgcttcgccggcgacgagcacccatcagccctgttcaggagtgatggggaagaacgagaaggctaagcgcaagaaccctcggaaagcgcatgaacgggatcttccagcctcgtcctcggaggttggacctggtgatgcagcatcgcaggatgcaagccactcagcagaggaagcagctgcttcggctaatggccgggagcattgcggccactatggccgtgacaatgcccacttagataaggtcctcctggagatcttgtcttccaagcacgttgcttcatgtgagcactgccgagaagatgcaccaagaaagaaagggggtgctggtagcagggagaaagggggtaagcagaagaagaaaggaggcgcctccaaaggcgctactgccaaggcacaggcaaaggcagacacaagtcatacatgggtctgcttggactgtggtcggcatttttgtggtggtgcagcagatgataccaagccctatggccatgccagacggcatgctaagcaggaccggcattggtgggccgcaaggtatgatgacccaacagttgcttattgtttgtcatgtgaaaaggaggtgtcagttgagatgcccaaattagagacagttgttgcaccagcagtggaagataaggtggccggtgcagcggatactgatttatgtggtttggttaacccggatgctaatgtgatcaaaggacttccaaatctgggaaatacatgcttcttcaatgcagtgctgcagagcatcctcgcggttgataggttgcgcaggaagatgttaggaccagatgttcctacaggagcccttgctatgtcactgaagaagctttttgcagagacaagtgcttcaaaccatgcaggaggcatgctaagcccgaagaacctcttctcaagcatttgctcaaaatatccacagttcaggggctaccagatgcaggatagccatgaattgctccgttgttttcttgatggtttacgcatggaggaaactgaagcacggaagctagcagaggaagcttcagatgcaggtgttcccacaattgtggactccatttttggtggtcagctatctagtactgtgtccagcacagaatgctcacacagttccgttaaacatgatcaattccttgacctctcactaccagttccatcaaggagacctccaaccaagagtgtttcatcaccaccagttaagaggaccaaacagtccatacgagataggaacaaaaaccgcagatacgggaaggttccagctcgagcatctccttcagtagagagtaacaaagaacaagttcattcaattgctgagcgcaattcccaaattcctggttcagaacttgaacaggtagtcagcgaaaaagatgctgagccctctggatgcagtgagtcatgtggttctgtgcctaatcaagaacaaaatgccactacaaatgtggagaatagcatctgctggttggattatgtcgctgatgcggatgaaacaaaatctgagattcttgattctgcagattctactgaaacaggacaaatttgggaatgcagggatgctgcacatggtcccttgcaccctcaggatgatgccctacccaaagagcagatcttgggttctgagcactcaggcgaaaacactgttgatgatgatgcctccttacagactgttatcttacttccttacaaagaatttggtactactgccaaggaaagggatgaagccatagaaaatccatataattcagagtgtacagttcctcctttagttgtttctccagtaagagaaaataatacacaacctgaatattgtggagatgtggagcaagatgactatgttggtcttggtgatatgttcaatgaaccagaagttacttctgaagtcaagaaagaagctggtaaagtagaagatattgatgtaatggcttggagtagtaacagtgctgatgatgaggtagatgatagtaatgctcctgtatcagttgagggatgcttggctgtgtatactgaaccagagctgctttctgaaccatggctttgtgagcactgtactaatgctgcacgcataaactctaatgaaagagaaaatgtcatggagatgaaggaccgagctaatgaaataaaggatggtgaggagatgatggcagatggcgatggaaaaaaagatggtgagaagttgatcgtgagctgcagcaaacaggtggacattgatcaggttatgggaactgatggttgcaaaaagcacattgaccagattatggcaactggtgattgctctgacaatatgcattctgatatgcattgcaaggaaggtgggtgtgttaatccttcttcggctgaccctgaacaaaaatgtgatggcaattttccagatatagaaaatacttctatgcagagaactgatgtagtcttcactatgaatgagactgaacaatcaagcagtcagactagccacaaggaacagtgtatggatttgaaaagcttagaaccggagtcctcatctttgaataaccaacaacatgattcatctgtccaatataatgattgtcataacgtggatataaccgttaaaggagcaagtgcaccactgagttgtggcgattctgtgtcttgcaatgcaactaacaatgttgaagctcaacctgttggtggtgctgaagaagttgtgtcgagtagccttccatcagatgcacaaaaaaccttgctgggtgcaaaagataatgaagatgccatcacaaagaatcagggcaggaggaagcgaatgaagatggttggtaaggcacagctagtgcaaggtaaccaaaataagcagaaagaggacgagacaaaggttttcagagctgcattgagaagaattcttataagcaaatctccacctgtattgacgattaacttgaacagattcagccaggattctcatggtcgatataagaaactgaaagggcatgtgcgctttaatgagatgcttgatatacaaccattcatggacccaaggtgtaaggtgaacaactccagcacttatcgtctagttggcgttgtcgagcacttgggaaccatgacgtcaggtcattatattgcatacgcgagagcttgcaagattggaggtcggcagcagcagagcagtggctcaaagtcttggttttacgcaagcgatgggcaagtcagagaagcctctctggaggaggtgctaaactgcgaggcctacattctcttttacgagagggtgggcgactaagacaagctctgtgccagcctgctcttcagtcagtcagtcatttatcagagcaagatcactggggggggggggggggggggtggcaaactgggaattgaagacaacattttttttgtgggcacagcccaatgagtttgcatactaatgtagctacccaccaagtccattctgttccttcgaccgagtcattccatggcccgaggtggctccattaccattcatctgctcggtcgaagagattttcgcaattggacttgcacagcagaactgttcatactcgcctacatccattctttcttttcccccctttttggcctttgaagaacatagctggtggtgcggggattggtcaaaattggcagggtttttttgtcgaacggttcatggtcagcttgagacatttcttcggcatgtggatgcccctagattttgagtgatgggggcactgtaaaacggctttaggagctatcctgtagttgcaacaatcgcagtcgttttcacacagcgtcgcccgaagtgattgtatctgagagatgtttatatatatgatcagattcttttttgttatggatttcccgcttga

SEQ ID NO: 19372 - DNA, 137 bp, Zea Mays
acagaaggatttcactaacaactaataatatacgtgcatcaacttagttaaacatcatgaactctatattatgttctaggctaggagcatgaaattaattccattagaactttgaagcatgcccattgacaaatttt

SEQ ID NO: 19373 - DNA, 1171 bp, Zea Mays
tgaggtactcctttcagacgaagtaccgactttaccttgtcctggactttataaatggggccatctcttcttccagctttaccaccagggtttatttagggaggagcttgcacgcatctacactgctgaaattgtatctgcagtcgcccacctccatgccaacggtattatgcatagagatttgaagcctgagaacatcttactggatgctgatggtcatgctatgctgactgactttggtgtggcaaaagaatttgatgaaaacactagatcaaactcaatgtgtggtactgttgaatacatggccccagaaattgttcagggccgaggtcatgataaggctgcagactggtggagtgtgggagtccttctttttgaaatgcttacaggaaagccaccgtttgttggtggaaacagagacaagattcagcagaagatagtaaaggagaagataaagctgccaacatatttatctagtgaagttcactcaatgttgaaaggattattgcacaaagaagctggcagacggctgggaagcggaccaggcggcagtgacgaaatcaagaaccacaagtggttcaagtctgtaaactggaagaggctggaggcccggcagatcgagccaagcttccggccgaatgttgctggcaagacctgcattgcgaactttgacgagtgctggacgaacatgcccgtgcttgattctccggtggccagccctgttgcggccaacagcaactttgtggggttcagttatgtgaggcccgcaccgttcctccagaagccgagtccacttggctaaagaactacttccgtgatctgatatctaacccggagttcaaataactatctttgagtctgaatcctatgtatttcttcaagacattagtgatgggaatctaaccttattgttgtgttgtgggtaggccagccaagcgcctattgcttgagaacaacagcttggcaagtgacaatgtgcaatattgccagaagttcttattgaagcgccataataattctcctacgtcaatttgaacttgctcggtctattcaattgtggccttataatgcaatttcattctctggtctagttgccgtttttgtttccgtattccttatttatccattcgtggttctttggcctagttttggcgtagcagctataattcgg

SEQ ID NO: 19374 - DNA, 1087 bp, Zea Mays
  misc_feature (1086)..(1087): n is a, c, g, or t
cgcgagagcaggttacttgcgggctgcgccgcgccgcgccgcgccgcctttgccccttcccttccatcgcgacttgcgaggggagagtttgggactcgctgcccctcttcgcttcccaccaacctcctcttctccgtcgattccattcgattcgaattcgcgatcgcccaccaccgcaccaagcgccaaaccctgaccctgatcctaatcctgtgcgccacaatggcggagtcggagaagggcgccgccgcaaccaccaccgccgccgccgagcctgggtccggcccgccgcacgaggacgaggatgcgctgctcgcccgtgcccacactgtcatctccaggatcctcgaccgcgagctcgaccccaaccctcgcctcctccacaccctcgccaccatgtgcgagctccacgaagccaggtggggaagaaattatcagaactgatccgtgataccagtgcccagacatctgcgggcgatagtggaagatggcaagctgagctgacccaagtggcaattgaactaattgcggtattgacaaattctggaaaagaaacaacattagcagcaactgatgctgctgctccagcattgaggcgcatcgagcgagctgggatagctgctgctactcctatctcctaccactcaagggaactgatgcagttgatacatgaacatcttcttgggtctggtttcactgccactgctgccatgctgcagaaggaggctggccttgcacctttaccattgatagcagcggtgcttcctgcccaccaagttgctgccctggaagcatcatctgttcagcaacagtggccctctggacgtgttcagggatttctctcagataaaataaatatgtcgacagatcaatctgcccatagatcagattctatcccgccttcatctaagaaaaaagcactgaccttctcatccagtttctcacgaagagctcagactccacattctgtttctggcagcagaacaagcaacatccttaaaagtcctgtacctattgcggctgatactagagatgcagaaatgttgaataagacaccactgtcgctgccacttaagaggaagcttnn

SEQ ID NO: 19375 - DNA, 1846 bp, Zea Mays
gccctattttctacttacttctgagaagcggtatctctgattttcgccggtagcaagcaacacaagatgtgcatatgtttgtaccagtaaaattatctgatgtacgcaaagaagtgcagtgtcccatatgcttaggcatcatccggaagactagaacagttatggaatgcctgcaccggttctgtagggaatgcattgacaaatccatgcgacttgggaacaacgagtgtccagcgtgccgcacacactgtgcgagccggcgttctttgagagatgatccgaattatgatgccttgattgcagctctatatccagatattgacaaatatgaagaagaggagctagcgttcaacgaagaggagaatgaccgcaacaagcagattcaagcatccattgctgaggcttttcggaaacaatcagaagttattgggcggaagtctactgccaaagctactgctgctgcatttgtaagaagatcacgccgtaacattcggcctaatgggcagaatacctatttccgtggccgaggaaaagccagttctgatgacgttgctctggcctgttctgaagatgaagaggatggaaacggtgaaagctgtagcaaagaggcctcatctgcggaggagagttccccagagaaaaagcagaaacgactgccaaaatggccaacaccgcgttcttcacctgcccgagcatgcaatgatgaggttgcttctgatgaaaaggatgatgtaggaatatccagggaaaatttcagcacatctcctctacgagcatggggaaagaatggcactcgcagtcagactcgccacagtagcttcagtggttcaaatggcaggatggtcaagggtgggcgcatgatcaagttggttgagtgcttgcgaaattctgacgacaatgaaggcgagcgtgatgtacatctttgtctgcttccacttgatggacaaacggcaccaaatctggagaagtcatatctgtgttgcggcccaactctgtccatcaaacaactttgtcagtttgtcgccagtcagacatctcacaaagatgaagaagttgagatgtatgcgctgaagccttcttgtagcaagcctgtcagcactaatacatgcggtcctgacaaagcaaggctcgcaggggaggaacgcctttcagacttgcgctcctcgttcacatttcctaatggggttctggagctggtgtatgccataaaagtggctaactagatgctgagtgaaggcccattagttcaaatggaagtgttttttgtttatacatatcttcatcgtgatcccttgacgaaatgacaggtttgggctcttgaatacaacttggaaggaaaaaaaacgttgggggagactagttgttgtataattagcttgtgagatgtgagataaatgtgcgtacgttgtcaacgaatagtttcagaagagtcagattggcttccacagttcacctcgctgcaacccaaaatctggtctccactgccggcatttgggggaatttctcggttgggtgaaggctgagttatttcctcgagtggtcaagttgttttacttccacagttcaccagtttcagcttttgtaattcatcggttcatattcttcaggcggcagccagtccgtgctgcgaacgacttcccagatacatgtaacataaatcttataaaaaatatatatgtaacagaaattactttttttgtcgtttctttgtacggcacaaggacagtcgtatttaaccttgagctggttataccagagtgttactattttattatatctgtacttatacaaactacaaggcaatgtattcttcctttgcgaatgttgttagcaggcagtttcttcc

SEQ ID NO: 19376 - DNA, 2308 bp, Zea Mays
tttatttgcaggccagatttctttgtctgacttgtggaagcctcttacaactattgtacaaggctgctgtattgaagatgtctgagttccttgacctagagctacaagatgggataaggatgccctggaatgttattccaggcacaaaacaggagactgtgaactgtgtgattcctgtttccgctatctacacacctttgaaaccaatttctgatatccctgttcttccatattcacctcttcgctgtcgcatgtgtcgttccatcctcaaccctttctccattgttgactatgttgctaagatttgggtctgttcattctgctttcaacgcaaccagttccctcaacactactcttcgatctcagaaaataatctccctgcggaactctttcctcagtacaccaccgtcgagtacatatcttcaactgaaactggtcctatagttccaccggttttcatttttgttgtagatacttgcatgattgaagaagaaattggttatttgaagtctgcactggcacaagctgttgagctattgccagataattctcttgttggattcattacgttcgggacgtatgtgcaggttcatgaattgggttttggcttattgccaaaatcatatgtattcaaaggaacaaaggaggtcaccaaggagcaaatattggaacaaatgtgcttttttgcggggaagaaaatgcctaccacaggcgtgattgctggtaccagagatggcctttcatctgagagcatctctagatttctgctgcctgcttctgaatgcgagtttgtattgaactcagttatagaagaaatacaaaaggacccttggcctgttccagctgatcagcgtgcatctaggtgcactggagctgccttaagtgttgcagccaatctccttggggtttgtgttcctggatcaggtgctaggataatggcatttgttggtggtccatctacggagggccctggtcctattgtatccaaatccttatcagagcccattcgttcacacaaagaccttgataaagactcggcaccactctatgataaagctgttaagttttatgatcaaattgcaaagcagcttgtgcaccaagggcatgtgctggatttgtttgcttgtgcagttgaccaggttggagtcgctgaaatgaaggttgcgattgagaagactggaggaattgttgtccttgctgaaagttttggtcattctgttttcaaagactcacttctccgcatctttcagtcaacagatgacaaccttggtttatcattcaatggtattcttgaaattaactgttcaaaggatgtaaaggttcaaggcatcattggaccctgttcttccctggagaagaaaagtcctttgtcttccgacactgttattggtcaaggaaacactagcgcttggaagatgtgcggccttgacaggaagacatcactttgcttggtatatgatattgcaaaaaaagatggcccagattcaattgctcaatcagcaaacaatcagttctacttccagttcttaacctactatcagcataatgagggtcagatgagattaagatcgaccacaatctccagaagatgggtctctggtgacaaccatgtggagtagctggctttgatcaagaagctgcagctgcagtcatggcacgcttggtgtcatttaagatggaaactgaggttgattttgacccagtaaggtggcttgatcgagctttgatacgtttatgctcaaaatttggagattatcagaaggagacaccctcatcgttcagtttatccccacggctatcaatatttccccaatttatatttaatttgaggcgttctcagtttgttcaggtttttaataacagtcctgatgaaactgcgtattttaggatgatgttggacagagagaatgtaaccaatacagttgtgatgattcaaccttcacttatatcctattcatttcaatcagggccagagccagttctcttggatgcaactgcaattgcttctgacaagatccttttattggactcttattttactgttgtcatattccatggggtaaccattgcgcagtggcgaaatgctggctaccaagatcaagaaggtcacgaggtttttgctcagttgttaaaagctccacatgaggaagctaatttaataataaaggagcgatttcctgtaccccgtttggtagtctgtgatcaatatggatctcaggctcgatttttactggcgaagttaaatccatcagtgacatataactcggacaatccctcccctggtggagacgtcatattcacagatgat

SEQ ID NO: 19377 - DNA, 1216 bp, Zea Mays
cacgcagcagcagacgggacgcaacccaagtagtacgcaagccgaacagattttccccatttccctgctctcctcgccctccccacgaaattccctgcttgatcacgccgatttcagctgtttgcaacacttcctcttgttcgatttttattaactcgtcgactccacctcaccgaggtcaaatctttggcatcggattctgttctgtgctgccttttggtttcggcgccgaattcagttccgattccgaacagttagcagctttaagcggctttcagttcgagcgcgtcggaggcatccctgattccggcgatgtcgttgcccgcgatttccatgtacaccagtccgccgggcgcggtctactcttcggagttcgacccagcctcccgtggctcgtcgccttgcaccaccgctgcgcccccgccgccggccgcctcgtaccgcttgccctccggcggcggcggcctgtcttgcctcttctcctcgccggcagctgcggccgcgccgccccgcgccccggctcacgacgacctcggtgcgctgtggcacaacagatccgacgacctgagcgtccccgccgacgggggcgggtactcctactcgcactcccactcgtcttcgcagctaaagcggagggacctgcatcaccaccaccacagccccgtgtcggtgttccaggggccgtccacctcttcaccatcccggagcccaccggcttcttggctcgccgcccgcgaccgcgaccgcctcttcgctggcttcgtgcgcaacgctctcggttcctgcgttgactacgcgccgcccaccagccctcgcccggaggtcggcgccagcgagctcgcgttcgagctcgacgagaacctcgcggaggctagccctgcctgcgagccatacgcccaagagctgctcgcgagtgcccaggatcgccaccgcatcttccacgaggagctggtcgtgaaggccttcttggaggccgagaaggctcaccgtggccagacgcgcgcgagtggtgacccctacttgcaacattgtgtggagactgctgtgctacttgccaaggtcggcgcaaatgcaacggttgtctctgctgggcttctgcatgacaccattgatgattcattcattgactatgaccacatcttccatatgtttggtgctggggttgccgatctcgtcgaagggctccattgtccttaaggttttttgtctgatcagt

SEQ ID NO: 19378 - DNA, 1752 bp, Zea Mays
gcccaaaattacggcccctctctttctctctctgactacctccgtatgaggcagcttgtgctcgttcgagactgagacaccccaacacgcctccctcagcgcagatctcgccgccgccgagatgctccgccgcggcgtgcttcttctcgcggccatcctcatcgccgtcgcacactcgcccctcgcgtacgcctcggaggccgagcacaagtataaaacagaagaacctgttaagctatgggtaaacaagattcattggttctccatcttcaattcattcatgatggttattttcttgactggtttagtgtcaatgatattgatgaggacactaagaaatgattatgcaaaatatgctcgtgaagatgatgatctggaatcacttgagcgagatgttaatgaagaatccgggtggaagcttgtccatggtgatgtgttccggcctcctcgtggccaggtgtttctttctgccctagttggtattggcactcagctggcggctcttatcctgcttgtgattgtgttggccattgttgtcatgttatatgttgggcgaggagctatcatcacaaccttcattgtgtgctacgctcttacatctttcatctctggatatgttagtggtggtctctattcaaggaatggtggaaaaaactggataaaggctatgatccttacagcatcactttttccattcttgtgtttctcgattggattgttgttaaacactattgctatcttctaccgatcattagcagctataccatttggcacaatggttgtcatgtttattctttgggctttcatctccttcccgttggttctattggggactgtagttggtagaaattggagtggtgctcccaacaacccgtgtcgtgtgaaaacgatcccgcgcccaattcctgaaaagaagtggtaccttacaccttctgttatttcactgatgggtggacttctccccttcggcagcatcttcattgagatgtacttcgtattcacttccttctggaactacaaggtgtactacgtctatggtttcatgttgctggtgtttgtcatcctcataatagtcaccatatgtgtcactattgtgggtacttatttcttgttgaatgctgagaactatcattggcaatggacatcattcttctctgctgcttctaccgccttgtatgtgtatctatactctatatactattatcatgtgaagacaaagatgtcaggatttttccagacaagcttctactttggttacaccttgatgttctgtcttggattgggaatactttgcggtgctgttggatatttgggctccaccctatttgtgaggaggatctacagaaatatcaaatgcgactaaacttggtctaggctgctagcatgtcttgtcacaatatggtgcagagtaataccttgagcttctgattgacttcggaaattacacaggaggttgctctccctttcgttactcttttcatcttttttggcctatcttcctggacgtgtggaactgcccatgataaatgtatacctagttggagaattagtcagagtactggaaagtacatgtaggtttttttggtgcggcctctctcggtcaattgtaggagtacattgatgaatattactgcagtgcagattccagtgggctagattcgcccctcttatgactgtttctaactacgtaccctctccgtcccaaattagaattcgttttagggaattaatgaattcatacaatagttgatc

SEQ ID NO: 19379 - DNA, 572 bp, Zea Mays
cagagattgactgtcccactgtttgagacgtcaaggcaacaacgcaaggagcgtaagaagcgacagaagtggttctggggttcagttgggcttgcagtcacccttggtgccacggccattgcctggtcttatctaccttcatcgcagccccgagctagtgcagattcaaatagtaccgtcagtgactagagctaggatgaagatactccctccgtttctttttatttgtcgctggatagtgtaaaattgcactatccagcgacaaataaaaagaaacggagggagtatctcatttcagaagcctaacaaacctctaactatactcctagaggagaaaaaaaaaacgttgtataagttctcttttggtgatcgtccatgatcgctacaatcttcatttgctgctttgtatgtaaaaatgttgggtgggccatctccgtcaggattggctccattccaatcaccgtaaatctctgcatagatgattcatggttgagcaaataatacaaagggatgtggatatggttagtaatccatgcccaccgaccccactcgaggagttgattttgccaacc

SEQ ID NO: 19380 - DNA, 4009 bp, Zea Mays
gcgcaaacaagttcgcatcgccatctcgctcgcagggaggagaggggagtctctaaccctaaccctacccgcccctgtcgccatagccatggctgccggcggagagctctccccctcccccgtgccccccgcatcccccatcaagcattctcgctcacccgacgatgcccagcccgacgcatccccgaagcgtcgcaagcgccaccatcaccgccgccaccaccaccaccgtcggcaccgtcacgccgattccccggtacccgtggcagccgacgaagaggtagaggagggggagatactcgaagatgccaccgccgcctctgccatggaggtcgatgctgagtccgccgccccagaggctttccttgctccggagcactttggtaatggtgctgatacagactcaaacacagatgcaaccaagatgcaagctcctgctctgcctacccttccatcctcagaagatggaaggaggtcacttcatgatgcccctgagtctgaaagaggagatattctttcaagtgatgttgaggacaacaaaggacatgaacgaaggcaaagacaaaaccgttctaaatctccaaagtctagaagggagaaggaaaggaggcacaaagatgaccatcacacttcatcttcaaaagattatcattccagaaatcactctagaacatctccttactcaaggcatcaaagtgaagctcattcgagagatctgtacttgagatatagagagaaaggtgattacactaatggttctcgtgcaaatcttagggatggttctgatcatgagagcaatgatcggaatgggaagtctggcagacatacgactaggacccacgggagtgaaagagaaaggagcagcagccatggtattcatgatagacatggtgacaggtacagtgacagacgtgccagccaggaaaggcatagagacgataggatatatagagacaaaatcgattcattagaagctgctcctaggcacagagaaagaagcaggagtcatagtagatcggatccaagggaaaatacacgtcttcgtgatcaaagcagggagagggaaagacggagtggtagttcaaggcatagggatcatgacagcaagagggatacaagtaaagatcggcatagagaatctgacagggttaacagtgcacatgaaagggatagagggagagaggctagggacagggaatggcatagggtcaagggaagtgaaactcatagagctaaggaaggacgggacaaagttagcgataatgataggcacagggattcaacacgctcaaaatatagcgtgtctgatggttacaaagagaggacaagatctggggagaaaggtagagatgctgaccataaaaaccggaagtttgaagaaatgaaggaaaattctctcaaggaggaagatgaagaggagtaccaagagaaaatagaacagcagttagcaatgcaggaggaagacgaccctgaaaaaatcaaagaggaagcaaggaggaggaaagaagctatcatggcaaagtacaggcagcagcaatcgcagaaagaggatatggaatctaaaccaagtggcaatgatgaagaagtaagagcaatggatggaaacgaagctatacatcagaaagatgatatcgatagcagctttatgggcaatgtcgaagctgaaaataagcatgattcttcagaggtatttgatggcaagacaggctttaatgtgggaaggtctcctgctcacaattatgcttcaactagcacgggagcattcactgatgagaggacaataggtgtttcaggtcttggagagggttctcccaagagtgagagatcagcagacatgttttgtgatgacattttcggagaatcacccaccggaattagaaaattgggaaaggatgatggtttgcatattgagagaaatgctcttcatgacaactgggatgatgcagatgggtactacacttatcggttcggagaattgctggatggccgttatgaaatcatagcagcacatgggaagggtgtgttctcaacagttgtgcgggcaaaagatcttaaagcgagtaaggatgatcctgaagaagttgccatcaaaattattcgcaacaatgagacaatgtacaaggctggtaagcaagaggtttcaatattggaaaaacttgcaagtgcggaccgtgaggacaaacgccactgcgtgcggtttatttctagtttcatgtaccggaaccatctttgcttagtttttgaatctctcaatatgaatcttcgtgaggttttaaagaaatttggtcgtaatattgggcttaaactgactgcggtgagggcatattcaaagcagcttttcatcgccctgaagcacctgaagaactgcaaagttttgcactgtgatataaaaccagataatatgctggtgaatgaggctaagaatgtgctcaaggtatgtgattttggcaacgctatgcttgctggtatgaatgaagttacgccttatcttgtcagccgtttctatcgggcacctgagatcgttcttgggttagcctatgatcaccctttagacatgtggtcagttggttgctgtctatatgagctttataccgggaaagtcttatttcctggtccatcaaacaatgccatgcttcggcttcatatggaattgaagggtccattccctaagaagatgcttcgaaagggtgcctttactatgcaacacttcgatcaagatctcaattttcatgctaccgaggaggatcctgtgacaaaaacggctgtgagaaggttaattttgaacattaaaccaaaggatgttggttctttgtttccgaactttcctggcgaggatccaaaaatgctatccagttttaaggatcttcttgataaaatatttacattagatccagaaaagaggataactgtatcgcaagcacttagccatccatttatcactggcaagtgacacaagatgacgattcctcttgaccttgaacttagcatcttcactgtaaaatacattttgggttcctcttgtctaatcatcaacgtttctgtcttgtgtcctgggagctctgagaaaaagtacatggatgaagcacggaacttcggaagagatggctatctgcagaccttgttgcatgcacttatcatttggatatattctgttgcttgattctgccagggcctctgctatgtgcacattttatatgcttaagggccaacataagaaggtcctgggatggaggtcgctggaccctctactcacttgccatggtaaatcctctcaactctggatgtcttccatttttttcttattaaagagttttcacctaatagttgattatgggttggtacatcaaggctgattcagttcaattttagcaacctttactgtttattaggtgcatttccaatattttgtgttttggttagtaatttcttttgccagtttcatcaaacattgatcttctaaacaatttgtttgttttttgtgtgcctgccaaacttcttcatattaatgggttatgagattcaagtactatatgctttacatgaaagctgtattctctaccattcagcgaaatgtgcgaaacatgagaaacatttttgtcttgtgtaacaatttgagagctgattattacattgactgctagttataaaaccgtgggcttattacttttactttgtatctagatttgctgcatgtagataaacactggtgggaagctgaaattttactgtgtaattagtattcaagtgcaggagagatgcgtatcatttcattgagtaaagaggctacagggaaagaaatccaacatagcccgcccctcctccctctaagcacacaagacctgaaaggttctcagcctgttagcaccatggaatgctcttatttgtgattgcctgcagcaccgccatcataacacttgcaatgatgccattaaaaagacatcatactgatgtttccagatctctcaagccaccaagatacaatggagaacctcaagctcaaacatggaaa

SEQ ID NO: 19381 - DNA, 4544 bp, Zea Mays
cacttcgcttctcactcgatctgctttgctctgctctcggtctcggctgcttgcctgcttcgagtcgtcgccggcgggagcagagaacccacccgcacggtgcgatgtcgttgaccgcggcccccgtggccttcatcggcctggacgagctcagcgttgagctagctgcctccttcctccgctccggcgcttgcgtccgctccttcacccccgaggcggaacggtcgccttctgcggcgctcgcggagttgaatggcctcctccagtgcgcgagcccagtggaagccgcgcgagatgctgcgctggtcgtcgtgctaagcgatgctggtggggttgacgagttgttcttcggggttgaggggatcgcgaaagggttatgcgcgggttctattgtattgattcattcgacattgctgcctagtcagttggagaagctggagcaggagcttacagatcagaagaaggatgtcttccttctggatggatacattttcactggtttatctgatgaattaaagcaacagattattattgttgcatctgggagacaggacatagcagaaaaagctagcaaatttttccatggtctatacaaaaccatttattttgctgaaggtgaattctgcactagcagaaaaattaggatggtgaatgatttgctggagggcattcattttgttgcgtctattgaagcaatgtatcttggtgttcgagctgggattcatccaacaattatttatgacataatatcgaatgctgctgggagctcgaggatatttgtggagttagttccaaaacttctgagtgaagatcctttgctgattgattttctaaaatcaacaaggaaaaaagcaagccatgtgatggatatgtcaaaatcagtaacatttccactgccacttctgggtgttgcctatcaacaattggtacatggttcatcagcagtaactggagatggatctgcctcaccgctgaaggtttgggaagcatcgtttggagtaaatattgtagatgctgctggcgaacaaatttatgatgcaagcaaattagctgatcagcttgttgcggaatctaaagcagcgaagcggattggcttcattggtcttggagctatgggctttggaatggcatctcatttgctgaaatcagggttctgtgttgttgcttatgatgtctacaagccaacaatggccaggtttgctgatttgggtggatcaacaaaaggttctcctgaggaaatagcaaaagatgtggaaatacttattatcatggttgcaaatgagtctcaagctgatagtgttctttttggaaacgctggtgctgtaccagttttatctgctggaacatctgtcatcctttcttctacagtttctcctggatttgtgatccacctcaacagaagattagaagctgaatgccgacagataaagttggttgatgctccagtatctggtggtgtcaaaagggcggcggatgggacactaactataatgacttcagggacagatgaagccctccattgcactggttctgttctatcagcgctgagtgaaaagttgtatgtaatcaaaggaggatgtggagctgcaagttctgttaagatggtcaaccaacttcttgctggggttcatatagcttcagcagctgaagccatgtcatttgctgctcgactaaatttgagaacgagaagagtcttcgaaattatgcaacatgcaaggggttattcatggatgtttggaaatcgtgtgccacacatgctcgataatgattatacaccctattctgcagtggatatatttgtcaaggatcttggtatagtatcttgtgaaagttccaattcgaggatcccagttcacgtctctagtatagcccaccagctgtttatttcaggatctgcttctgggtggggtagatatgacgatgctgccgttgtgaaggtctatgagacattaactggtgtaaaagttgaagggaaggctccgatgctcagtaaagaagatgttcttcagtctcttccatctgaatggccagaagatccaattgataatcttgtacctattgcatctcatagtagcaaaaagtttcttgtagttttagatgatgatccaactgggactcaaacagttcatgatatagaagttttaactgaatggcctgttgaagcccttgttgaacagttcctcaagctaccaacttgcttttttattttgacaaactctcgttccatgactgctgataaggccatgctgctagtacaaactatctgtaaaaatcttaaagctgcggcagagaaggtccctggtgttagttatacaatagtcttgagaggtgattcaactctacgtggtcatttcccagaggtgagatggatgcttggataatctgtccattttttcttcaaggtgggagatacactattaacgacatccactacgtcgcagactctgatagattaattcctgctggtgaaaccgaatttgccaaggatgcagtttttggctataaatcttccaatctcagacagtgggttgaagagaagaccaaaggacgggttttggagaaccaagtttcaacaatttccataactctcttgcgtaaacaaggaccaactgctgtttgtgagcatctctgtagcttggagaagggctctgtgtgcatcgtcaatgctgctagtgacagggacatggctgtctttgcttctggaatgatccaggctgaattgaaaggaaagcgatttctctgccgcacagctgcaagttttgtgagcgcaaggattgggatcaagccaaagccacctatctgtccaaatgaccttggcttaaaaagagctttaactggaggcctcataattgttggttcatatgtgccaaaaactacaaagcaggttgatgagttgcgatcacagttcgggcaatctcttcgagtcatagaggtgtctgtcgagatggtttcaatgaaatcaatggaggacagagaccaagaaatcagacgaattgttgaactagggaatgcttatatacaatccagaaaagacactctaattctcaccagccgccaactcattactggaaaaactcctgaagaaagcttagaaattaattataaagtgagttcagcactagtggagattgtgagaaggattgatagtaaacctcattatatcattgcaaagggaggaatcacttcatctgatattgctacaaaggcgctggaagctaaacgtgccaaagtcatgggacaagcattagctggtgtacccttgtggcagcttggtcctgagagtagatttcctggggtcccttacattgtttttcctggtaatgttggtgataacagtgctcttgctaaagtggtgaaaagttgggcttccccatctagaagttctacaaaagaaattcttcttaatgcggagaagggcggttatgctgttggtgctttcaatgtgtataaccttgagggaattgaagctgttgttgcagcagcagaggctgaaaagagtcctgctattcttcagattcatccgagtgctctaaagcaaggtggagtcccactggtagcatgttgcattgctgctgcagaacaatccagtgtgcctatcagtgtccactatgaccacggcatttccaagtcagacttgcttcaagctcttgaagcgggatttgattcagtcatggtggatggttctcatctaactttaggggataacatcttatacacaaagagcatatcttccttggctcatgcaaaaggtttacttgtggaagctgagttgggtaggctctcaggctctgaagatggcatgaccgttgaagaatatgaagcaagatttactgatgttgcccaggctgaggaatttattgatgagacaagcattgatgctctagcagtttgcattggaaatgttcatggaaaatatccacctagtggaccaaaccttaaattcgacttgctaaaggaccttcgtgcattaacattaaagaaaggagttagcttggtcctccatggagcatctggtctatctcatgagctcgtaaaggagtgcatagacttgggcgtgagaaaattcaatgtgaacaccgaggttcggaacagctacctggcgtccctcagaaagccagaaaaggacttgattcaggtgatggcgtctgctaaagaggcaatgaaagctgttgtagcagagaagctgcgcctgtttggatcgtgtgggaaagcctgagcgaagtacttgcgttgcgccggcaacatgcagtacaagaccgactgcatcatcgggttcgtgatgctgctgctactgtgcagttgcttacagttacagctcattgcgttgaacagctgaagtggttattgtactttgcagtgtagcgcaactaaggctaattcataaatcgtaataatgtatgtatgctgccccgctgtaaaaatgctccgtcgttaataaatgccatcgcgcttgctgtgcctttgtttacatttttattcgcctctcgagtgttctaacatgcaatctcagttgtcctatttagccctagtttgaaaactcaaat

SEQ ID NO: 19382 - DNA, 2130 bp, Zea Mays
gttccttccgtcgcaaatgtgctgtgtccctcttcatcctcctcctttctcagtcacatacacgggagctgtccacgccggccttcccccctaccaccacataaatccgcgcctactccgcaccatcttctctgctcaccacgcgcctccaagggcctcgcctcgcccgcccgccggtccaggatgggcgcacggatttagctgatcccgtcgctgctcgcgcccgatctcgcggcgccccgccccatcagctccgcgagatgatctgagccccgcgatctggtggagaaatggagccgccgccggatctgaacacccacctgccgccgcggaagcgcctgctcgccgggctcaggacggcagccaccgccgccgagccgctaccgccgccgcccgcccacgccgacctcgccgcccgcctccgcgagatggcgctcgccgccaacgcgtcggcgtcctcgcccgaggagacgatcgaggcggcgagggcggccgcgcaggccgccgcggacgccgccgttgctgcgcgcgccgtggccgccgagaaggccgccgtcgccgcgaaggctagggcggccgcgcgcgccgccatggagttcatcgactccttctctaccagggccggcgcgtccaggaacgggagcggcctccagttcaagatcaggtctaggaagaagcatgtccaggtcaagatgctgtacaggcccaatggaaccctagggccagcggaggctcccaagcctaggagacgcaagcagtcggatgaagaggtcccgcacaatttgcaccgcctcatgaatagctcgccgaggatctctcacgctggactgcccaagaggcctcgcacgaccgctgctggggatgccaaaaatggagctgtagcacccggtggaggtaacggcgctggtgtttgtaacggttcttcagttcagaactcagtctttgattattctgtcccaagcacgccgatgcagaagtcactctttgattctgtccctggtacaccggtgcagagatcagttttcgattctgttccgagcacaccaatgcagagatcagtttttgactctgttccgagcacgccgacgcagaaaccattcttcgactcctttccaagcacaccaatgcagagatcactgttcgattctgggccaagcagagcagaatctcctaccgccagcagcatgtatggcaaagagcagaagggattcttcgattcttcagtcccgagtactccaatgtacaactcaagcttcacgccaaggtatagcgaagcaggagacgattcattcgacaccatgtcccaatacagctcatttggcatgcacgagagcaattcctttggacagcgcgacagcttatcgagattcgattctttcagcagcaatgctgacaacggtgggaatgacacttttgcgaggtttgattctttccgcagcacttcagatcagggtgggggcaacagcttcatgaggtacgattccatgaacagcagcagcgaccatgacgggatcggcacgtttgcgaggtttgattcgatgaagagcagtaactacaacagccggggctactcgttcgacgacgaggacccctttgggacagggccgtttaaatcgacagagaccacgagccacagcccgacaaaacatgggacggacacatggagcgcgttttgacaggcaggggctgtatcatatattcaatagaggtcatgcgcttgtgcaccttactgcagatatatacacacgtacaggggcaagacaattttttgttgtgtgcatgggcctctgctccaacacacctggggaaggggaagggatgggacggggatttgcttgtgtgcttgctttgtgtttaattttgtacgtaggctgggaacatgtgtttggtgggatgatgatgatgatgctgctgctgctgcttataaactcaacattctttataccttgtattgtacaagtgcatgtacaagatgtgagtcgacccgtttgggttgagtaactctcgagtgttttttcttccatggtgtagcgttttcctgtttctccagaattttctgagcaatgtacagacagacaaacttttgtgtgaaacacctgttgtccaatactgagacccttccattcgttg

SEQ ID NO: 19383 - DNA, 109 bp, Zea Mays
tctctcgcctgtatttagccttggacggagttttaccgcccgatttgggctgcattcccaaacaactccgactcgtttgacggcgcctcgtggtgcgacagggtccggg

SEQ ID NO: 19384 - DNA, 996 bp, Zea Mays
ggatctggatccggactcgactcgaagccaaaaccaactcgctctctctcgctctcgcacacggtagacggtacgtcccgctcccgcgcgcggccggccacgcgactggtcaggcgcgaggcgagcgttcacgcgccccgcgcctgctggttgcggacggaggggatatccacgatcagagcggggccagccagcgcgggcgctgcggtcgacgacggtctctgtgcgcgcgcgatggtggccgcggcgagggtggtgtcgggggtgaaggcggagggtctgctgcggggcgcgtgcgcggcgctggccgcggcggccgcgctgctggtggggctcagcacgcagacggagacggtgctgctcgtccggaagaaggccaccgtcaaggacgtccaggcgctctgggtgctggcgatggcggccgcgtcggcggcgggctaccacctgctgcagctgctcaagtgcctctacctcggccgccgccgcagcggcagggctctggcctggacgtgcctcctgctcgacaaggcgtgcgcgtacgcgacgttcgcgacgacggtggcggcggcgcaggcgtgcgtggtggcgctggacggcgcgcacgcgctgcagtggaccaagctctgcaacatctacacccgcttctgcgagcaggtcgccggcagcctcgcgctcgggatgctggccgccgtcggcaccgccgtcctctccgccgcctccgcgcgcaacgtcttccgcctctactactgctcgtcgcacgcctcgccgccgccgcgggagacctgcgccgcgcactagacctctcggcccagggcgtcagctgggccgggcgtgcttctccggagaatctaacactgggccgtcacgaagcgcaggtgcaggcccagatgaaggatgattgagttgtgctctagagtgtactcctcctacctgtgtttccctctctcttttgtctttgtctctctaagttgcaggcagatggagcaatctacaagt

SEQ ID NO: 19385 - DNA, 1951 bp, Zea Mays
tccccgttctcgtcggagatccaccgggatccaatttcgcgcgcgggtcgggctcgccttctcctccagtctccacctccaccagcgctcgaggtcgacggacgctactcgcagcagttcttctttgcggtgcggccgagaagaagctaaggctcaggcatgagcttccgggaccaggagagtggcggggaggatgggggcaggacgtcctccgcctccgacctgcggaagccgctcatcaacaccgggagctggtaccgcatgccgccggcgggtggcgtgatgggctcgcggcaatctagcctcatggagcgattgggctcctctgcgttctctctccgcgacgtcgctatctcggcgacgctctgcacgctcattgtcgcgctaggtcccatccagttcggtttcacatgtggctactcctcacccacgcaggacgccatcattgctgaccttggcctctccctctctgagttctccctcttcggttcattatctaatgtaggggcgatggtaggcgccatctccagtgggcaacttgcagagtatatcggccgcaaggggtctctcatgatcgctgcgattccaaacataattgggtggctcgcgatatcatttgcaaaagattcctctttcttgtttatgggtcggctgctagaaggatttggagttggtgtaatatcgtatacagtaccggtttatattgcagaaatcgctcctcaagatcagaggggagctcttggttctgtcaatcagctctccgtcacgattggtatattgcttgcctatttgtttggcatgtttgttccctggagaattcttgctgttctaggcattttaccctgttcaatcctgattcctggactgttctttgtccctgaatccccaaggtggttggcaaaaatggggaagatggaggattttgaatattcattgcaagttctgcgaggatttcagacagatatcacagcagaagtaaatgaaataaagagatcattagcatcatcgaggaggaggacaaccataaggttcgctgatatcaaacagaagagatacagtgttccccttgtggttggaatcggtctccttgtcctgcagcagctaagtggtgtcaatggcattctattttatgctgcgagcatcttcaaagctgctggtattacaaacagtaatctagcaacatttggtttaggggctgttcaggtgattgctactggagtgacaacctggttgactgacaaagctggtcgaaggcttcttctcattatttccaccacaggaatggtcattactcttgttattgtttctgtgtcattttttgtgaaggacaacatagctgctggttcgcacttatactctgtaatgagtatgctttcactggctggacttgtggcatttgtgattgcattttctcttggcttgggagcgattccgtggatcattatgtctgagatccttcctgttaacatcaagagccttgctggaagtgttgcgaccctggcgaactggctgacagcatgggccattacaatgacggcaagcctgatgttgaactggagcagtggaggaacctttgctatctacgccgtcgtgtctaccatggccctcattttcgtgtgcttgtgggtgcctgagaccaagggaagaacgctagaggaaatcgccttctcattccgctgacacgtcgtcatgatctagggatcttgcggccattctgttgcttggatgtaccaccatcttcagtgttcataccaatgtacattgtacaatatgacgacgacgccatagcagaaaggcaagtgggtttatgtttgtacgatggactagtagcagaaagcactcgaacccctgtacgggttgcggaggagagcaatttatttgctgtattttcctggttcaataccggacacgttagaattttgaaaaataaaaatctgagcaaatttatcaa

SEQ ID NO: 19386 - DNA, 1822 bp, Zea Mays
ggcacctcccgtttcctgccctcttcttgttcttcttcttttttccctaccctccgccgttgctctgcaaggcacgtcctgcacgcgccagagctaggcgataaactggaaaggagcgcgcagcgcaggcttcgggctcctgtctccgccgcggcgtcctctcgctttttttttttttgcttcttgggaagcacaaaggctcaggtctttcaggacttgcaggctctgcgcagcgcgatctgattgtgaatgaaacctgcaaaggaatagtccatcacaatgctaaggttgcttcccgactgaccacattgcgcttgttttagcctctggttatctcgtctggaaaaaaaaacccagacatctgaccgggtcagacgatacaacccatatacgtacgtcgagtcctcagagttcaattctacctggaccatcgcacccatcttggcccagagtacttccgcgccgcgctacgaacgaggccatccgccgccacacgccgtcggccatgccgcagaggtcggaggcgggcactgctggggagggcgacgaggagcagcggctgcgggctgctctgcgtcacctgcaggcggaggcgggggtgctggagcgcctggtatacaagcaccggaaccagcaccgcggcgccgcctatttccaatacctcctcaaggtgaggagggacctgaagcttctgctcggcgccggcctcgctgaggttctcaacgccgtgttcccagttctcgcatgccgcaagccggccaacacgatcctcgtccccaacaagcagtctaagaagaaacctgttgcaaaccacagccatcaccagaggcttttgggtgtagcccgcttgttatcccagatgtctgaacctgttatgaaggcagcaattcagataacatttttacttgctagatcattcttcgttgatctttgcacggctgtgctttctttgcttgcacgagtaagggtcctgatccaacagatgttacttgatgttgtgtctatatacaataaggtcactgatcttactgaaaggaagcaggctgttaagattagcatcagtggagtgcaggctttcagagagtactacccctctatgaatgatgcatgtacagttctggagtgtgtatggataaaagataaattcgttttgcatgaaaaggttaaagatatctctcaggaaacccaagttgagaatcagaagtgctgcggtcctgaatctacagtccagtatgaaacaattgcactgattagtgaagattctacatagcggaagtcctcctggcactggagtacttgcacacgctcggtatcatataccgcgatctcaagcctgaaaatgtccttgtccgggaggacgggcacatcatgctctcggacttcgacctctctcttcgttgtgctgtcagtccaacactgatcaggtcctcaaaccctgacgcagaactgcagaagcgctcaggaagagcagccaaggctactgtgttgagccagcctgtgttgagccgtcctgcatcactcaaccgtcgtgtgcagccccaaccacctgcttcggcccacgcctgttctcctccaagtccaagaccaagagagaccggtaaccaaaaccagaagttgccaccccgatcagcccttggcctgagctcatagcggagcccagcgatgcacggtcgatgtcgtttgtgtgctatattgtttttccgttggtagatttttttgaggggtacttttacactttcttaaagttcacatctgtaattcagcaagtcctgattgtactgatctcctgcaatgcctttgcaaaacattgtcattttttttg

SEQ ID NO: 19387 - DNA, 680 bp, Zea Mays
cgcagataaagaaatagctccaaaaactgtcaatgatgtgaagctcatcaatgttggaaggatactggagaatagcagaactcttgctgaatctcgtgtcccagttggagaagttcctggaagtgtgattacaatgcatgttgttgtgcggcctccccaatctaaaaacagtgagaagcaacagtcaaactctccgaagccaaacagatgtggatgcacgatattgtgacgttgatgcaagtagcaatgtgtatatcggtgtccacagagatcaatcacaagttcatttagcaattgattcaatctattcttcacaacctaagcctagagttggtgttacggccagtcacatctggcttgagaaattgatgcttgcggtcgtgttcgagtgtgcaaggagttcacagggtcctggtaaaaccctgaaatcggtgtggactcaaggaattggatgtttgctattctgtaatgtgtggagacagtgataccagaagtgagttgctgcatagttacatcggagacaattcttttttcgtaactcggttgcgtgtatcagtatttctgttttgtaatagaaaaaggttgaccggctattgttggcataaagtggtaaggaatgggggtcccctaaggaatgctgtggtttgacatgggaagatgaaagtgaataatgagtacca

SEQ ID NO: 19388 - DNA, 3405 bp, Zea Mays
tcggggtggatgtgcatgctctgcctaggttgaacatgtcataagggaagaaaagttcatgcaagcatatgacttgattgaagtatactgtgaacttatagtagcacgtctgtccattattgactcacagaagacttgcccgattgatctgaaggaggcagtagccagtgttatatttgcatcaatgcggtgttcagatgtcacagaactagcagatgttcggaagcatttcaaaagcaagtacggaaaagagtttgaagcagcagcccttgaagtgcgacctgacagtggtgtaaatcgtctgataattgagaagctgtcagcaggagcacctgatgtgcagactaaaatcaaaacattgagctcgatagcagaggagcacaacatcaaatgggagccaaaagcgtttgaggagaaactgcaacaaccaactgaaggtcatctgtatggttctgcaacatattctggaggaaatacttcaactatgggatcatctacttctagcatatcaacaccacagcctacatattcaggtgttagtgcggcacctgtggactcagccactatccatgtgccagcaaataaaactgcatatggcagtgccaattctaatactttttcgaaagaaagcattcataatagttccagtgcatcagtacctcctatctcccaacatgggccgtctgcttactcttcagcacaggttcctggttctaacaatatctcacatggaaatccaggaggtccaccttaccctcaatacagcgcaacagtcccagacgcagtatccaggaatgaagatagcaatcagaatagggaaagaaaacctttggtgactggtgccaattggaatgtggaattcaaggatgcaacatctgctgctcaggcagcagcagagtctgcagagatggctagcattgctgctagagctgctgctgaacttgctagtcgtggaaactattctggagataaaggcactggagcctatgattcagccgcatacagtagcaaaaacacagtgaggaagcaacgggcggaacatgtagtgaaggatgagagtttccatgaccagagttcaggtgttaatgatccaagcgagatgccaagtaactcaagaaatttttttggaggaacagaaacatcccatgttgatagtgagaatatatcgacagccccatatcaacagttccatgcctacaatccagacagccatccatatgtttatgaaatgccaactgaaccacctcgtgctcattcacctgacccacgttttgatgatttatatgagagggaaagtgacattggaagatctgaagttgatccgtttgattttcctagagaaaacttccaagatactgcatctgttgggcacaatttcaaggatgtggaaatcaggacacctagctacgatcaagaaagcacagatgactactatggtaattttaattcttcacatgatacattggcccatggcagcagcaccactgcttgggataagcaaaacgacaaagctcaagacaactcttcacctgttgtttttgatcaatatgattctgatgttgaacaagagaatttgttggacacattctcctcaaagcatactgaacaactacctgctcccggagatcatatgagattctcaactgcagattggagtgaacagcataccagtgaatctccatccaagcagagaacgtcagccctattttccagaacagaaacacaactatctgataatttaggaacaaacaaaagtgatattccttcacctcattcttatcataacatgcgtcctgcttttgattcagatggtggtagctctgatgaggaaatagccacaaccacgcatgcagtgcctttaaggtcacattcaggaggatctgcttcgtctgtcctgaacaaaggtggtggacctgatgcttcacccatatttgattattcaggagcacatgcagtgaggaacttgaaccgtgtgcaaagcagagattctgatctttcggaagaagagacagatttagataaatttaaaggttcatccttcgccagagcaaatgagcagcagctgttgccttctgccatacgtacttcagcaacttctgatgataaggaagatgacatcagcctgaactttggtaagttaacgcctggactaagaaacaaacccaggcaacccccaccatacaccaaagtttccagggagagcattctgcctaagcagtccttgcctaaggtttctgctggcactgaagagtcagtcgattctgaagagaatactacattcaaacaggatagaagtagtccccaaagctcattttcagccaggacttcttcaggtaaagactacgacagtggactttatgaaaggaaccgaagtgttggaacacactgggaagcaaaatcaaccatagcaagaaattcctctggtttagatgatgctgagaagttatctgatctacctactaatataagtcttccaacaactaagagttctgaacgctggaattcgagtaaagtgccttatcatgaaaaaccaggtattggaacacgccgagaagtgagatcaacactggctagaaattattttgattcagatgacagtgaagaagaactagagcaacagcagattcctcagtcgaagcaatctggagtgctgatacagtcacgcaggacacgggaggtgacatcagacacaaagagagatggtcgtttccaaaccggagctcagtatggtgatgaaactgagagtgtgacaagtaagacacaagtccatcaaggattcaacagctcaagtactgaacggagtgaaaggagggatccaagtgtgtaccccagggttgcagtacagcgctcttcgtctaaagctgagcagattgaatctccgatggagagagggaagccacaaggagctgaaatgagaagcaccttatttcgaggaaatgaagaggacacagaaacctcatctggaactccaaaagaaagcacccccaaaacaccccctgcacatgttcatcccaagcttccaacagactatgattctttcgccgcacattttaggtctcttcgaacaaaccggccttaggtttacacgacatatagagtttggagtttcagttgaattaagtcatatatacgatactatgatacgttttatggaggttgagttgagatttgtacattatagcaacactgttttctggacactatcgtgctgtgctagtttgggcgtacaattcttttgttctcttgtatcctcatatactcaatagaatcatattgtaaagactttaatttcctgttagtgattattaataagcacggcatgttggcatatgtatagaacatgcggggttctttcattccattgtaacgggatctgctacactcatgctatgagattgtttcatg

SEQ ID NO: 19389 - DNA, 1979 bp, Zea Mays
cgagcattgcattgtactggttaaaaaaacgacttaacgtaggcgcggagatcggagcgtggtgcggcgtgccacgggcgtgcggagctctcctccgtggatctccgcgcagtcgtggcggcagcggcgtgcgtccctgcttgcgccttcctcgtgaggccgtatacatggacgcgaaggacatactagggcttccgaagacccccttctcgtcctcccaggagaagaaatcgcggccgcccaaggagccgcagcgcaagcctgatggcgtctcgcgcgaggtctatgccctcaccggaggggtgggaatgcccccgctcatgccgaccattgaggcatcgcacctgaagaggcggcctgctgcggagaaagagaaggtagcatggcagtggttacctttcacgtcatccgcacgaactgataaccttcaactctatcactgggttagagttgttaatggtattcagccaactggggattatcagtttgcaaaatataacaagagggcggatgttcttaaatatacggatgaagagtatgagaagtatttagttgaccctgattggagcaaggaagaaacagatcaactatttgaattatgtgaacgatttgaccttcgcttcataataatagcagataagtttccaactgctcgcagtgtggaagatctgaaaagtccttactattctgcttctcgggctcttctaattcatagagctaggtcattcgaagatgtttctgggaatccccttgtgaaggatgcctatgatgctgctcatgagactgagaggaagcgtgcattatcagcacttctctcccaaacaaagcagcaagaacgaaaggacgccgagactttagcagaagcaaaacgtatcatggaatctcgtgctgctagcaaaaatgttgatgtagctgtaatgcctccgaactctgataatgctatggtacctgttgatggtgtatctccttcaagcagtactcatccatctttagcacatccaaatacatcagctaacatcttgatacctaattcactacgaacgcttcgagtgtatttgagaacccatgcgcttgaccaaatggtccaagcagtaggtgcttcagctggccttagagttatcaaaagggttgatcagacactacaagagctagcggtgaatttgaagcctaaggtcccaacgaaagcagtttgcatagagcatattgaactgcggaatgagctactcacattgcttaacctacaaaagcagctgcaaaataaagaggctgaagtttcagctaaccgggaaagttccttcacagaggcaccaagcacacctaagcgttctaatagggacattgatcggcccttcatccctgatacaagtgggtttacaggtgaaagagcaggcaaacgggatcacaagcggaagtccactggaagatttatagatgcgcctccatcaccaccccagtcgaagcggcctagaaaattgaagggatctgactgatagtgctgttcaaatgtcaggatgaaaactctagtcaaacaaccaagcacttgcagtcttacagtagagatgaactagtagaacctaataggtcagcaacggcatcaatggaaatccgttgggctggccagtcatgcaggaaccgactttcgctgcttgccctgacttcgggccatatgctgggtggaccggttttggatttataatgtatctatctattattgtcatgtaatgttacacagataactgagaggtcgaaatcgtcacttttcagcagatttctgaattctgagtatgggagaccggtaagcccgacaattccgtttttgctcctgtccaaccagcacggtcaatcggttcacccaatagacgttcaacaaacaggctttgagagcacgctagtgcctgtttgttcaccatgccttcccggaagctcatctgacagctcctttactttgtttgggtactctattatttatcttaatctat

SEQ ID NO: 19390 - DNA, 1453 bp, Zea Mays
gcggcgagcagcagcgggggcggagtgtgctgtggagcggcccgcgtgcggcgagggtcgtccctacaagccgtctgacagttcataagaggtacccttttgggaaggtcctcaccatggatctatcccaggcactgacctcatccagtgatgatgaaaccagggcacttggtacattgcttgatatgttcagcagttccttttcacttgatgatatagctgatgcatatatcaaagcaaatggcgatgttaacaaagctggagatttcttatacgaccttcaacattcattgcctcataccaaagatgttgagtcaagtgtcgaggctaacctttcccatactgacaaggcagttgaagaaaactgtatggacaattcaagccaaccaagaactcttctccgtactgagcaggcagttgaagaaaatcatttcgagaattcagatcacacaaaaatgcctgaaaatctgcataagtctagtgctgcatttggtactgtctccagcatgttaagaaaagagtctatcagggctacaacaacagcgagtagagcatcaaaaaaaggcaaacctcttagggttgaactgccagagtacatgcgggatgattttaaggtgacatctgatgaatctgactctgcaccgaggagagagactttgaataacagggatgttgaggagtttctgttttgcatgcttggtgaaggatttaagctcagtaaagaattgatccatgaagttctaggcagctgtggatatgatattaagaaggctgctgatgctttcagggagggtaaccagaaagaagtcgattatcttatacaggaaggcaagcgctattatcagatggctcgactcgctgatgagaaatctgctagggagattatcaagcccagggaaacagagtcaaaaaatgaattttgtcttgatctgcgcaaacaagatgcaggaaatcttttgattacctgagagttattattggtattgacgacagcagtttcaagatgggacaaagaagaagaaaggtgatgaagtatgtggaaaagaattcactccagtggactgaagaagaacctcgctctgggaacatcctcatccggattaatcaggtggaaaatcggcagggataggttcatgtatacaaaggtggcgtgacacaaggtgacagaagatggatcgtagatcttaataagtgccgttttgaatcaaggtgatgttctttcggcacagggagtcatgtaattgctgcattgctgacgtaatgtaaccagcaatgcagcaattaactcgaaacgtctgcaatgtatgcacaaaaagaataccattcatggcaacttgaacatgtggacaatggtttctgatatctcaagggtcctttgcagtttcgaaactggtttcttctttctaggttcataattcagaaactgattttcaatttagcatcttgaacgcag

SEQ ID NO: 19391 - DNA, 1079 bp, Zea Mays
gtttttgttataaaagtcgccacagaagcgttgagatggcacattgcgcgcaatgaccacctaaacctaaccagaaatcgtaaggtaggtgggacggtggtgcttaggaactgtctaggtggctgaggtcatcaccttctaaagcagcacagtcaatcatttgaaataacccgctgaacccttataagccctacctgtgttctcgcatgtttacacatcctcgaactattctacttatatattataagtcatttattttaaataatatgtatctgattttatgtatattttcctgagtaatctcatcatgtgtataaactgtgtctatcatctctgcagactatatgccgctgcaacctcttgaagacgagaatgacactgttatcagtttcttatatcctctagaacccccgatagtagatgagtttgactgggaaatggacgattacgaggattttgctgatcagaaagttcaagaaggtggcctgccagaggatgagaaagaaaaattcaaggagttcctgaaggagaaggttagagaaaggaagagagagcttaaacaggctaaagaagccaggaggaaagctattgatgatatggatcctaaggtgaaagaggcattcgagaacatcaaattttacaaattttatcctgtgaaaaccccagacacgcctgatgtaaacaatgtaaaggcgaggtacatcaacagatactacaggaatgcccattatctgatgtgatggctttccttatcgcacgtgcttggcgagcttgtcacttgagaggagttgatatgaaaacagttcggtgttgtactagagttggccccagtttttcaccccccctgggcatcttttgctctccggtgtatacaatcctgaggatagattattgtgtagcactaagaggggcaaagtagtttgagactaaacaaatcattaaggaacaatttgttcccttttcatcatctattttgtggttgttttaacatctacaacgcgcaagctgtacaacacgatgtgatgtgcagagaatggtgaggcaatcatagacactctggtgaagcgacatgatacaga

SEQ ID NO: 19392 - DNA, 926 bp, Zea Mays
ccgggtctcgcagacggaccacggtccacgggttgtaaaaccaaccaggctaccagccgagggcgagtgcgtcgctttcctcctccaggcctccaccctcgctctcgctcgctcgtcgtcaccaccacaccagcgaggcgcggcgcggcgggcttcgctcgtcgaggaagctaaggataaggaggtccatcaaagtccctgcagtaagcaacaaggttgcagacatcccagctgatgagttctcgtggaggaagtatgggcagaagccaatcaagggatccccacatcctaggggttactacaagtgtagcagcgtgagaggctgccccgcgaggaagcacgtcgagaggtgcgtggacgacccttcgatgctgatcgttacctacgagggtgaccacaaccacagccgagttctagcccagccagcctgatctctctggctatcgattattcaagatcgcttccgtagtagtcaccctccctctctagagaagggaggacagcaacagcaacaatgagagcctagtgtctgtacataagttctgcttctaacagttggaggagtgattcggttagctagctctttcagaagaatcagtggtgacagaagggaacttatcgcgtcgatggatggaagaaagggagagagagagttcctcatcagatactcatactctatttttgtagcttcggtttatctctcttttttgttcatcctgtgctagggcccatcctgtgggttgtatgtctgggaatggtgttgggggggattggatcggagaagaaggcatgtggcaggaaattgcctgtaaaagtggctacacctaggaacagaatgtactatcgtcttcagcagtggtacagccttgttgacgcagtggtttttgtttggtctgtcgcgtgttgtttgttagcgcgagtgtgac

SEQ ID NO: 19393 - DNA, 709 bp, Zea Mays
gttttcctcaagaaactctacatgactggggtgacgatgagtgtgtcaagatattgaagaattgcaagcaagccatatctccacgggatgcaggtgggaaggtaataatcttggacgtggtagttggatataaacagtcaaacataaagcatcaagagacacaagttatgtttgatttgtatatgatggcggttaacggagttgagcgtgatgagcaagagtggaagaagatcttcattgaagctggattcaaagactacaaaattctacccgtcatcggtgacgtatcagtcatcatcgaggtctatccttgaatgctttgtgaacaaagacctccataataaactgaagaccatgaaggtgttgatagtatattatgattttttatttgtattgtacacttgattctttgagtatttgtaatgacaagctgagtaattgtgtttttttgttaatgtggtcttatagtgcacattacacatgatgtatgatatgttacttgccctcattttggtgtagatgtgtgttggtcaagtagtcgataggcaactctattatgcttggcatcaataagacaacatggaagcctatgatttgttgtgtcatggcaacaaggaaaattgtggtcttggtgaaaaatgcatatgttttcagaatgtaacagaaaaggcaaaatcacatcgacttgtgcacaaatgacttctgcaag

SEQ ID NO: 19394 - DNA, 317 bp, Zea Mays
catcctaaggaacacaaacaatcctaaggatggaagtacttaaatcgggacttgggctaggaacatgtgatgttctacccaggttaattaaggattggatgcgtatgtaggcctatatgatcaaggactatcttaactgaccacatgccctggatatgggacagggtaagcttgaacccggctattccatacgtgaaaagacaaccgcgcactgggcgtgggagatggtgggagtagcgtgtaccctcctggctagaggctggatggaggagtactgtgctcccgggtagcgcggaccggttcacgttgtggaggat

SEQ ID NO: 19395 - DNA, 6330 bp, Zea Mays
ccgcatccggcccccggcctccggtctccagtcgcccccggcttctggtctctgcccccgcagtggtcgtgccccactgggctgaggaggaacagcttccggttcctggtgctgatcttgaacggcgcggcgctcaggtcggaggaggcgttgccggcgagactgaggtcgcagaaggagccataccaaaaaaaatcgtcctccgctactgcctacgtgacaaaaaatcctgcggagacctggcagaagtcgcccggtctcccccgcctctggcttggcctcgccatttacgctacaccttgagatttttattcactccatccaatctggccctgcgtttctagattttgcgagggaagacgccaattaggagcctgagggtgcgacggcctagggtttgtagctactggtgtcgtcgcggcctgtggaggcggtaggggacagcgacatctgcagccatggacgacagcgagctccatgaagaggagaacccaaccaatagtgccgtagatgacgatgacgacgaggattatgaggagcctggtggaggaaatcacttattggggtttatgttcggcaatgtagatgattctggtgatttagatgctgactatcttgatgaggatgcaaaggaacacctttttgcactggcagataagcttggtccatctctcaaagacattgacctaatgaagtcttctccagcaccaactgatccttccgaacaagactatgatgagaaggcagaagatgctgttgattatgaagatattgatgaagaatatgatggacctgaagttgaggcaactacagaggaagacaatgtgttgtcaaaaaaggattacttctcttcatctacagtgtatgcatcagtcaacagtacagtttcagtgtttgacgatgaaaactacgatgaggaagaagaaccacccaatgataatgagcctcctggtgatagtgctgcccaaaatttatcttcagtttctatcgagcaggcagatacgacaacctcaagcgataaccttgccatggaaaagattggcttgttatcacatccagaggaaaacatggactttgaatatgaagatttggagaatgaaaagggcactggggaaggccagcttgagcctgaaagtgcaacttcccttcctgttttatgcatagaggatgggaacgctatcctgagattctctgaaatttttggtatccaagagcctgtaagaaaagtgaagacagatcaccacaaacgaccagtggataaagagcttcagatcgcaaatgttgctgacaatgttgaagaagatgaggaactaattctccggagcactatgcaaaatttctcaactttgaagcacattcatgtgaatgaagattttgttgagagtgacagtgatgagtctatttctgatgtcactttaaggctaaaggattcatgtctttcagaacaaccaatgaaagatgtgcatatggatattcgtattgtccagcgatctccaacttgtcctgatttttatccacttgagcattatgattgggaaagtgatatcatttggaacaattcaccagcaactgatcagcaggcttatgcaaaaatctgtgaatctgaagagagtgaggacactcatggtgaagaccagggtaaggattatggccaggcctccaggtgttgggatgtacagagtaaaaccaatggttctccagtaattaaagagactttttgttgtacagaaatgcctgctccagctaactactgcccccctgggaaaagttaccctccattgacaaacgaagataacttagatcacataatgccaaataacttagatgatgcagttaaaattgacaccatggtgcgtttaaataaccttagtgtactaaacagggaattattagaaggatcatggttggacaacataatttgggatcctaatgaggttaccccaaagcctaaactgatctttgacctcaaagatgatcatatgctttttgagatcctagatgaaaagaatgtggaccatctccagtctcatgctcgtgctatgattgttagccagtcaactaagacttcaacaccaacagttgacaattttggcgatcaaccaaagccattgagtggcaggttcaacatctccaatgacaagttttattcaaataggaagactccacaacaagctaaatctcatactaaaaaacgcgctttaatgggcataaaggtggtgcattctgctccagctcataagctgcaaaccatgaagccagtgttgagcaataaggaaattgcaaactttcatagaccaagagctaagtggtacccacatgaaaataaaattgcctctcagttacaaggacctgcttgtagccatgggaggatggctgttttacttatgtcattgggaggaaaaggagtcaagattctggtcaatgctgaggacactccggtctctgtcaaattaaaagcatcaaagaagttcgaattgaagccttctgagaagatcaaattgttctgttctgggaaagagcttcaggatgacatctcgttagcaatgcaaaatgtgcgaccaaactccattgtgcatgctgttcgcactgaagtgtacctatggccaaaagcacagaaattacctggtgaggacaagcctctacgccctcctggggctttcaggaaaaaaactgacttgtctatcaaggatggacatgtttttttaatggaatattgtgaagagagacctttgcttctctcgaatgcaggaatgggagcccgtctctgtacatattaccagaaaactacccctactgatcagacagctgcatcactgcgaaacaacagtgatggactgggcacagtgcttgcaattgatcctgctgataaatccccttttctaggagagatacattctgggtcccaccaatcttgtcttgaaacaaacatgtatagatcacctgtatttccccataaggttgcaccaactgattacttattagttcgttcagccaaaggggctctttccctccgtcgcattgacaagctatatgttgttggccaacaagaacctcatatggaagtcttttcaccagggactaagaacatgcaaaattatcttctgaaccgagttcttgcatatgtttatcgtgagtttcgtgctagagagaggcctgatgctattcctcagattcgagctgacgagttacccatacaaagtcctctgacagaagccatagtgaaaaaacgattgaagcattgtgcagatttgaagaaaggaccaaaggggcattttttctggacacagagacctgatttccgggttccatcagaagaagaactgaggagattattgacgccagaaagtgtttgctgttatgaaagtatgcaagctggtttgtatcgtctcaagcgcttaggaattctgaagcttactcagcctgttggattggcttctgccatgaatcagcttcctgatgaggctattgagcttgctgctgcatcacatatcgagagggaactgcaaatcactagctggaatcttacaagtaatttcgtcgcttgtactaatcaggacagagaaaatatagaaagattagaaatcactggtgttggagatccatctggtcgtgggttaggattcagctatgtgcgagtagcaccaaaagcacctgcctccaattcagtgctcaagaagaagtcagctgctgcaaagggtaccactgtaactggcactgatgctgatctccgcagattgagcatggatgcagcccgtgagttgctgctaaaatttggcgtacctgaagagcaaattgataaattaacaaggtggcatcggatcgctatggtgaggaagctttcaagtgagcaagctgcatcgggaattactatcgatgaaattcctgttagtaagtttgcacgtggacaaaggatgtcttttctgcaacttcagcagcaaactagggagaaatgtcaggaaatttgggacagacaagttcagtcactttcagctttagatggtgatgacaatgccagtgacacagaagctcacagtgatctagactcatttgctggggatcttgagaacttgctagacgcagaagaatttgatgatgaggatactagtacagcagacttgagaattgacaaagcagatggaatgagaggacttaaaatgagaaggtgctctacgcaagcccaaattaacaaggaaattgaagatgatgaaacagaggcttctctggcaaagaaactacttgaagacgatggcaatgatgtgaagaggaaaaaacagcctgtggaattgacaaattgtggcacctctttagttgccaataaaatgaagcagagtaagactgggcaaacgatcaaatcatctggttatgctggtgcattaaccccaaaggagaacacaccaagagaaggaaaagaggttgaaaattcttttgttgagggtggtttgtcctcaaaactaaaaccaaagatggcactcgatgtaaatgagactgttctagttaaaaagaaaagtgttccaggaaaggatggacctaaggaaaagaaacagggtgcaagaggggatagtcttgtttgtggagcctgtagtcaggttgggcatatgcggactaacaaactgtgccctaagtatcgggaggatccagaaatgtcagaaatggatgctaattcagttaagcccaactctatggatataaaccatttgcaagcaaagacacctaaaaggttgataacaaaagtttcctctgaagttactgaaactgaagggccagaaggtattgagaagacaaaatctgtcccagtaaagttcaaagtaggggcacctgataaatccttggagaggaacatgtcagtctccgtttcactcgtttctgataaacgtgtcatggatgttacagacagtagatctaccggaaaggtaaacaagatagtgatacctaataagatgaagtctgatgatttccctcctgacactccaaagccatctgttgtatttcggcctcctgctgaagaaaaggatgtacctcgcaaaaagatcaccatcaagcagcctaaaggcatagaccagcaaagacatgttgaatctaggagtgttcaggaacccaccagaaagacaagaaaaattgtagaattgtcgagttttgaggataaaagtagagaggatgatcattgggttggtggggaacccagccaggtgaattcctcacatgggaggaggctgggtctggaaggaaaaataagcaaagccacaatggaaaatgaaagatcctggagagattttgaggagcgaagagaaatgccacaagcaaggctctttgatgctacgatatatgcatcaagggaggaagatcatctaaaggcaaaaaagaaaaacaagaaaaagaaaaaacatgaattcaaagatgatgacttacttgatcacaggccatacagaaatgacaggagggtacctgaaagacatcgagcactaaaacgatctagtccagctcctgtggttggatatgcatcatctgccaagcgtcgcagaggaggagaggttgagctctccaacatattggaaaaagtagttgatcacttgcggggtttgagtggatcactgctgtttttaaaaccagtgacaaagaaagaagcttctgattaccttgatatcatacggtacccaatggatcttggtaccatcagggacaaggtgagaaagatggtgtacagaaacagggatgaattcaggcacgacgtagcacagatacaactcaatgcacacatatacaacgacactcgctatcctcacatccctccgcttgctgacgagctcatggaggtctgcgaccatctgctttacgaaaacgcagatctgctcaccgaggcggaagatgctatcgagtagcaatataaaaagctagatttagcatttggatcttgctatatcctaacatagatgatgtatctatcttctgatctgtaggaggggaaaaggttgtacattttttgggcctagcagcaatctacatgtgatcccgaatccagccagcttctgttggtattgtgttgagaggtagtggaagtacaaaatgtctaggttagccactcaatggcctcatgttgtaaaaatgtagaatgtaatcatgtccatatacatggcatatatcggtccaataatccgattgtgttgcagtatttgatatgatatggaatggcgtttcaattgcagcgtgaatcaagcacgggcctgtgtgcacactttcttccaacttgaaccttatttcttatctggaggtgtatatgcattgaaccctgaaccgcaaagctgatggacaattttttttccaaacatgttgaag

SEQ ID NO: 19396 - DNA, 2260 bp, Zea Mays
gataaaatgaaaaaagttgggaaagaaacccagaaccctttccccccaacctagccggcacccaccaatggcgaggccgccgcctgcggcgcccgccccggtgaggcttcgtctgcttttcgaaaacagtcgcctcctccagcgtgtacagagggatgaaggccttcggcgctgctggcttctccttagcccggagctcgacaccgtcgccgaccttgccgctcatgtcgcagcccgtttccgcctccgccgcacctgcccgcgcggcgttgtgctctcgatggacgggtttaccttgccaccattcgagtcaacctgcatcttcagggataacgatattataagggttaaacaaaaatcctgcaggaagcaggatcaaagggatggccgtaaacaccaagaagaagaggcacatgatgatcaccagcttgaagaaaatgtcactgctagccatagcatagaaaacaatggtacaagctctaagaggaagtggaacgatggggttgcagaaatacctgagagctcaaagggaaaaaggccgaaggtgaaaaattctggaaaacatatagattgcagcaaggaagaacagcgtggatctaaaaagttgaagttgtcagttattgatattgaagataagaaagcaactctaaatcatgaaactaccactaccttggtggatcagcaaaaagcagaggggaacaataaaaccgaattgaaatgtgaggcaaatgtggcagactacaatgctcaaagtgatacaaaaaagttggagagtagaagtgctcgtcgcaagaaaaattaaaaggctgatgagacagagaggaaaattacaaacagataagaatgtgcatgaagattcactaatagctcctgattttccatcatcaagcaatcaagatggcttgcctgtcccatcaagcaatcaaaatggatcacatgttcatttttcaagcatcaaagcagatgaggaagaatctgatacatcggatgagattgtcccagttgtggttcggcctggtcacattcgctttgaaccagcaggtggagaacccgacaaatcgccagcacaggagttacagggcacgttccaatggagtgcaacaatgagcaaaaagaagggccagaagtggggaatgaatagctcaaacaagaaaaatgctgatatcggctatcatgcaggaatagctggatgcagcacagaagttaacaatcatgtcatggacattaaggttactgaaaatggcttttgtgctgtcaataatcgaaggaacaatgaaggcagtaacattgagatgtccagtgtgcaaaatattgctaatgaagaaaagtctagcgaacctttcaattttgagagcttgtaccccctaacacgacttccaaaggagggagatctgattgcctaccgattggttgagctgtcttccatgttgtgtccggagctctcttcgtaccgtgtgggaaaagttctggtatatgatcccgtatcattgcgtatcattctcgtacccgttcaagagtatccaatcaccaccgaggaaaaagaaaacaaggacgagtcagatatgcttgtggatttgtcaccgtacaaggaagatggctccttggagatcgagtactcttcacttgttgatgtaaggctactgaagggtatcgaaacatgcaacgaagttggatcagcaccggccggaaggccagttaccttgcacaaaaacgaaggcaatattgagagccagaaatcacccttggtgtcaaacaacactaaaggcgaagaacgcgcactaggaaagtcagaaagtacggtctgggaaaaaaatggtgagcccagtgataaggttgatcttctgcaaaatggctgggcaacatggaaacaaaatgctagtacgtcagcttggtcttacagagccctcaggagcagcgcccttggcccgacgatggcaattctacgagggaagaacagccagagtaaaccacccaatcgaaagaactccaagtgatgcctaagtatttaataacttcagtgatacctatgtaatccaaagttgatccgatcctttggagaaggtcaagcaagtcgatgtagttggtcttatatatgtaactgcaattactgccctgcctattttgaaaattccaaagtggtgactgatgcaaagggaactttttagaccagtcaagactcgttactatgcaatgtcagcttatttaatgttgatgaaaattcactaaaattgatctttattgtacatcactcagatcttca

SEQ ID NO: 19397 - DNA, 1937 bp, Zea Mays
cctctcttctctttttccacgggagggatgacgatgccgctcgcgcgcgacgccgcatcactccctcgccactcgcgcgcccgggctccttcccgccacgctcacgacgatgccgtccccgacgtcctatcttctcctgaatccctccaaaccctcctccttccgccgactctcggccccgcgcctgagccggttccatgtctcctgcgacgcgccacggggcggcgggaggcgcgaggtcatccccgccggtgccagcaaggccaagaaacagatcgtattcttcgacgccgccccgccggtgtcccaggagggtggaggcgccgtgaagaaggcggggagcgagaagcttacccaggtgggcagcggcaacgcagcgctggcgttgttgaggagggcaaccaagatgacactctcggtgctgtccaacctcccgctcgctatctccgagatgttcgccattgccgccctcatggctctaggaacggtgattgaccagggagaggcacccagctactacttcgagaagttccccgaggacaacccggtcttcggcttcatcacgtggaggtggatcctcacccccgggttcgaccacatgttctcctcgccagtcttcctcggcctccttgcgctcctcgcgacgtccctcatggcttgcacctacacgacccagctccccatggtcaaggtcgcaagaagatggtcgttcacacattccggagaaagaatacggaagcaggaatttgcggactcgcttccccaagcatccattcaggatttgggagtcatcttgatgggtgctggatatgaggtattcaccaagggtccatctttgtatgctttcaaagggctagctggtcggtatgcgcctatcggcgtgcacttggcgatgctcttcatcatggctggtgccacgctaagtgcgacaggaagctttaagggctccgtggatgtgcctcaagggctgaactttgttataggagatgtcatgaaacctagaggggtcctctctgttgcgccggatgttttcaatactgaagtccatgtcaaccggttctacatggagtactatgacagtggagaggtctcacaattctacagtgacctctccctattcaaccttgatggtaaagaagtgatgagaaagactatcaaagtgaacgatcccctgagatacggaggggtcaccatctatcagacagactggggattttcagcattgcaagtgaagaaaaatggtgaaggccctttcaatttggcgatggcccccttgaaactgaatggggataagaagctctttggaacattcttgccacttgaagattcagactcgtcgaatccaaatgtcaaaggaatatcaatgcttgctcgagatttgcagtctattgtgttgtatgatcaagatggtaagtttgtaggggtccgtcggccaagctcaaaactgcctattgagatcaatggcaatgaaatactcattgaagatgctattggtagtactggactggatcttaagactgatccaggagttcctattgtttatgctggttttggtgcgcttatgttaacgacctgcattagctatctttcacactctcagatatgggcattgcaagatggaagtacagtggtcgttggaggaaagacaaatcgagccaaacttgaattttctgaagagatgaaccggctacttgataaagtaccagagctgatcagcgccgatgagaatctattagataccaaatcgacagccacatgaaacatttttttgtgtgtttttgtttgggattgctgaagatgcagtagctctgttcagtgaccagcatgagttgcctcctactgatcattttttagacaatgggacaaggttcccgcctctgcgtttccgcacatagcgtccacatattccaaaatcgggttaccggcttgcttgaaag

SEQ ID NO: 19398 - DNA, 8591 bp, Zea Mays
cctcgtcaagctcatcatccggttccgcctatcggatctcgccgtgcaccgccgctgattccacccaccgctccgcacgcatttgcaccccaactcctcacagatctccccagatctacgcgctccacgcactgccattttcccgctccgattcttcccccactccagtctacgccgcgcttaatcgcccgcccgctgtttcacttccgttgaccgattcccgctcgcatttccacaccctgcgcttggttcggaattggtctcgatggagtaaagtccttgcaatggcggaagacgcgcacgagttgttcgattcctccccgccgcgggaggagggctccgacgagcagctcgcggccgtaccgctcggcgacgaggcaggcgacgccaccggcaccggcgctcctcccaccgtcatgatcagctcgcgtgccgctgtcgccgccgctgagctcctgccttatctccccgaagacgacgagccgtcgccgcgcactcgaacagccttaggtctgcacgccgccctccgcgcctgcactcgcaatagagccatgtgttcttccgcgggcctcctggctgccctcctcgcgtccgcagagaagctgttcgtcgaaatggatcagggtagcagatgggacgggacgccactgcttcaatgcattcagatgttgggtgggcactcgcttagtgtgaaagacctgcattcctggcttgatttggttagaaagtcacttggaacgagctgggccacaccacttatgctagcgcttgagaaggccatgggcagcatggaagcaaaaggtcctgctgtgacatttgagtttgacggggagagctctggtctgcttggcccaggtgacagcaggtggcccttcttaaatggatatgggtttgccacttggatatacatagaatcattctcggatacccttagcacagcaacagctgcggcagccattgctgctgctgcagcggcaacatctggaaaatcatcagcaatgtcagctgctgcggcagccagtgcccttgcaggagaaggaacaacacacatgcctcggcttttcagctttctctcttcagataaccagggtgtggaagcttactttcatggccagttcttggtggtggagagtgtgggtggtaggggtaagaaagcttctttgcacttcacatatgcgttcaagcctcagtgctggtattttgttgggttggagcacacaaacaagcatagtttgctcggaaaggatgacagcgaattgagtctgtatgttgatggaagcctgtatgagagccgtccttttgagtttccacgtatctctaaaccacttgcattttgctgcatcgggacaaatccaccaccaactattgccggcctgcagaggcgccggcggcaatgcccattatttgctgaaatggggcctgtctacatcttcaaagaaccaattgggccagacagaatgagacgtctagcatcccgaggaggagacacactgcccagttttggaaatggcgcaggcttgccatggaaggcaactaatgaccaagttaagagtatggctgaagagagcttttcactcaacaatgggatagggggaagcttgcatcttctttaccatcctagtcttctcactgggcggttttgtccagacgcctcaccttctggttcatcaggcactcatcgaaggcccgcagaggttctcggattggttcatgtctcacctcgtgtgcgaccttcagaatctttatgggccttagcttatgggggtccaatggctttacttccactaaccataggcaatgtacatgtggacagccttgagcctgcacctggggacttgccatcgtctcttgctaccatttccctttctgccccagttttcaggattatttcccaagctattcaacaccctggaaataatgaagaattatgccgtacatttgcaccagagcttttatcacgtgttttacattatgtgttgcaggctcttccaaagttggaaagtggggaagaggttctgactgatgaggagcttgttgctgccattgtatctttgtgccagtctcaaagaaataatcatgaacttaaagtgcagcttttcagcagcttgctgttggacctaaatctatggagttcatgcaattatggtttacagaaggagcttctgtcgtctctcgcagacatggtatttacagagtctgcttgcatgcgagatgccaaggcgatgcaaatgcttcttgatggctgcagaaggtgttactgggtaattcaggaaccggattcaatcgataactttgcatttactggaacaaagcgatctttgggggaagtgaatgctctagtggatgaacttttggttgttattgaactactgctaggagcagcatcttcaacagcagcagcagatgatgtccgctgtttgattggatttattgttgactgcccacagcctaatcaggttgcaagggtgttgcacctcatatataggttgaatgtacaacctaacatttctagggccaacttattttctcaatccttcatcactagtggtggtgtggaagcactacttgttcttttacaacgggaagctaaagtgggtaacaaaaatattttggatcattctagtgcaagtgaaaataatgtgcccaaggatggaagttccaacagaaaagctgatagtgctgacacaagttgtcaggttgatgaaaatcaatcagctgaacgtcatgaaactgtcttccatgaagaagccattgaacatgaagccacaaatgcaaaagatatgctggactcaaatattggaagtaaagtgcctggttctgagaatgggctcttgaagaacctgggtggcattagcttctcaattacttctgataatgtccggaataatgtttacaatgttgacaaaggtgatggaattgttgttggcattattcacattcttggtgctctaattgggtcaggtcacctgaaatttgattctggagctggaagtgcaaatatacctggtggtagtcagaccacacttaatgaagaaggaaatactatgtcagaagatagagtatcattgttactttttgcattgcaaaaggcattccaagcagccccaaggaggcttatgacggcaaatgtctatatggctttgatttctgctgtgattaatgtttcatcagctgatgaaagtcttaatctttatgattctggtcaccgttttgaacatatccaacttttactggttctacttcgctcgcttccatatgcatcgagggcattccaagctcgtgcaatacaggatattctgtttttggcttgtagtcatctagataacagaactacaatgacctcgatttcagagtggccagaatggattttggaggttttgatttcgaaccatgaaatggacacaaagaaaaatgctgatggtgtaagcattggtgagattgaagacctcatacacaattttctgattataatgctggagcattcaatgcgacaaaaagatgggtggaaggatgtggaggcaacaattcattgtgcggagtggctctcaatagttggaggatctagcactggagaccaaaggatcaggcgtgaagaatcattacctatttttaaaaggagattgttgggtgacttgcttgatttttctgccagggagcttcaagttcagcagaccgaagtaattgcagcagctgcagctggtgttgcagctgagggtttgtctcctgaagaagcaaaaattcaagcagagaatgctgctcatctctcagtagcactagcagagaatgcaatagttattctgatgcttgtggaagatcatctgagatcacaagctcaacatttttgcacatcccttacaggtgatagcatcacatcgtccacatcaatgacttcattggctgccagtcggtcaaattctttgagcacagctggtaaagaacccatggctgctggggtctcaagacgggcatctttgtccagtgatgctggtggccttcctctggatttgcttacttctatggctgattcaaatggacaaatctctgctgccgtgatggaacgtcttacagcagcaacagcagctgaaccttatgattctgtcaagcatgcatttgtgtcttatgggagctgcataactgatcttggagaaagttggaagtaccgaagccgtttgtggtatggtgttggcattccacccaaatctgatatatttggtggtggtggaagtggttgggaatcttggagatctattctagagaaggattcaaatgggatttggattgaatttccacttgtgaagaaatcagttgctgtgctgcaggcacttcttttagatgaatctggacttggtggtggtcttggtattggagggggatctggccctggtatgggggttatgactgccctctatcagttgctagatagcgatcaaccatttctttgcatgctcagaatggttcttgtttcgatgagggaggacgacaatggtgaaggcgatgcttttacgaaagatgttagcataaaggatgtggtatcagaaggaatgggccaccaggctggaagtgtgatgccatttgatggcaacagttattcatctccaagaaaacctcgatctgctcttctttggagtgtgcttggccccatccttaatatgccaataacagagtctaagagacagagagtgttggttgcttcctctattctctactcagaggtatggcacgctattggcagggacaggaaacccctaaggaaacaatacattgagctgattttaccaccgtttgtagcaattcttagaagatggcgaccccttttggctggtattcatgagcttacttcttcagatggacaaaatccactaattgctgatgatcgtgctttggcggcagatgcattacctgtcgaggcttctcttttgatgatatcgcctggttgggctgctgcttttgcatcgccaccagttgcaatggcattggccatgatggctgctggtgcctcaggaacagaaacaagaacacctcctaggaataccttgaataggcgtgacaaagcattgcctgagcgcaaggcagcagcaaaactacagactttctcgagtttccagatgcctatggaaacagcatctaacaagcctgggtccaccctgaaggacaaggcagcagcaaaagctgccgcattggcagccgctcgtgaccttgaacgaactgctaagattggttcaagaaggggccttagtgctgtagcaatggcaacatcaggacaaaggaggagttcgggtgacatcgaacgagcaaagaggtggaatacgtcagaagctatgagtgctgcttgggtggagtgtctgcaatcagatgattccaaatcagttgtgggaagggatttttcagccctttcatacaaatatgtcgcagtacttgtttcttgtttggccttagcacgaaacttacaacgagctgagatggagaggcaaacactagttgatgtgttaattcggcatcgcgcctcaactgggcttcgagcatggcggcatcttcttcattgcctaacagagatgggtagactatatggaccttttgaacatctgtgcactcctgatcgtgttttctggaaattagattttactgaaagctcttcaaggatgagaagatttgtgaaaagaaattacaagggatgtgatcatttaggtgcagctgctgattatgaggaccggaagcttcttaatacttctgcacagtcaaatgaacataactctgaggatgctaattcttcattaacaagcactcttccatcatctgcttctgtaattatggctgatgccatgtcgatgaatgacagaaatgtggaaaatgagcagttagaaactgacactactcgcagcagtgttgatgacgatcagcttcaacattcttcagcagctgatcaacaatcggtaaaaggatcgataggttcaagaacttctgacatttgtgctgatcgaaatttggttaggtctacagttcttgcacctagttatgtgcctagcgaagctgatgagagaattattgttgaactgccatcattaatggtgcgaccattgaaggtggttcgaggaacattccaagtaacttcaaagaggattaacttcataattgatgagcgttcaaatgacagtaacattgatgatgctgcatctactagtggccaatgtgatcaacaagataaagatcgaagctggttggtctcatcactttatcagatatatagcagacgatacttgctacgccgaagtgctttggaattattcatggtagataggtcgaatttcttttttgactttgcggatattgatgcccgtaaaaacgcttatcgggccattgttcataccaaacctcctaacttgaatgacatctttttagctacccagagagctgagcagattcttaaaagaactcagttgatggagcgctgggctaattgggagatcaacaattttgagtacttaatggaacttaacacactggctgggcgcagttacaatgacattactcagtaccctgtttttccctgggtagtagcagattacaaatcccgagtgttgaatctggatgaccctttgtcgtatcgagatctttcaaagccaattggagcactaaaccctgaacgtctaaagaagttccaagaacggtactctacattcgaggatccaatcataccaaagtttcattatggttcacattactccagtgctggcacggtcttgtattaccttttcagagtggagccttttacaacactgtctatacaactgcaagacggcaaatttgaccacgctgatcgcatgttttctgatctttctggtacatgggatagtgttcttgaagacatgagtgatgtaaaagagctagtacccgagatgttttacctccctgaggtatttaccaacataaatggcattgactttgggacaactcaacttggagggaagctagattccgtagaattgcctccctgggctgaaaatcatgtggattttgtccataaacatcggaaggctcttgagagtgagcacgtctctgctcatttgcatgagtggattgatctaatttttggatataaacagaggggcaaagaagcgataatggcaaacaatgtattcttctacataacatatgaggggactgttgacattgacaaaattacaaacccagtggatcggcgagctacacaagatcaaatagcttactttggacaaacaccatctcaactgctgactgtacctcacatgaagaggaagccactggcggaggtcttacaactacagacaatattccgaaatccaagtgaacttaaatcatatgtgcttccacattcagatcgttgcaatgttcctgccagtgctatgcttgtatcaaacgactctattgtagttgttgatgtaaatgccccagcagcacatgtggcacttcaccaatggcaggctaatactccagatggtcagggaacacctttccttttccatcatggtagaaattccacaaattcaaccagtggcgcactcatgcgcattttcaaaggatctgctggttctgcggaagattatgggttcccaagggctatagcatttgctgcttctgcaatccgcagttcagcagttgttgctgtgacatgtgacaaagagataattactggtggccacgttgatggttcattgaagttgatatccctagatggagcgaagacaattgaaactgcttctgggcatattgctccagtgacatgccttgcgctgtcacctgatagcaactaccttgtgacagggtctagagataccacagttatactctggaggattcatcagacaggctcctcacataagaaaaatgctcaagaacctccaccgactacaccaacgacaccacgcagtcctctctctggcagcactagcaccatgagcagcctctcagaaacaaagagacgtcgcgttgaaggtccaatgcatgtaatgagaggacatcttggggaagtaacctgctgctcggttagtccagacttaggacttgttgcttcctcatcaaatgcaacaggcattcttctgcattccttacgcacaggcaggctgataaggaggcttgatgtcgatgaggcacatgcaatatgcttatcttctcaaggaatcattttggtttggaatggaacaaagaaaacattatctaccttcactgtcaatggactccctattgctaactcagttctgttgcctttctctggacaagttagttgcatcgagatttctacagatggccattttgctttatttggaacatctttgttcaacaactacaagtgtgataacagtactgaaactggggatcatgagcttggacccaatggcactgatgatgtatcaaaaaattctgaacaatctgttcacgcgccttcaatctgctttgttgacctgcatacactgaaggtttttcatactctgaagctggcaaagggccaggacatcacagcaattgctctaaacaaagagaacacaaatcttttagtttctactgctgataattttttttatagtctttactgatcccgctgtaagcatcctcgatac

SEQ ID NO: 19399 - DNA, 3592 bp, Zea Mays
ccggcgtgtgggagagaagagagagagaccacctcctccgctctctctctcttactctgactcgcccgctccggttcgccgctccgccatcgccggcgatcactccactccggcaacgccgcgtctccgacgatcccaccgacgccgggccccgcgaccccattcctccgattgcctcctcacgtcttgcggttctcccccggcgagggtacgtgctcttgcccagatccgccccgcctccccgcgccccgccacgcgcgccgatcggcaagctgcgtaggcttcgctaccgctgctgcgcgagcgagcgtcgcagccgtcgatccgcgcgcccgccatggacgacttccagggcctgctggcccgcgacttcggcctccgcccgcaggggaaggccgcgcccatgtcggccgcccgctcctcgagtccctccggatccgcctggaccaataccagatccgccgtggggtccgccgctccctccgcgccctcctacgacgagctcttcgggtccgccccgccgccgccgcccaaggccacgccgtcgctcgataacatcttcaactcgttcaaggagcccgcttccaccgcgccgccgcctaagccgaagcactcttccgcgccggtgttcgacaagccggtctacgatgatgacatcttcatcggggtccctggggttaagagctcctcggtgccctatgacgatgtgttcggtggaagccagagccgcgaggcgccccccgcattcgatgacctgctcggtggatttggtaagagctcacaggtgagggaagaggtggatgacaagaggaaaccagaggcacctacggctgtggcggctactgggttcgattatttgatcccaagctttggcgggagaagctccccgcggcaaagggatgctattggtgcaaaacaaaagaaagtttccatgtcgacatctaagcaatcagctagcttaagcgaccccttcgttgttctcgaaacaacttcatcctcagcccatccattcgcagatcccttggatgaatccggtaaagctgcaaaatatcaagggaaaaaccgtgaaagtactagcgttgggagcagtctgtttgaggattcaagcactttcaaccaggctccaaaatttgaacctttttttaccccagaggtggacaatggatcgaaagataggaatgagtcaagcagagcccaaaactcaaaccctgtacaggatttttctaaaagaaactcctcccaacaaccttctgttgaggattttgaaaatatctttcctaagtcacagtctgccagatattctgatgtccatgttgacattggctcagagaaatatagtgggaatggtataaatgatcagtcacctagatctgatgaatccgaagatgagatatggcttacagcttctgagattcccctcttcacacagccaactagtgccccaccaccttcaaggccaccgccacctcttgcagttaagcaaaaacatggatcaagatcaacaagaaaagatgaacatctgcggcggtctaggaaaaacaatgaccatcaaaggagtttctcaaatcaggctggtgtttctacagtagatggactagaagattttaccatgggtaagtctcagaatgtgcatacgtttaatgaggaagaatttgagagaagtacggcagcagcggctatgaaagaggctatggataaagctgaggcaaagttcaaacatgccaaggaagtacgagagagagagcgtgatgcaaagcttagaaatagagaacaacaggaacgagataatgtaataaggtcgtatgcccaggatcgtgaggacaaagagagaaatgaaagactagaacaagaaagagagatgaagcaaaaagaggaaaaggaaagagagcaacgaagacttgaagaggagagagaacttgagcgacatagagaaagagaaagagctaggcaagcagtggagagggctacaaaggaggcacgagaaagggcagcttctgaagctcgtgcaaaagcagagagggaggcacggaaacgttcagaacgtgctgctgtgcaaagagcccaacaggaagcacgtgagagggcagcagcggatgctaaagatcgagcagagagggctactgcagaagcaaacgaaagggctgctactgaagctaaggagaaagctgctagtcaagcgagggatagggctgcagcagaaaaagctgctgtggagagagctcagcaagaagtgaggaagagagctgaacgagcagcagtggaaagggctgctgctgaggctcgggaaagacaggctgctgctgctgcagctgcaagagaaaaaacaagcaaaccagatgatctagaatccttatttggtatgggtgcccgagctaatagtgctccgaagcaaagggctccaactgtggattctatgtttgattctcaaacgcaaaatagagggacttccacttcgacatcaatgaaaaaggcatcatcaacagcaaatgttgctgatgacttgtctgcattatttggaggagctcctacgtcatcaaatgaatttcaagaagttgatggggagagcgaagaaagaagacgtgctaggttggaacggcatcaaagaactcgtgaacgagcggcaaaggctttggctgagaagaatgaacgtgacatgcagcaacaaagggaccaggctgagagacataggcttgcggaaacactggacttcgagattaagcgctgggctgctggaaaagaaggttctttggccagaatgtggatggcaacctgtatcccttaccgatttgatcactgctgctgctgttaaaaaagtgtacagaaaagcaacgttgtgtatccatcctgacaaggtgcagcaaaagggtgcaaatctccaacagaaatatatcgctgagaaggtttttgatctccttaaggaggcgtggaacaaattcaactctgaagagctcttctaaacagcctcatgactgaacatagcatgacccatcagggtctgcacaaggtactctgggaaggaactcacaagctggagcagcctgaggttggtcgggggggaaggggaaccatgaagcgaccaagcgaaacctgaactatggttataatcacagttgttttgtttcactcccccaattttctttcccaactatctgttgattggatgacaactcacagcgacatgtggcagctgcccaagctgaacctcatccagtaggtgcacattagtgccctgttttgtactgtttgtcctcggctgtatgtaccgtcagagctgaggcttctgaggtcagcgttgtgattttggattaggtacagggcttatttaccatggagagaatgaaaacaatagagatgacccataataatagattgattgattagagagatctatctatatttttatataaatatataggggagatttcgtggcttatgaaaacagaaccaaacgagatatttccttatctctgtaaccgtatataagggctggccggctatatctattatgtacatatctcacggttttcaccgattttccatggtttcatatttaatatttaaatggtaaaaaactgaaattgtacataaataa

SEQ ID NO: 19400 - DNA, 4737 bp, Zea Mays
agatggccggctttatcagctgcggcagcgagattcaccgggggaagtatttgcagcgaccgcgccggtccccgccacaaaatcagctacccaccaccgtccgtcagcggcggcggcgagagcatggcggccatcgtggcggcgcgggcgtcggcccccggcagagcggccgtcagcaccatcgccgcgttccacagccacgcgtccccttcccgcgcgctcccgctcgcctcctcctccatcggcggcgccaggcggtaccaccacgcccccgcgtgctgcttcgccaccaagcccaccgcgccggccgctgccgagctcgtcgaccaggacctcgccacggccacgcaggaggccgccaagccacgccggaaacgccggtctcggaaggcgaagaagtccgccaccgccgccaaggaggaggatgggacggacgacaagccggtggcggcggcagaggacgaggcgaaaaggaagaaggaggcggccggcgccgaggacagcgcccgggcattggtggccggcctcgacgacgtgatcgtcaaccccgtgggtctgggtcggcggtcgcggcaggtgttcgacgaggtgtggcgcaagttctcgcggctgggccagatttcgagcgcctcgtccaccgcgctggcggaggaggagcaggccgtgcttatccgtggaggacctatgtgcgagttcactgtgccaggggcgcaggacaccaccgtcctcgtcgtcggtgccaccagccgcatcggccgcatcgtcgtgcgcaagctcatgctccgcggatacaatgtcaaggctttagtaagaagaaacgaccctgaagtgatagatatgctcccaaggtcggtggatgttgttgttggtgatgttggtgatcctgcaactgtcaaagcagctgtatcaggctgcagcaagataatctattgtgcaactgcacgctcaactattacaggagacctaaatagggttgataaccaaggagtaaggaatgctagcaaggctttccaggattactacaacgaattggcccagctcagggctggtaaaagcagcaagagcaaactcctgatagcaaaattcaagtctgcaaagtccttgaagggttgggaggatttgtattcacaagaggtggatatgttgagatatcaaaaaggctttctcttcctctaggttctaccctagacaggtacgatggtttactcttttcagtgggaggaaatggaagatcatacgttgttattcttgaaactggtccattggcggacacgacccagagcaagaagtattttgctcggatgactacaaaagtaggtttttgtagggtaagagtgccgttttcatcttttcggccagtaaacccacaagatcctcccctagacccttttcttgtgcatacactaaccattaggtttgaaccaaaaaggcagagacctggtgaggcatctcaaaattctagtgatcctcgaaactttgagctaaaactggaatacatcaaggctttacctactggtcaagaaacagacttcatattggtgtcatgttcaggttctgggattgaatctaacagaagagaacaagttctcaaagccaagaaggctggagaagatgcactgcggaggtcaggccttggatatacaatcgtgcgcccgggtcctctgcaggaagaacctggtggccagcgcgcgctgatcttcgatcaagggaacagaatctcccagggtatcagctgtgctgatgtggctgatatctgtgtcaaggcactgcatgattccactgcgagaaacaaaagtttcgatgtatgctacgagtacgtcagtgaccaagggaacgagctttatgaacttgtggctcatctgccagacaaggctaacaactatctcgcaccagcactgtctgttctagagaagaacacctgattgatgcgcaccatcagactcggacatgtaatatacgagtcatacgacgtgtatattttctcctcctgtaaagccatacgtttttcctatacaagccttgtgtcattcacatggtatgccgtttggcccttctgtaaagatcattgcacagaccgactccaggaaacaaaattttatttttgcaatattgcattgtatgataagttctcctgtccccactccttttcatctaaaactgtaaaagtttgcataatttcaccaagaagaacagtacagtggaaaagaagagaccaatctttgaagcaaaggaagcagtgcacgtgcacctgatgaaatgatggctggtttgctcacaatcttgaaagagaatgcaaagcctgaggctgcaagagtggtccggactctggagtactctctctttctctgttgggaaagttggtttcggcctgttctgctgctcaagcagcatacggcagctcacgcctatggtggacaaccaaagattcagtgctctgattcttcttggtttgtctttctccggcagatctctaacgagtagatgttctctcttcttttcttttcttctttttttgaaagcttcactctaacctgaaatcggctttacttaaatttcgagccaacttaatcttcttctttgccaattcttttttaaagaaaagtttgagagatgcctctagttttttttttgggggtgtgtgtttgcgactacagagtctgaaatcacaaatcagagctgtatagggagcaggtggcgactgagtgactgacaaacgtggggaagatggagacaaagaaacgcaagcctgtggtctactaaagacgggggcatcgccatcgagggcaaacggaggccacaggattagcagcttctccgtgctgctgcgtctcctcctcatcgtcctctccagtgtccagctcggccatggcgttcaccgtctccttctcccccgccaacgttcagatgctccaggctaggagtggccacggccacgccacctttggaagctgttccgccgtgccaagagccgggccaaggctgcgttccacggccgtccgggtcagcagcgagcaggaggcggcggcggccgtcagggcgccgtccgggaggaccatcgaggagtgcgaggccgacgccgtcgctgggaagttccctgctcccccgccgctggttaggccgaaggcccctgaaggaacgccggagatcaggccccttgacatggcaaagcgcccccgtcgcaaccgcaaatcacctgctcttagggctgcattccaggagacgagcatctcgcctgctaactttgtgcttccattgtttatccatgaaggagaagaagatgctcctatcggagctatgccagggtgctataggcttgggtggaggcacgggctgcttgacgaggtttacaaggcccgcgatgttggtgttaatagttttgttctctttcctaaagttcccgatgcattgaagtctccaacaggagatgaagcgtacaacgataatggtctggttccacgtacaatccgcttgctcaaggacaagttccctgatattgttatctacacagacgtcgcgttagacccttattcatctgatggtcatgatggtattgtgagggaagatggtgtaattatgaatgatgaaacagtttatcagttgtgcaaacaggctgtttcacaggctcgtgccggtgctgatgttgtcagccctagtgacatgatggatggccggattggagcacttcgctctgctctggacgccgagggcttccatgatgtctccattatgtcctacaccgcaaagtatgccagttcattttatggccctttccgagaagctttagattcaaatccaagatttggagataagaagacgtaccagatgaacccagctaactacagagaagccctcatagaaaccgcagcggacgaggcagaaggagccgacattctgctagtgaaaccgggattgccgtacttggacattatccgactgcttcgggatcattcagccctaccgattgctgcttaccaggtctcgggcgagtactcgatgatcaaagccggcggggccctgggcatggtggacgagcagaaggtgatgatggagtcgctcatgtgcctgcggcgagccggcgccgatgtcatcctgacctacttcgcccgtcacgccgccgcggtgctgtgcggcatggggcccaagtaggaggcgaggcccgcccgccattcctgccctgcactgtcattgtggagttgagcgatgagttggcttatcgtatgttttgggggcctggcactggcagaggattgtccgaggccttggatctcttccaataatctgcgccgggagataataagttttggagttatcgcatttcccggtactaatcttctgcgtgttgctagtactgaaaaaggtttggattttgaagcgattttagacagctggattagtacctcaacgaacgaaggatttcaggggaagcgtgcgtatcattcttgaaggcgtcgcactcccacctcccactcccacgtgatttcacggtggaccctggaacaacctcgattggacagtacactactagctgctcgtggtcatggctcaggactatctatccatctatgcaaatgaactaggtcaaggtacaaaattaattatgcttaattaaaagcctgcgacgagataaatttattaagcttaattaatctataactagtaaatggactaattagggtttatagtttcgtcttaccgtttagtctttaactatgtaattaattttctaattaaacccat

SEQ ID NO: 19401 - DNA, 502 bp, Zea Mays
ctggaatgaagaaattccatattcatacatctttttaggtgatgctcaaaggtctgaatagagtttcatgggaaagggtagatgttagcttcaaaaaaagtagacaaaggattttcgctcatagcactattcaggtcaagacctatttcttgaactccgatggagctgacgtgatcaaccacatgatcgaccattttgtttattaagatgggtgtactaagttggtaccaagttctctttgtcgatcgattctcggccaaagaggaacatgtgggaaatgttcttgttttgaagacaggattagagttatactgaaggagtagaacccactgtaaagtgtaaaggggtatcttatctctacccttcttgataattttgggccgtttaggttcttttcttcccttttcagaattcagaatctcagttgttttgtacccatatactggaccagaatttgttctccaaatacaaagatatttgctgcgtatttgcttctccgaac

SEQ ID NO: 19402 - DNA, 627 bp, Zea Mays
cggcggtcccctccacccgggatccatgtggacgtatgcggatgcggtgagcaggtagcatccactgcactctgcagaggaggaaggaagaggaccgacaaagatggggatggcattgccattgccgccggcgtcacaggccttgaggtgctaatatctatcagacctggaaacgcgccactccctgctgaaaaccatgggtttgggacagtcgagtcatttgctgaaatcttgacatgaagggaggatgcatcctcaacatgcatgcatgctgtgctatttaaagatggaaacggattgaactagtttcaaaaggcagatggaatggtttcatggccatgatttgcatcttcatactagctttatttacattgcccatgttcagtttgtcggagaccataaacacatgggatcaccaagttatcttacccttgattggtttcctttaactcgtccggtttgctgttcgtttcttcagtttcgtcaggcattgggtctgttagtcagggccaggggcaaagctaggtagaagcctgtggatgcacatgcaccacaattttttgtaaaactagtgttttgtccaaatttttaccatatatgcaccacctacaacttattactacgcat

SEQ ID NO: 19403 - DNA, 994 bp, Zea Mays
atttggtttctggtctcagttgcgttgtgggtgatccactcgttcttccctccacgcgccaaaaccccagccacggccatctcctcctccactcctcccgttcgtccacatccaaaagcttcccaggagaaaaaaagaacagttatttgcagcgggaaccctaacaaatcactcgctacaagcgagcgagggagagatgtctctccagtacgtggcgcccccggtccgagcactcgccgtgctaccggcgccaggcccccctcgccgccggacaagccatgtgtccctataccttccgagccggcggccagggctcgccgtcgccccggtccgtgcggcggagtcgtcctctccgcccaccgtgcccgcctccgcggccggcaaggctgtcgtcccggacgacgagttctccctcgccaaggtctctttcggtgtgatcgggctggggcttgggctctcgctcctgtcgtacggattcggatcgtatttcaacctgcttcctggttcggaatggtcagctttgctgctaacctacgggtttcctctcacaatcatcggcatggccttaaagtatgcagaactgaaaccagtaccctgcataacctacgctgatgcctttgctctaagagaaaagtgtgctacccctattctgaagcaggtcaggagtgatgttacacgttttagatatggtgatgaacaacacttggatgaagcactgcagagaatctttcaatatggtttgggtgggggcattcctagacgtaatgcacctatattacaaaagattcgagaggaagtaactgacgatgggaaatacagtttagtactcgtatttgaagccaaagcattggagctatctgattttgagaagagacagacaatgtcatggccgatacctgagcatgaccatggcgaaggagacaagatgctggccgctggtgtggctgctgagtagtggttttttttaattgtgtcggcgttcgtgtgtgggccg

SEQ ID NO: 19404 - DNA, 1753 bp, Zea Mays
ctcttatctccttcccccagccgccctccgcctccgcgccatcgacacgctcgagagcgtcgctgcctgctgctcgcgcggctacacgcaagtaataaacattatatggcgctagtacagttcaacggtgccttggttcctcaactcggtgaaaagcctcggctgctatccttgtcagctgcaatcgcaaaggctgcctattctgatgcaagattcctgacaccaaaaactggttcaagaggtagaggtaaacacctgctatcacctagttatagtttgcattcacagacctcttctgaacaactaaaccatgtaccatcgtcaagatttcgccagaaaaggggttcacgttttatcgtcagagctgaagctgatttctatagtgtacttggtgtctcaagaaatgctagtaaatctgaaatcaagagcgcctatcggaagcttgctaggagctatcatccagatgtaaacaaagatcctggtgctgaacaaaagttcaaggatatcagtaatgcttatgaggttctgtctgatgatgagaagcgatcgatctatgataaatatggagaagcaggtctgaagggtgctggcatgggcacaggagattactcaaacccgtttgatctctttgagtccctgtttgaagggtttggtggaatgggtggaatggggggtggccgtgctgctcggaacagaccaatgcaaggtgatgatgagagctacaatctggtactcaatttcaaggaagctgtgtttggtgtggagaaggagattgagataaccagattggaaggctgtaacacctgcgacggaagtggtgccaagccaggtacaaaggcaaccacatgtaaaacttgtggaggtcagggccaggtagtctcctccacaagaacaccgcttggaatattccagcaagtctccacctgcaatacttgtggtggcaccggtgaattctccactccttgcaacacctgtgggggtgatggccgggtgcgaaggacaaagaggatcagcctaaaggttcctgctggagtggattctggaagcaggctgagggtccggtctgagggtaatgctgggcggcgaggaggccctcctggggacctttatgtcttcattgatgttctctctgatcctgttcttaagcgagatgggacaaacattctctacacatgcaaggtttcttacattgatgcaatccttgggacaaccgtcaaagtccccactgttgacggaacggttgaccttaagataccctcagggactcagccaggcacaactctggtgatgtccaagaaaggtgtcccgcttctcgggaagtcaaatgcccgtggagaccagctggtgcgtgtccaggttgagattccgaagcgtctgagcagcgacgagaagaagctaattgaggagcttgcaaacctgaacaaggctcaaacagccaatagcaggagatgattatcgcacatggcttcgtaggacagcgtgcttgtgtgataggcaattttgatgcaaactgcagtgatgattggatgaaaagagttggtagtgataaactcttctacgaactacatacagcaaggggtctggagcaaaaaaatgtgccgttccacatctgtaacctcgtttttaagctattgaaagttgagtcagtgaactggacgtttttgcaatagcttagcatatgcactaggcgactttattagccattttttttttagcataaaggcttcaatctatcatcctcatcaacccctca

SEQ ID NO: 19405 - DNA, 275 bp, Zea Mays
agctcggtctccctggcgctcgaaacccagtcgcccagcccaaccgtctcctgctccctagaactcgctactgcgtgcgtgctctgctctcatggtagcgcgtcctcgcgcttggcctgtccatctccctgcgtttgctcgcttggattcctccttctcggccatctccatcgcgccctgctcgcctagacctccacgctatccgccgcccgtgctggtcaagctcaccgtcgatgcttcgtcaacgtcatcgtgctgtcgcactccctgctcca

SEQ ID NO: 19406 - DNA, 2091 bp, Zea Mays
ctcattgcattgcacggaaattcacagctgcgtgcccacccgatcctcgcttgacaccggggaaatccacggcctgctgctacagagcatcgccgctgagcacactggggcactaactcagagtagtgtcgctcaatgaatttcctctaccgaactacgcagcctgcagcgactgagctgccaagaatttcagagcaagatcacaggaatgccttacaaaagacgacttcgacactggagggtctcattgcggacgattcacaccaccagccctcctctgcccacatcgaagatggagctgctaataatgggtccagggatatcagtggggattcttcatctgttgatttgaaaagcccagtcccactggggacacatgccgatgtcatggaagacgaaggatggatcacaattccatgcaaggcacttcctgaaagttggaacgacatatcagaaatggttcagttgcaggctctggaccgttccttcctttttccaggcgagcaggttcctatactggcgtgcctgtcagcttctaagcaagatgtacaggttatatccccctttagaattgctgcagtaatgtctaagaatggaacttctatgcaaaactttacaaataaatctagccctgtcagtgcaaatggtcatgataatggagcagctggagaaagtggctatcaggatgttgaacccaatggtgaagcatctccttcaggacatgatattttggagactcaatctctccttcagatggaggatcataagcagcagatcgaacatgtgttgcgaagatttagagaatcaaatttttttgtccggattgcggaatcagtggaacctctatggtccaagaaaagtgtaacttcaactacgatggcagatgaacgatcagataaccagggaaatagtaagagctcaaggagtaatgtttataataccatttctgataaaggggtttttgatggtaacacatctgggggagttgctcgagatgttgtcaagtgttattctctgcaaaatggagacatagtggttgttttgcaagtgaatgttagcgttaacaaattggaagatcctgtgcttgaagtccttcagtttgagaaaacctcttctgttcagacaccaaataatataagaccaccaccaatatctgaaagtcaagaatttatgcctgaaaaacctgcaaaaaccccagatattataaatgatgggcaactttcgtttagaggagttcctttagaacctgaacggtattctaatattgctcctactcatgcaaaagatatagtcgtattcatcgatgcaattactattgtatttgaggaggcatccaaaggaggtgctcctttgtctttaccaattgctagtattgaggttgggcatggtcacagcttgccaaacctagcactcaggaggggcgaggaacactcttttattctcaaaccagcaactatgtcctcaagggaacggaagaccaacagtcatgcacctctggccttatcactcccaacgatgaccggtgctactttaaatactcatacaccaaaggctggtgagccgtatgctgatctaagcgaccaatatgctgtactgatactaacactcgaagctactaatatgacatccgaaaaccttacattaactgtccttgctcctgaagcatctggttcttcttcagttgtatccttgaactcatctccaaccaccccaaatggttcttttgatggtgttaatgagtcatcaaaaagatctgggctgggaaaagatggaattggctttcgaagattgaattctgtcctagctactccaaaagaaggtgataatggaggaaacagaatgagtaatgcttcaggctgtactcatctgtggttgcaaagtgcagtgcccctagggtgtgttcctgcccgctcaagcaccactgtcaaacttgagctgctaccattatcagatggaattatcacacttgatactctgcaaataaccgcaagggagaaaggccttgcttacattccggagcactccttggagatacatgccacctctgtactggaagcagaatcccagatcatggcccggattgaacggtag

SEQ ID NO: 19407 - DNA, 2594 bp, Zea Mays
ggccgctttgtcaaattgtgaagataattttgtgaaacacttgaagtttctactgcttgttcctaccatttttaagaaaaaagatcaatggaggcagctttgtcattctccaaggacagcccaccaatttcgataatttgtgctgcaaagattgtgggtctacccctaaccatcaatcatagcctcgctgctggctcggcacccaccctacagtttgcttctggagaatcactccatggtgtcaacccaatcatcctctacattgctagaggtgcatcaattgcctccttatctggaaagaatgatattgagtttgggcatgttgttgaatggcttgaatatgcccccaccttcctttcaggctctgaatttgaaaatgcatgcttatttgttgatggattcttggcctcccggacctttctggttggtcatggcctgacaattgctgacattgcagtttggtcaaatcttgctggaattggtcagcggtgggagagtctaaggaaatcaaagaaataccaaaatcttgttcgctggttcaacagcatagattcagaatacaaagaggcactgaacgaagttgtggctgcatttgttgggaaacgaggtattggaaaatctcctgcacctagccttaaggagaaggtacatgactcaaaggacccatcagctccagaagttgatctccctggtgcaaaagttgggaaagtctgcgttcgttttgccccagagcctagtggttacctccatattgggcatgcaaaggctgcactattgaacaaatactttgctgaaagatatcaagggcgcttaatagttcgatttgatgacacaaacccttcaaaagaaagcaatgagtttgttgagaatcttttgaaagatattgagacgttggggatcaaatatgatgctgtcacatacacatctgattatttcccaaagctaatggaaatggctgagagtttgataaagcagggtaaagcatatattgatgacacaccaaaggagcaaatgaggaaagagaggatggacggtattgagtcaaggtgcagaaataataccgtggaggaaaatctctcattatggaaagagatggttaatggaactgaaaggggcatgcagtgctgtgtacggggtaaacttgacatgcaggatcctaacaagtcactcagggatcctgtttactaccgctgtaatactgatccacaccatcgtgttggttcgaagtacaaggtctatccaacatatgactttgcgtgcccatttgtcgatgcattggagggggtaacccatgctcttcgttccagtgaatatcatgacagaaatgcacaatattatcgaattcttcaagacatggggttgaggagagtggaaatttatgaattcagccgattgaatatggtttacactcttctaagcaagcgaaagcttctttggtttgtacaaaacaagaaggtcgaagattggacagacccacgttttcccactgtccaaggcatagtacgtcggggcttgaaggttgatgcattgatacagtttatactccaacagggtgcttcaaaaaatctgaatctcatggaatgggataaactctggacaatcaacaagaagataattgatccagtgtgcgcaaggcatactgctgtgctaaaagaccagcgtgtcatctttactcttacaaatggtccagaggagccatttgttcgaattttaccaagacataagaaatttgagggtgctggaaagaaggctacaacctttgccaacagaatttggctcgattatgctgatgcggcagctattagcaagggtgaggaagtaacccttatggattgggggaatgctattgttaaagagatcaaggtggagagtggagtaattactgaactagttggagaactgcatcttgaggggtctgtgaaaacaacaaaattgaagatcacatggctagcagatatagaggagctagttcccctttcattggttgaatttgattacctcatcagcaagaaaaagctagaggaagacgaggacttcctcgacaatctcaacccttgcactcgacgggaaatcccagcccttggagatgcgaacatgaggaacatcaagcgtggagaggtcatacagctcgagaggaaaggctactataggtgtgatgccccttttatcagatcgtccaaaccggtggtcctgtttgcgatcccagatggcaggcagcaggcctcgcttagctaggcatggtgaccaccttttgggcacatggaattcctgagttggcgatgagtattgttgcattgtacactttaatattgtactgtgattaggctttactcgcggtggatgtctttcaccgctagatggccagaggcatatcctgccaaccaagcagagcagccattttgattttggtctatgatacttttacctgcgcttgaatattcctatacttctctagcagggccttcgttattttgccgttagattatttttactgcgtcggctgctattttcttttgcccaggtattaatcaatcatggacgggcatggtatgtagctgtgatgagtaaatgcatgtggggaccctaaggttggg

SEQ ID NO: 19408 - DNA, 679 bp, Zea Mays
tagtaggccagaccaaccaaccatatcctttccccaccccgcatcgtcggacaccctccaaagtccaaaccctctccccgccgcatcgccgccgccggaagcgcctccctcgatccagatccaggagatatgcctcgcaatgatgatcgctatgggaatacacgcttgtatgttggaagattgtctccccgcacccgttctcgtgacctagaataccttttcagcaaatatgggaggtttttcggttttttacacaaccatggaggtgtggtggaagggtgcccttgatggaattggtggccatagttccaatgtttgtggaggactttgaattcgagaagtggagttgaagcgtgactatgcattcattgaattcagtgacccccgtgatgctgatgatgcacagtacaacctagatggcagggacgtcgatggaagccgcattattgttgaatttgctaaaggggttcctcgtggttctggtggttcacgtgattacaacggaagaggacctccaccaggaacaggccgttgttttaactgtggagttgatggtcactgggcaagagactgtcaggctggtgactggaagaacaaatgctaccgttgtggcgaaaggggccatatagaaagaaattgccagaacagtccaaggaacctcagaagttgcttgctaaat

SEQ ID NO: 19409 - DNA, 4489 bp, Zea Mays
ctttttctcgcctctcctcgctcctcgccatttctctctcttcccctccgcttcgcccaccgcccgctccgaaatctgcgcgccgacgccgccggctgcccgtggagagcctcgaattagagcgcgttccgtcgagaggttttcaagcaactatgtttgagtttggttgatatgatactcattcacgttggggatgcagaccccccctctgtgggggttgattgaagaagttaactgtacacttaggagaacttgtgtcctactgaaagtttcttggtttcgaggtgctcttattggttattggatcgctgtgtgtaatttgtttctttccctttgagagcctttctagtttcttgggcaggctcttgagctaccaagcatgtcagattcaaatgtgaagtggattgatgggctccagttcacatcattgtactggcctccacccctcgatgcggagcagaagcaggcacaaattttggcatatgtcgagtactttggccagtttacagctgacaccgatcaattccctgaagacatagctcagctcattcaaagttcctatccatcaaaagaaaatcgcttggtagatgaagtattgcaacttttgttcttcatcatccggagcatggtcatgcagttgcacatccaattctttcacgcatcatagatgggacgctgtgctatgatagacatggtcccccattcagttccttcatctctttattcagccataattctgagcaagagtactcagagcagtgggccttggcctgtggagaaattcttagggtcttaactcactacaataggccaatattcaaagttgagcgccaacatactgaagctgaatgtagcagcacatctgatcaggcaacatctagtgattccacagataagagatctaataattctccaggaaatgaatctgactggaagccattgaggccactaaccccgtggatcactgacatattgctagccgcacctttgggcattcgaagtgactattttcgatggtgtggcggtgtaatgggaaaatatgctgctggtggagagttgaagcctccaactactgcttgcagccgaggatctgggaagcacccacagcttatgccttccacccccagatgggctgttgccaatggagctggagttatattaagtgtctgtgatgaggaggtagctcgttatgagacagcaaatttaacagcagcagctgttcctgcgcttctgctacctccaccaacaacacccttggacgagcatttggtggctggcctgccccctcttgaaccatatgctcggttgttccatagatactatgcaattgctacaccaagtgctacacagaggttgctttttggtcttctggaagcaccaccatcatgggctccagatgcacttgatgcagcagtacaactagttgagctacttagagcagccgaagattatgcttctggcatgcggcttccaaaaaattggatgcatctgcatttcttgcgtgcgattggaactgcaatgtcaatgagagctggcattgctgctgatacagctgctgctttgcttttccgaatactttcccaaccaacgctgctttttccaccactgagacatgccgaaggagttgaagtacatcatgaaccactaggtggctatgtatcatcatataagaagcagttggaagttcctgcatctgaggccactatcgatgccactgcacaaggcattgcttctttgttgtgtgctcatggccctgatgttgagtggagaatatgtaccatctgggaagctgcctatggtttgctaccgctaagttcatcagcagttgatttgcctgaaattgttgtagctgccccgcttcagccacctacactgtcatggagcctgtacttaccattattaaaagtatttgagtatctacctcgtggcagtccatctgaagcatgccttatgaggatatttgtggcaacggttgaagctatacttaggagaacttttccttctgaaacatcagagcaatccagaaagccaagaagtcaatctaagaaccttgctgttgctgaacttcacacaatgatacattcactctttgttgaatcctgtgcctcaatggaccttgcctcccggttgctatttgtggtgttaactgtttgtgtcagtcatcaagctttgccagggggtagcaaaagaccaactggtagtgataaccattcccacgaggaagccactgagcattcaagattaacaaatggaagaagcagatgtaagaagagacaaggccctgttgctacgtttgattcatatgttctagctgcagtttgtgccttatcttgtgagctccagctgttccctttcattactaagaatggatcacattcaaatttaaaggattccatgaagattatcatatctggaaaaaacaatgggatgaataatgagctacacaacagcatcagctcagcaattcttcatactcgcagaattcttggcatcttggaagccgttttctccctgaagccatcatcagttggtacctcatggagctatagctcaaatgaaatagttgcagcagctatggttgctgctcatgtttctgagttatttcgtcggtccaggccatgccttaatgcactctctgcactaatgagatgcaagtgggatgctgagatttcgaccagggcatcatctctctaccatttgattgacttgcatggtaaaacagtttcctccattgtgaacaaagctgagcctcttgaagctcacctgacccttacaccagtaaagagggataatcaacatcaccgtgaggaaagcaataccagctcattggatagtgtcaagttggaaaacaagaatggttcaacatcacacaagaaaaacggtttctcaagaccactcttgaaatgtgcagaagaggtcctactgaatggcgatgttgcaagtacatctgggaaatccattgcaagcttacaggtggaagcatctgatttggcaaacttccttaccatggatcggaatgggggttaccgagatgtctgcagaaagtacatcagctcaccaaggatggaggaaggttgttgatgcactttgtgatgtcgtttcagcctcaccaaccaaggcatcagctgctatcgttctccaggtcaagatattgctatattgcacgtttggtcaaaactaaatttggtttaaagtttgttcgatttatttcaaaacaaattcaattttctttttctgattaatctatttcaaaacgaacattctctgtttttttttggtttctgacatctatttcaaaacacattttaactacaatgcctaggtggaatatggacctgtttcctagtcatatttcttgacgcttattttttttttcgcaggccgagaaggacttgcagccttggattgctagagatgacgaacaaggtcagaagatgtggagagtcaaccagcgtatagtgaagcttatagctgagcttatgaggaaccatgacagccctgaagcgttggtgatactcgctagtgcctccgaccttctacttcgtgctaccgatggaatgctcgtcgatggtgaagcttgtactttgccacagcttgagcttctggaagtgaccgctcgggctgtccatcttatcatcgaatggggagattcaggtttatcagttgcagatggtctttcaaatctgctgaagtgccgtctatcaaccaccatccgctgcctttctcacccaagtgcacacgtgcgcgcactcagcatgtctgtcctccgcgacatcctgagcaacggatccgtgaaccccaacaagacaatccaaggggaacagcagcggaacggcatccagagcccgtcctaccggtgcctggccgcaggcatcatcaactggcaagcggacgtcgagaggtgcatagagtgggaagcccacagccgccgcgccactgggctgacgctcgccttcctcagtgccgcagcgaaggagctcggctgccctctcccgtcatgacaaggccattcctggatctgacatcggcttccaattgacggtcagtgctggcacagctgctgcagggtccgcgagtaggacggctctaatctctccatcacgtgttattatctggtgtttccataatgcgatttgatttcaatttggcgttagatgttgtacacgtgtatttaactgcttgagttgtacgtaatttgtatacttgtaactttgtttaataatatggctattactcaagaagcggaacatatcttatcctttttatatgctgctgctagatccgttcaacgtgagtgccatgcaaatgtccacgaaatgtttagtatttgttagggggaaaaggtctcggtggaaggtaaaataatttctaactgttattcaggataaatgatttaacgtggtttgaattattacaaccttcgtcccttaaccttcatcagactattttgtcagatggcatcgctttgtctaatcagcggagaaccaag

SEQ ID NO: 19410 - DNA, 983 bp, Zea Mays
cagtcatacgctccattaacttctacttgcgctatggttcctttgcatcacgagcggagattctgatgtccaagaacggaccattcagctcctgcatgctgcgcggatttagtggtaaatatacctacaatggacagcagttcgatgcgactgctagaccagaaggagcattgtatgacaaatgcaggggagagattgccaaggcgatgaatctcaaggcaccatgcaagacagcaaagaactgcaccttctgtggtgtgtggaaagggggaggtggagctggccaaaacgacatctacgtcgcgtcaggtttctactaccttgcctcacatgttgggttcatagatagcaaagctccaagcgcaaaggcccctcctgccgcattcagggctgcggctaagaaggcctgcaaattcgatgtcaacagagcaaaagtggcctacccagatgtttctaacagtgatgtgccgtacttgtgtatggatcttacttacacgtacacattgctcgttgacggcttcggtctgcagccaatgaaaaagattacatttgtatccaaggtgaagcatggcgaatactacatcgaagccacatggcctttgggtacggctattgaggccgtgtcaccgacaaggcagatcggaaactaatgggctgctgctcgcactgaactgaactctggatttagcgcatgttatcatggttgcagttagcgctcctgacctataatatttgactctcaaataatttctgtactgctgctcggcagcgtgcatgcaaactgagcattttcgagtcagcctctgcgtgtgtgcgggctaattcaactatgaaattcattcgaatttctttccactttcactttggtatcttcagtgaatatgtaaatctttgatgttcttctgctttaatcctgtgacatgtctcacacaaagctacatatttagccacatcactctttagtctatatcattagtaccttt

SEQ ID NO: 19411 - DNA, 763 bp, Zea Mays
ctccgcctcccctgattgattcgtcgaccaagcggtggccatggcgttcgggcacacgtgcgggcgcaactacgttcgcatccaggcgtcgtgctccgggagaaaggcgctgcggtcgctggacgcgaagaaggcggcagcggcggcggacggcatgctggcgcagcggaacgtggaggcggagctgttccgggggcggcgggtgtcggagaagtcgaaccgggagaagctggacgcgttcgcggcggagctggtgaaggagcagcagcggcgggcgcgcagcccgggcctgcccaccgtggtgatcaggcaggcgcgccccacggccacggccacgccgcgactgtcgtccgccaccaccgcctcctccgccaccgtccggaccgcctccaccgtgccgtccccggcgtcgcagggctcctaccagcattagccgccgacggcggccgtcgtccgtcctgagttttgtacatgccgccgtggacagaggagtgcatatgcgacctccacccctccctcctctccctctctctttttttacccacacgtcgatggcgatgagccactgatatgtgggtccagccgtccaagacagagctaaaacgtggtgaaagtaagttataggatggatgtagtaacttatttattatatatgccgcccaagtttgagaggaaacaaaaaaaaaggtgaccaccaccgtgtttcgtgcgccgacgccgagcagtatagcgatgtagcgtggaggaggaatgcaaaaaaaat

SEQ ID NO: 19412 - DNA, 2658 bp, Zea Mays
agtaaaagtaagtaaacaaacaagctagtagtaaatattctactcaatctacaataaaggatgccatggcaggtccttgccaaaaaatataataggataaacaaagatgtcaggttaactaactaactatggatcttcaggtcccccagggcaacaactgtgcaccgctcgctgccttctctaccgtgaccgagagggtgagagctcccagcccttcctcctgtagccaagatatatacctaaaggttgaacaagcagcagcagaggcaaagccgttagccaatctgctgttgcgtgttgcaccgatcaacgtcggttcccagcgcttgctcgtcaagcgtgtcctgctgctgttctctgctcctgcttgccgcgagagctcctctcgctcatctacccaaggtcctctcggcgccgagatgtgagcttatctcttgaccggttcttgcttccttgatacagcgctagcttatgcgtgcatgtgcgcttggtgcaggtccgacagcaacgacttcgtcgagctgctatgggagaacggccaggcggtggtgcacgggaggaggaagcagcatccccaggccgccttcccgcccttcacctgcggcgcggccagcagcagtagagctcaagaaaaccagccgggtactaccgacccggtctcgctgttcaagacgggaggcctcttcgccgacttctcgtccggcctagacgccgcccgtggcaacggtgaccttgacgacaccgtgccctggatccactgccccatcgtcgaggaagacagcgccgcacccgcacctgccctcgcggagggctacagcccagatttcttctcggagctccatgcagcggcgttagcagcggcggcggcagagacgaacctcagccctctgccaccaccggtccagcacaacagaagcaccccggttgccaccaccagcagaggaccagaaccctcgaaggaagccccgcgcataccagtaccaggtccaggcagcaggcccgagccacaatctgagttcgcggccaccaggaaacctcggccggagagcggtggagagggattgatgaacttctccctcttctctaggcctgcagccttggtccgggcaagcctacagaggccaccgccaccgcagacaggcactgacaaggtgtccaatgtcaccacgagcacccgcgtggagtcgacggttctacagtcggctagtgggccaagaatcgcccctgtgttcacggaccagaggacggcgtggtcacaatccaaggaggtgcggttttcatgcgcaccagcgctggcggctggtaacctgcaccaggatatgcctctgggaagacctggcaacaacatgactccccaggggaaaatggagaccaaaaaggcttgtgaggttgcagtcgctactccatcgctctgctccggcaatggcgagtcctggcgcgaacaaaagaggaagagtcaggccgaatgttctgcaagtcaagacgatgatcttgatgatgagtccggtgggatgcgaggatcaggcggcagaggtacgaagcgcagccgcaccgcggaggtgcacaatttgtccgaaaggaggagaagggacaggatcaatgagaaaatgcgcgccctgcaagagctcatccccaactgcaacaagattgacaaagcctccatgctggatgaagcgatcgagtacctcaaaaccctccagcttcaagttcagatgatggccatgggaagtggactgtgcattcctcccatgctgctgccgcgagccatgcagctgcaaattccttcaattgctcatttccatcatctcggcatgggattgggttatgggatgggtgtcctcgatatgaacagcacagcggcagttccatttcagcccatccctggtgctcactatacttgtccgatgatcccaggcacgccaccacaaggtcttggaattggaatgcctggcacaaacacgatgccagtgtttggactccctgggcaagcaatccatccctcagcgtctagcgtacagccattcccatcgttggcgggtcttcctgttaggccaaacctggcacctcaagtcccagccgtcatggctaacatggtgcaggagcaacagcaaggcgtagcgactcagcagcagcagagtctgaataatgaagctcaacagaaagcaaataccggagatccacaaatactacaaaaatagatgaagagatcttcgccagtaatcagtttctggatggtggtggcaacaggactaatactatagggagaaatgaggctgaaacataaaaacggtcagcaagtgccagtgtgtaacctgactcgagctaaacttgacacaaatcatggaacttggcagagcgttattatcctaatagataacatggctgatgattttcaggtctcgactaacaagctgcaggtgtgaatatcagcaccaactcatcatggaagagcttaacgagtttcatgattcacgaagcagatctatcacttgaaaaaggtccaatcaatcaagatggatttggtggcgggatgtctagcttagcgagctaagatgctccaaagttttgtgtaaaatgtagatggaaccttgttacaagtaacatttcttggcagcgatgccgttttcaggtgtttttttttttttgcaaatgcaattt

SEQ ID NO: 19413 - DNA, 2628 bp, Zea Mays
gagtaagaagaaagagggcggcggcacggcagagccaaagccgaggcgagccgagcagtacatgcatcccgcttcccgcattcctcatcgaggtccggtccagcagccttttgcgccttcgtgtccctcccctccactccctcaccgggggctgggctggtggggagtggggactgggggcagtcgccacgccgcagtccattctttcgtcacccatcgcagctccaacacctctcgctagtcgtcatggcggcttccgcggcagcgttccccctcccaccgccgacgcctcctcttcgactttcacatgtcttttgatatcacagaaaaggattgcccctgccttcactgctgtgaatgccagggacgtttctgtcgccctacaatatatggacattggacttgatagttggcaaactttcttctatatactggacgttccagctttcgccaacctgctgctttaaccacatcttttccttctttcccgattttgcctctcactatcatcaattaccgctaaaagtgaaacaagtgttctccctatggccaagacatcacttcctcctggattccggtttcatccaactgatgtagaactcacagtctactatttaaagaggaaactactgggaaaacacttacgctgcaatgctatcactgagattgatctatacaagttcgccccttgggatcttccagagagagcttccttggagagtaacgatctagtgtggtatttcttttgcccgcgcgataggaaatattctagtgggttaaggactaatcgctcaactggagttggatattggaaagctaccgggaaggacaggccggtggtatataattctaggactgttgggatgaagagaactttagtgtttcatcttggcaagccaccacgaggtgatagaactgactgggtaatgtatgaatataggctggaggacgaggaaatagctgcttctggtgttaaactggatgcctgcgttctatgcaaaatctttcagaaaagtggcccagggcccaagattggcgcacagtatggtgccccattcaatgaagaagactggaacgatgccagtaatgtagagtgttctccatgtgtgccttctgtggccccttgcgcacctgaatcaagtcgtggtgggttgaattctgctggtcaacgcctggctgtgagttatgatgtcaaggtttccttgggctcctcggcagaaggtatcaacagacctgctgtcaatggagttcatcctgtcagaccttctcctgatgctcctaatgactgcatacacattcaattgctggctgaggttatgagatgttcctcaacctcaatgcatgttttacgtactgctggtgacgatggtttgctggctgattcaactgctgactacagtagtgataatagaatatctttggatgctattgaaactatattctgtgaagtggatgagcttgggccccaggctatggtgaacaatactaaccattgtgactcatgcggtgagtatttgattcaccctacgatggtggcacgaggagctgaacagtacttagagctaaatgacctgtccttttcgctcaccgatggtcctgattcctgtggcgtgcttttctctaatggtgtatctgttgagcaactaccggatcttgagctcaggtttgagcagttctctcctgaccacatctccaataccgctattgcttccacatcaacaacggttggttcatctgcttcagtgcccttattggaggatcacaggacctgattcagaattggagtcatctggcgcacatgttaattgaatctaggaggatctgcaggacaaagctggacaagagaggtttaggaccttgaccagctcttactacagaggggcacaggggatcattatggtgtatgatgtcagtcgacgagagacgttcaccaatctttctgatatatgggccaaggaaattgacctgtattcaaccaaccaggactgtgtaaagatgcttgttggaaataaagtagacaaggaaagtgagagggctgtcacgaaaaaggagggaattgaatttgccagggaatacggttgtttgtttctagaatgcagtgcgaaaacaaaagtaaacgtagaacagtgttttgaggaactggttctaaagatcttagacacgccaagcctcctggcggatgcttcctcagcaggggtcagcaagaagaacatcttcaagcagaaggctccagaagctgacgccgccacaggcagctgctgttaacatggttttggtcctgtatattgctatatgtggtgaagacaattggcagcagctatataatgatgtatcaagttaaacttacctgacaatatgtagtcttgcctcccaaccgcagctaagtagcagaggcacgggtgggtggcatcaataccggcatgatacagtatcagacactgtcatctatataagaaacagccatacttcggttcgttggttgcctaagctcgctactccaagtatctcgtcgtgcagatgatatttcatctcaatccacaataacacatcttgtggaagcagattacgtttgagctaattgtggacgaataaagattaatggactctaaccatcaattagctattact

SEQ ID NO: 19414 - DNA, 1733 bp, Zea Mays
gttttatagtcgacgaacaaaatccgtagagttcggtagtcgtgagagttagggcatattggaaaaaaaaatcaaaaatcctttctttatgtgttttttcttttaaaaccgaactgatttctataaaacacattcatgcgtgattcatacgaaattcttacgttcttagaataaaattcgaaaaaaagaccaccaaactcgaccaacggccagatatggccaccgcccaccggctgaatacctccactgctccacacgtccctgtgccgccgtatcttggtgcgctcttgctcctaggtaacatacatctctgtccctccctaggagaccgagacagcaccgtaatggcgtccccctgcggcgatgctgcggcggcagccgagctcaccagcctgcgcatcagcgaaggagctgggatccctccgcttcccggacggcgaagcgtcggcggcaatgcagctgagggagaagaggagggtgataagaacaagaaggcgaggaaggggaaggctggtacgcagcggatcgccgggtgggggctccgcgagttcagcaagatagtttctaaaaaggttgagaccaaaggacggactacttacagtgaggttgcagatgaaatttgtggagagctgaagttgactcttattggtcaagagtttgatgagaagaatatcaggaggagagtgtatgatgcttttaatgtgctaattgcactacgtgttatcacaaaagatgaaaaagagataaaatggatgggcttgtctaatttccaatatgaaaagataaagttggaggaaactcgcaaagaactcatgatcaggattaagaacaagaaaaaacttctccaggaaattgaaagacagtttgatgacctccagaatatcaagtttcgcaaccagtttctacagaggccagcagagagtgtgaatggtatctgccttccattcttattggtcaaggcatccagaaaagcaagggtggagattgagatctcagaaaactcaaagtttgctggtttggacttcaactgcgtaccattcaccttgcacgacgatgtatcaatccttgaagccatcaggtgtaatagcgtaaaaaaaagctagctacttgggcacgcttcattagatgatcggggaagtggtcgatctgttgaaagtgacgaatgatacgatcatttccctttgcacagccatcagcatgtgtaggtatataactatatatatatatatagtacgaaaacttgacctcgtcttcaaggctgcctttctggcatggtgaagctttaacctgcaaattttgcccctttttgcgcctagcgggttattaggtcaggtagattattctcatatataatgctatgtattaactacattgattatagctcagattcggaagcttgtgcacgagctttgctggttgttatgatgttcgggcgttttgcccttggcaaaccatgtgtttctctagctgcagtgactacgagaatgttatcttccgttcaatatctatatgcctcttggctcctgcggtccactgtcctggctgagaagccttgcgaaacatgtatgctaatcttttctagtccttttttgaagtacaatacaaacgacccagctcaatttataggaaactcaaggagaccaggtagtatggaccttcggccagcagattgtgcatatgactatgtaagttgttaggcattggccatcagattgtgtatatgaatatgtaaa

SEQ ID NO: 19415 - DNA, 1025 bp, Zea Mays
gtaccagtagcaggataactaaacgaaaataaatgaatgaatgaatgaacaagagtaagtaaaggggcgggttgccgctgaagactttcccaaacccaaactaacccttctaatccaaggctgtgaagggagctgctagccgccaccagccgccatgtctggagggatcgcgcgcggccgcctcgccgaggagcgcaaggcctggcgcaagaatcacccccacggtttcgtggcgaggccggagtcgctgaccgacgggtccgtgaacctcatggtctggaactgtaccatccccggcaagcacgggaccgattgggaaggtgggtactacccacttacccttcatttcagtgaagattacccaagcaaacctcccaaatgcaagtttccacagggttttttccatccaaatgtttatccatcaggaacagtctgcctctcaattctgaacgaggatagcgattggagacctgctatcactgttaagcagattctagttggaatacaggacttgcttgatcagcccaatccagctgatcctgctcagactgatggttatcacctattcatccaggatcctgcagaatataagcgacgtgttcgtctgcaggccaagcaatatcctgctctggtctgaggatgttggcatactagagatccatgatccatcctgcaaatctgcatggtagttgcaaaatgtatcgtctcaatttggattagacaggatacaagttatctggcggattgcccagtgtaaacctgaaccttttatgatgtgtggtgtccggtattggcagcaaaaaacaattcgtttactgctgttgtcgtattatacataggaggggccttcgtcagggagatcctctctcacccatgctgtttattttagtaatggatgtcctaggttttctgttttcgaaggctgaagaagaggggctgctgcaacagctttcatgtagaaagaaacttcatcgggtctccatggatgcatctgggtagcacaataatgctcagaagtcaaaagt

SEQ ID NO: 19416 - DNA, 1371 bp, Zea Mays
ctgttcacatggtcacggtgccgttgcaccttgcaccacggagttgttttgcacaggataattgctgaatcagcacattctgcatatgacaaagctgctcaatacttcaatattaaagtgcggcgtgtacctgtgaacaaagagtttcttgcagatgtgaaaggattcaaacgatgcataaatggaaacaccataatgatggttggatctacaccaggatttccgcatggtttaattgatcctattgaggaacttggggaactggcttcgcgctatgacatttgcttgcatgttgatttatgccttggtggctttgtgctgccttttgctcataagcttgggtaccctattcctccctttgatttttctgtcaagggtgttacatccatctcatctgatgttcataagtacggattagcaccaaaaggcacaagcattgtcctgtacagaaatcatgaaattagaaagcatcagtttgttgctgttactgagtggaccggtggcctttacgtttctcccacaattgctggaagcaggccaggtggattgatagcgggagcttgggctgctatgatgtctctcggactgaacggctacttggacagtacaagccgtatcatggatgtttcaaagaaaatacaaagagggattggagagatcccagggttgtttgtgatagggaaaccggatatgaccgttgtggcgttcggctcagacgttgtcgacatatttgaggtgaacgacataatgtcatcaaaaggttggcatctcaatgctctgcagagacctaacagcttgcatatctgtgtgacccttcaacacacgactgtttacgaccaattcctgaaggatctgcaagactctgtcaacactgtgaaagcaaacccaggcccgattagcggcggaaaggctcctatctacggcgccgcagggaagatgccggacagaggcacggtgagggagctgctcgtggagttcatggacagctcttgctgaattcattatggcttgtgagaagaatttgttcttgtacatgaaacttctatttctttttcaactgaaaaggcagagctcctaccatttgtttaaaaaaaaaacattatggcttgtgaaaaacagtcgcagggctgtgatttgttggcctaggtatacaaagttgtcattaggaaaagcggggaaagtcattgaggcgatacaaccacatgtattcacgattacaagaagtttgtccgtatgattgtatatcaatatcacagcatgcatacgcaatgtgtctggttatatatttatctgttcctataaaacattggttgcatttcacgcgtactcacccccgtgaattctcggtaaaataaagatagaaatgactaa

SEQ ID NO: 19417 - DNA, 1001 bp, Zea Mays
agagtggaccgagaagggatttcggtagtgggcctgtgcaggaaggtgattcgacccagattctccgggagcttcgcgaggagaccgcggctatgagggggagccagatgcaggtttctcccgctcaggctcagctgttgtcaatgcttgtgcaaatccttggggcgcgccgttgcattgaagttggtgtgtttactgggtattcatcattagctgttgcactggcccttcctgaatctggtcacttggttgcttgtgagagggatgacagatgcctagaagttgccaagaagtactaccaacgtgctggtgttgcacataagattgatgtgaaacatgctttggctgcggattctctaagatctcttcttgattgcggcgaagcttccagctatgacttcgcatttgttgatgctgacaagagaatgtatgaggaatattatgaacttctactgaagctagtaagagttggtggtttaattgtaatggacaatgtcctttggtatggaagggttgccgatctactggttgatgaccaaaagacgatcagtataaggaacttcaacaagaaagttttagaggacaagcgtgtcgatatcagcatggtgccaattggagatgggatgacaatttgccggaagctagtagatacttgagttcacaacgtttttgtgtagatgcggaaaacttcttaccaaggtcaagccctgaaaaatcaaactgtggcctgggctctactaaccacagtggtggggaagcagttggtggcagtaattttgattcgctgcttagaacgctgagatgagtgtggcgtgtcttgcacacagtataacttgaattcaagtacaaaaccagtgttatggtgttttgttgatagaccacagtttcatctcaggtgtatatggaactatggaagtgtggtgcacgtattaaattgtgagtcgtgatcatccattttatatctaatggttgctctatatattttacaaacaacatcttct

SEQ ID NO: 19418 - DNA, 1431 bp, Zea Mays
gtacgagtgctgctacgtgaccttgtcggatacatggtcgctaaccccaagacattcccatccggaatcaaggccctggcagattacgttcacagcaaggggcttaagcttggcatctactcttccgctgggacaagaacttgcagcaacaggatgcctggatctctgggctacgaggagagggatgctaagatgtttgcgtcatggggcgttgactacctgaagtatgacaactgctacagagacggcacgcctgaaaccgtgaggtttgggcgcatgtcccgagcgctggtgaactctggccgcccaatcttctactcgctttgcgaatggggcttcatggaagttcccaaatggggcggcatgtacggcaacagctggaggaccaccggcgacatcaacgacacatggtcaggcatgctggacaacatcgacctgaacgacgcctacgcccggtacgccaagcccggcggctggaacgaccctgacatgctggaggtcgggaacggaggcatggcgtacaacgagtacgtcgtgcacttcagcctctgggccatcgccaaggctcccctggtcatcggctgcgacgtgacgagagtctccaatgagacgctcggaatcctctccaacgcggaggtcatcgcgatcagccaaggtcaccacaaccacaatgcatcttcgtccttctcaccagcgaaacctttcgcatcagttcttgactcttgtagtcttcgtgtgtgtgccaattatattgcttgcttgtgtccgacgcagatcggctgggtgtccaaggacagaaagtgagcaagtacggcaacgatctcgaggtatgggcagggcagctctcggggcacaggaaggcggtgctgctgctcaaccggggggccacgcgctccgcgtccatcaccgcggcatggccggacgtgggcatccgccgcggcgtggccgtggaggcgagggacgtctggaagcacgagacgctaccgggctggttcaccggcagcctcacggcggtggtcgggccgcactcgtgcaagctcttcgtcctcacgcccgttcctagctgacggcgccgctggagatctgtccatccaatatctgcccgtggatccagctagagttattaattgtatgatttcagatactgtaactgccttgtgactgctccgacaacaagagctcatcaccatctgtctaatgatttgacatggtgcaacgctcagtttggcctagatttgagatccgaacgtggcgaataaaataataaaatgacgtctcctgacttcttttagcagtttagtaattaatagtaaggcttcgtttaggcatactggttcacttatactgtaaaaacgccatctcttcgttcttaagtgaaagtaacgtgtaaacttcgcttagaaatcttatttcgcttgtcttcgtaaatag

SEQ ID NO: 19419 - DNA, 1850 bp, Zea Mays
ctaccaaaccgcggtctcggctcgctcgctcgcttgctgggcttgcagtcgcagcctcgcaggacgagataaatagtccacccgcgccgagcgccaccgtctcatcatcagtcatcacataccaccaagaccacatcggcacatcgacgtgagctcgtgcgtgagtgccctggtcgacgaccgctcgcgcgccatggactcaacgacgacggcgccgctgctgcagccgtccgccgcctcgagcaaggaggggccggggccggcgccggctcagcacggtgagggcagccgggagctggaggcgatcctggccgacgcgtccaagccgtgggcttggcgggcctgggaaggcgcccgcctggagctgccgctgctgctgcgggtggcgctgccggcggtggccgtctacatgatcaacttcgtcatgtccatgtccacgcagatcttctgcggccagctcggcaacctcgagctcgccgcctcctcgctcggcaacaccggcatccagcccttggcctacggcctcatgctgggcatgggcagcgcggtggagacgctgtgcgggcaggcgtacggcgcgcacaagcaccgcatgctgggggtgtacctgcagcgctcgacggtgctgctcatggccaccgccgtgccgctgaccgtcgtctacgccttctcggagcgcatcctggtcctcctcggcgagtcggagcgcatctccagggccgccgccgtcttcgtctacgggctcatcccgcagatcttcgcgtacgcggccaacttccccatccagaagttcctgcaggcgcagagcatcgtggcgcccagcgcttacatctccgtggccacgctggcgctgcacctggggctcagctgggtcgccgtctacaggctgggcctgggcctgctggggggctcgctcgtgctcagcttcagctggtgggtcatcgtcgcggcccagttcgggtacatcgtcaccagcgcccggtgcagggacacctggacgggattcaccacgcaggccttctcgggcctcggcaccttcttcaagctctcggcagcgtccgccgtcatgctgtgcttggagacttggtacttccagatcatcgtgctcatcgccggcctgctcaagaacccggagctctccctcgactccctctccatatgcatgaacgtgaacgcatgggtgttcatgatctccgtcgggttcaacgccgcggcgagcgtgcgggtcgggaacgagctcggcgcaggcaacccgagggcggcggcgttctcggtgttcatggtgacgtcgctgtcgttcatcgcggcgacggtgtgtgccgtcgtcgtgctgtgcctccgcgaccagctgagctacttcttcactggcggcgaggccgtggcgcgcgccgtgtccgacctctgcccgctcctcgccgccacgctcgtcctcaacggcatacagccagtcctctccggcgtcgccgtgggctgcgggtggcaggcgtttgtggcgtacgtgaacgtgggttgctactacgtcgtcggcgtgccgctcggcgtcttcctcggcttctacctcgacctcggcgccaagggcgtttggagcggcatggtcatcgggggaaccttgacgcagacgctcatcctgctctgggtcaccgtcagaaccgactggaacaaggaggtggagaacgccaaggcgaggctggacaagtgggacgacaagaagcagcccctcctagtcgaagattgaaggaagaatctagtagatcacgcagtgtagcgcgtgctggtggattttttgtgtgtcgtgtgtgtgttttggagtggagaacgccagggcaaggctggacaagtgggacgacaag

SEQ ID NO: 19420 - DNA, 115 bp, Zea Mays
ggttgcatatgtatgagaggttggccatcaaattgatttactgtgatatcaacattagtcttcttccttcggatcctttttgtttttttctctaaaccaccaataggccttgctg

SEQ ID NO: 19421 - DNA, 75 bp, Zea Mays
gttcaattgcaccgcccgtcgattaacgctccaccacagcctccccacggatcggtcaactactgagaggcacag

SEQ ID NO: 19422 - DNA, 3499 bp, Zea Mays
gtcccacgcggcagagacctggccacgcctcacgcgcttccggccttccgctacatgtcgtctcttttcgtttctcactttctctcttcgttcccaatttgaaggctgcccaacccttgcgccggtaggtggtggcggtgaggatagagggttacctgaggaggcagtgatggcggccacgattcagtacaaccggagcaacccggcggtgaagcggatcctgcaggaggtcaaggagatgcagtccaacccctcacccgacttcatgtccctccccctcgaggaggacatcttcgagtggcaatttgctatccttggtccgagagacagcgagtttgagggtggaatttatcatggcaggatccagctaccttcggattatccattcaagccaccgtccttcatgctacttacgccaagtggacgctttgagattcagaagaagatttgcttgagcatatccaattaccaccctgagcactggcagccttcatggagtggtgagtaggggtggtaatggatcaagatccaaatgttttttcacaatacgttagggcccttaattaattttagttcaaaaatgaatagtaatagagctccatcctaatccgatttgatccttaaaatttatagtgtaaaatctagagcccattaccacccctattggtgagtaatctttagtcatttgtttataaggctattctcaatggggagtttatgttgtttctaagactgccgcatcatgtaaaaaataaaacatggataaagcatccatcctcactgcatagtttcattctatggtttcaaatacatttacttcacgacttatagagtttgtaattgtgcccagagagttctctcttaaaaatgttgccacgtcattaaaaacgcttatgtggcaccctatttaatacaaatgaaactcacataaaacttccacctagattggcctaaatggccgctgaagtgctctgtcagatttgctaaagggctcctgtattaagctgaaaagcaccattattcatcgcccacttttatatggttttgtgggctattacgagcatggtgcaaaataaatttgttttttcttttggtctttggatttccatcaggcaagtacttgccttttggctagaccaaaagtaaatatgtttcttcattcctaagatgaatatatgaataatactctagttgggtactagggttggtttgcttctgagagtatggaattttgtaatactagggttggtttgcttctgtgactatggaattttgtaaacagcttttaatgcatgttggagtatgctgtacattcgctaaattagtataacccggtcgataaaagcactcaatgtttttgacattgggttttcaactcaaacaatttgttgatagcagatttttttactttatctgcatttcaattggaacgggttttccttgttcagttgctataatttggaaatagaccaaatagttaatttgatactccctccgtcccaaaataaaatttgttttacctttttagttgattcatacaataattaatgtatctgttttatatgtttttagattcattatcatccatttgaacataaacataaaaatcaagagctaaaacgactaatattttaggacggagggagtatttattaattttgtatgcttctttgaaaatgagcttggtgttgtatttgcaaatcatcagatggtgactatatgggaatgtatttggttacccaatgtggaatggtttattttcatgattttgtgttaacagaagttttaacctttaagggtctgtttggttgggctgtggctgtgaaaaaagttgctgtgggctgtgagctgtgaaaaaagctgctgtaggctgtaagctgttaaaaaggtaaaaaccgtttggtggaaaccactaaaagtcattaaaaattcttcgatatatgttttcacagttccatccgaaaagccactaaaagcaggtccagaggtgttttcagatttgcactacgagaaagtcagcttttagaaaaagctgcttcctggatctagccctttggttggcttttggcttttagggaggcaaaagccaaagccaaaagtcaaaccaaacacaccctaagtactgaactaagcaaatcttgttgcagtccgcacagctttggtagccttgattgccttcatgccgacgaacccaggtggggcattgggctcactggattacaaaccagaagacagacgagcacttgctataaaatcacgtgaggtgccgccgaaatttggctccccacaacgtcagaaactaattgatgagatccatgagcaaatgctcaacaaggtagatgaaggtggcaacacatccaagtccatgtcaggctcgtcgagtggccatcctgtgcctgaagctgaatcgctggctgcagaaaacacgggtgaagcatcagcagttgaggttgccaaccatcaagtgcctgaagcgagccgtagagaaagcattccaagagttccttcgtctctgcagaatgctgctattgcaacccagaagccaaagcatgacaggctattgaccttggccgcacttgggttgactcttgctattatggcactagtgatcaagaagttcttaaaaatcaatggcttgggcggtttcattgagggcaagttctgagtaggattgtgcataagttggatgtacgagatgactcattcctcgtactcagcatatgctataagctatataaccccgtaagatttgtaattgtttagttatagatgaaatcaaaatggaacggtactatcaataccccattgtatatgtacactggattgaaaattgctgagtatttaagcatctgatgtatatattgtgctacagcatgcactttgtttggctgccgtttaggactgtttagggttaggagaccagaatcgtcaattcccaattttccctcgagggcacatgattaagaaattcatgaaacctggtgttgcagaacctgagttggcactcggaacagtggtgaataggcatggttttccaaacataactgattccatccgtattttttttccttttaagggcatgtacgaatatgagctcttcgattttcaaaatataaaagacagcatatttgaatatcgtatgctaaactttaatataatgctaaaactagccggttgcccgttcgttgcgacggtccacaacaatatttatataaattatccactaaaaagatcttaagattttttattggttgtctccgctccccgcataatatttttgatttgactaactgatgttgttgtttattttatccaatatgtcttggtacaacacgaccaatgaaggcaacgattagaataaagttcacaacgactgactgaacgaaccgagattatagaatgacataattccaccatacagagaccaaataagaggaagtttgtgagctcaagtttctaaaataaatcacatgaacttaaacttataaaaaaagataga

SEQ ID NO: 19423 - DNA, 2152 bp, Zea Mays
cttggtattgcaatagatgggggaaaagacagtctttccatggcagcccaatgtgatggtgaagtcgtcaaggctcctggaaatctggtcatcagtacttacgtgacatgtcctgatataacattgacagtaacccctgatttgaagcttggtaatgatggcatccttcttcatattgacctcgctaaaggaaatcgccgtcttggtggttctgctcttgcacaagcatttgatcaaattggaaatgattgcccagacattgatgatgttctgtacctgaagaaggtatttgaggccattcaggaattgctcagtcagcgtcttatttcagcaggccatgacataagcgatggtggccttattgtgagtgttcttgagatggcatttgctggtaattgtggttttaagcttgacatagacttggaagataggagccttcttgaaggactttttgcagaggagcttggccttgttattgaagtgcactcgaaatatctcaatatcgtgaagcaaaaacttgaagcaacaggcatttctgctaatgtaattggagaagttacttgctcaccagaaatagaagtttttgttgatggcaatctgcatctcaaggaaaaaacttcagatatcagggatctctgggaggaaacgagcttccagcttgaggagttacaacgactgaaatcttgtgtcaaacttgagaaagaaggattaaaaagcagaacatcaccatcgtggtctctgtcttttactcccaaattcacagatgagaaactgttgattgcttcctcgaaaccaaaggtcgctatcattcgtgaagaagggagcaatggggacagggaaatggctgctgcattccacgctgctggatttgaaccatgggatatcacaatgtcagacctcttggcggggaagtcttcgctaacagtgttccgtgggattgcgtttgttggtggtttcagctatgcagatgtgctggattcagcaaaaggttgggctgcatcaatcaggtttaacaaacccctcattcagcaatttcaggaattctaccataggccagacacgttcagccttggagtatgtaatggttgtcaacttatggctcttcttggctgggtgccaggatctgatgttggaggttctcttagtaaaggtggagatataacccagcccaggtttattcacaatgaatccggtcgtttcgagtgccggtttactagtgtgtccattggggtttctcctgctatcatgttcaaagggatggaaggttctaccttgggtgtttggagtgctcatggtgagggaagagctttcttcccagatgaaaatgttctagctactgtagtgaagtctaatctggcacctgtgcgatattgcgatgattttaacaacataaccgagacctaccccttcaatcctaatggttctccactaggtattggagccctttgctcccctgatgggagacaccttgctatgatgccacatccggagcgttgcttcatgatgtggcaattcccatggtatcccaaggaatggcaggttgagaagagtggccccagcccttggctgcgtatgttccagaatgcaagggaatggtgttcatagtgcagctgtagcgatgcggatggttgttttcatctgatgaccccttccttttgcggaataaagaggtgttcgacccgcagcgcgttatccaagctgataacaaacgtgtcaaaattgaagttttatacatagaaaactgccaggttttttgcgtagcctatgccaaagatgcgtaaactgtcagccccatcagggcttgtttggtaatcttggattagagtggattgaagtggtataagatatattaaagtgtaatataaactaatttccctttaaatctctaaaatacacctcaatccacttcaatccctctttatccaaacaaagcctcagtgaatttcccaatcaacgtagagaatgcttgctgcgttactcaaatctgatgcttatgcaatggtcgtttttgtgctgtctgtctgatgatgagtaagtatgagttcattcgcaaccagacaagtcattagtatgaattcagtcgcaaccagacaagtcattgtaatagcttgagataattcatctggtgatgtggcaaattcttagagtccca

SEQ ID NO: 19424 - DNA, 1404 bp, Zea Mays
ctaggttaacacgagcatgtcattggccttcaagtaatgaatattgcatgcaaagcattccgggccagagatacacatggagcgcttatccctatccccgatgcatgtacaagacttgcatggaaactagatttggaatacaaaagtgccaaacaaggtgaaactttttatgtggatttagttcacttcaaggatcggctaaacaagagccactagttccccctccccgccagccgccatcttggggcccttcttgcccgcacgtctagatctaggcgatgatggtgcacatgcacatgtggggtggcaggctctccccgttgccggcatcgacaacgtctcctgcggcggcatttgcttcctcctagacggcaccttcatctgcacggccgcgcggcgactcacagagtggtggtggatgttacggcgtccatgggcggatggggagtggatgggggactgctcccctacacccagctccgggttcttgtgcctcaggtgcccacgacctgttccgttggcccagagctccttccaggcaaacgttgcttcctgctcctcggggcagcccctgcatgctgcgacaattcagtgttggcatcggcggccacgtgctcgccgatgccatgcccaggattcctggcctcatgtatgtgcccctagagctttggttgctgctagagctagccctatggcgccgccatgcccaggattcctagcctcatgtatgtgcccctagggctttggttactgctggagccagccctatggcgccgccatctttggtgggtcagctgcaatctaaatcatgcctggtgtgactatctttcgcttctttgtcttcatatatttgcaagtgtcgtgcacacgaacctaatactagagtcatcttggagatgattcatggaatcatttgcttatgggacacattttatttttagatgcaacctgtggactttgttcgtgagcctatgggctagttcacgactctgtcttcatagaacagtttgcctaaaaattggatgttgtcacggatctcatggccgtttgatattatcaagagttggtagtatgccagcatgagcatggaaagaaggtggaggcaaggccagtgatctttgattttggtgggccttttaggtaccggactcgtcgacatcggggaaaatctttaggcctggcctttgttgtttgtgcttgaaattgatcttgatgaaggtattgtctgaagtatcgagggtctttctcttaggtgaaaacctttgatctgacctttgttggttgggtcatgtcaacgatgacattcttgtatgtcgtgttctttctgaagacgttgcttatggagagcctccgtctcagttctagtttgcctagttagtggatgacttgaagaccatgttgtga

SEQ ID NO: 19425 - DNA, 2032 bp, Zea Mays
tggttaggatttgtgatattgataagtaagataaagtggtactatagtatgatactgctgtggatgttttcttttgtgacagcgaactctttatagaggattcatgtcaggtgcttcttttcttgcccattctctatgtgcttttggtattggacccccactccccccatccccgtacccacccacacaaaaagagctaactaagaatagcccatgtgccattttgtcatttagatttgcatcttaaatgttgattattttatgaaatactgtgtacacaacacgaggacagtccactctgacttaacttactgagtcacttgagtattcagctcatggagcagatttatatgtcaccgtgcaaactttgttttaaagaaaaatggtcttatgctgctgaaaacttgtcgcttaagttatatgtcgtagaaagaaattggtacactcaaataccatccaaagtctgctcggttatactttattactcacggtaaggtcccatacttggaggagatgagaaagaagaaagttgaaagatgggaccaatttgttgatgtcatagagcaaattaagaaggttgcatctgaaatcaggcctgcagattttgtaccctttagaattcatgtggatcagtctgatcagtctttaagaaagctggaggagctaacgaaagagctgcaatcccttcagaaggagaagagtgatcggctgaagcaagtcatggaacatcttaacactttgcattcgttatgcgaggtgcttggtgtagacttcaaacaaacagtaaatgaggtgcaccctagcctgggtgaggctgatgaatcaaagaacctaagcaactgtacaattgaaagccctgcatcagctacaagcagactgcgtgaattgaaagtccagaggatgcaaaagcttcaagatttggcctctagcatgcttgaactttggaatctcatggatacaccacttgaagaacagcagatgttccagaatgtaacgtgcaatattgctgcttctgaacatgaaataactgagcctaacaccctctctattgacttcctcagctacgtggaatctgaagttttaagactcgagcaacttaaagcgagcaagatgaaagaccttgttataaaaaagaagacagaactggaagagcataggagacgtgctcatttgtttggcgaggaaggctatgcagctgaatttcgcgatgaggctattgagttggatgacacaatcatcaaaaccattgagactgctcccaacaatgaactgaaaaaagcaaaagaaatcattcaacgtattcgccgaagagaactttacaaggctggaaaaaagttgcttctcattactaattcagatttccattatacaaacaaaatgatgaatcatgcattcaatcgctttcttcctaatgatgtgggatggagagatctgtttgaaatggttatagtctctacaaggaagccagaatttctccagctttcacatccattgtatgaggttgtaacagatgatggactgatgcatccctgttttaaagtaaattcagttttgcaaccagtattctgttccaaaggacaaactagagcatttcaaaaatattactgcacaggacatagtttgttcgcagaaatcttctgaggtgctgctgaaggaagaggatgttgcagtaagcaatgttaagatagatcttactcgtggaaaagataacccccttgacagcatcaagttctttaaggattccggctctcatcaagtgactcctcccctcacgatgactttgcggacagatgtctcaattctagtggtggagctacgaacaacaatccgatgtcctgatcgagagcgatggagctaatgtttgaacttgtgtttgaacttgtgaactatggatgtgaacttgtgtgaatttgtgaacttatgtatttgaacttatgtgaatttgtgaacttatatatttggacttgtgtgaatttgtgatatgaacatatatcaatgtgtttgaaatctgtattgtatgtgatattctgtg

SEQ ID NO: 19426 - DNA, 732 bp, Zea Mays
aagtacgatccctccaccacggtctcctcgctcaaggagttcatcctcgctcggtggccgcaaggatattggagaataatcggacacttgcagagtcccgtgttccagtaggagaggtcccaggaggtgtaattacaatgcatgtggtagtgcgacctccacaagctgacaaaaacaagaagcagcttgcgaattccgtcaagcagaacagatgcgggtgcaccattctctgataagacgcctgcttgatgttgtacaatctgtgtagtcttaggattttgtatctgctttgctgtgttcacacaagcgtgaattcattttgatatccagtccttgaagccattcgagtccagaaacatacacactaaaaatccatcgaatatgaaggtttctggatggtagatttggatcgtcttgttccagagttgaggattggatgcttcctgctgtataaatggtgttgtcgaaactagaaaaaaaaactcttttatttcttttttcttttctgccatgttgacgttatatatatatcgattctttttagatcggttgctttgtctcgtctaacagaaatattgtactcagatataagttgcaaaaggagtaatgtatggtgttatggtaaaggggaaacaaagaggtgaaaagagcgcatggctagttttacatttgattctttggttaacctgacctgactgtgcatgcagtagctgaaggagcagtgatgtgttt

SEQ ID NO: 19427 - DNA, 1356 bp, Zea Mays
aaaaatactaatacagtatgaaagtgaaaatgagccggagaccaagactggggagacagcacagtcacggaatcaaaacacaaaaacgatttttacaaacaaaataaaaaagactttcctaaagagagagaaatgacgacaaaaacaaaagagagacttcaactgggcaggcgccgacggcgacgtgtgggtggtggcggctggtcccaagctcggggcgggcgcgacgcgcgagcaccgcaccgatgccgatgctcctcccaccccctcccctcccctcctcctcatcacccaactactacctcccatcccatccgcgccctccttcggtcctctcccatccgctccgctcgcagcccctccccttgccccccgcgatgtcgtcgtcgtcaccgccgccgcggcccgacgacgacgacggtgcgcaggaggtgggcgccagcgatgggaggtcgctgggctacggcgaggcggagtactgggacgcgcggtacgtggaggagggcggcgcgccgtacgactggtatcaacgctacgacgcgctccgccccttcgtccgctgcttcgcgccgccggcgtcccggatcctcatggttggctgcggctccgcactcatgtcggaggatatggtcactgacggctatgtggagatagtgaacattgacatttcgtcggttgtgattgagatgatgagaaagaaatacttcgatgttcctcagctgcaatgtatcctttgactgtttttatcatttcccccaatctattgtccattgatacccttatgaactgcagacttgcgcatggatgttagagatatgagtatgtttccggacgaatcgttcgattgtgcaatcgataaaggtacacttttcctgctatgatgttctgtttgtggccattgctgacacgcatttgaagtaatttcactcacttaactttgttaaattcttagggactctggactcattgatggtaagtaggagtaggtaacattaagtcaccatgtctttttccttatttctggacttcttcagcaatgccgtcttgctgctttcatagtgtggtgtggatgctcccctcagtgcagctcagatgattttggaagtggacaggttttttagtgtcttgctgcctttctgaagtatcactctgcagtgtcatctgggccaagatatcttgtaaatttcaacagccctgcagccttatcagttatacttttttattgcaggcttcttaaaccaggaggaacctttattttgataacatatggtgatccatcggtacgaatgcctcatttgaatcaatcagcatgtgactggaaagttgtactttatattctacatttctctgcctgtg

SEQ ID NO: 19428 - DNA, 1270 bp, Zea Mays
attgattgttctgttttctaaaacaaactctagagggcacattccgtatcgtgatagtaagttgacacgcattctccaacctgcacttggaggcaatgcaaagacatctatcatctgtactgctgctcctgaagagattcacattgaggaaactagaggtactcttcagttcgcaagtagagcaaaatgtgtaagcaattgtgcccaagtaaatgagattctaactgatgctgctttgctgaagaggcaaaaactggaaattgaagaacttcgtaaaaaactgcagggttcccattctgaagggttggagcaggttgtactaaaactacggaacgacatgcacaagtctgaacttgagcgtgatcgattggccatggaacttgaagacgaaagaaagttacggatgactctagagcaacatttgactgagcaacagaagctagaggccatatcgtcagaccactttacagattcaatccagctggatcttctgaaaactccagattcgaagtctgtaccagatggctttgttgcctgtcgctcacgttactcacaagatgttgagttcagcccaatacctgaaaatttggataatattgctgaagaagatctatggacacgtctgaacaaaggctgtgttaccgatcttgatatgcttgagatgacacctaatctcaaacgcgagtcatcctttctacaagaaaaatcatcagctgcgccattggaggaacctaccaacgccatatgccagaggttagcaaaggagtgcatctatgatcagcaacagcttgaggaatcaaaggcgagatgcgccaatctcgagaaagattgcgacgtgctgagggacgagaacttgtccctgcaacaggagctctccgagtccaagctagaggcggacagcctcgtagccgagaagcaggcacagctggatgatttgaggatgaggtgcgtggccctcgagagggatctctccagctccaggcaggaggcccaccgccttgccaccgagaagcaggagctggccgggcagctgggcacagagaggcagaagatggatgagctgaagcaggatatccgggtgatctgcggcgacttgctccagcgggaagggcagctcacgtcgatttacaccaagtccaaggccatcatagagagctgcaaggcctcccaggggtcagaccgatgacgccgagtcgccgccgaagatgctgccagaggcggcggatgcttgaccgctggcgacgacggcgagcagtaggatgacgagaag

SEQ ID NO: 19429 - DNA, 835 bp, Zea Mays
tctttctgctggatcgttcacttctgcagttttgagatatccaaacacttatggtggtttcattctggacatgggtgttcacttcattgcaggactacgaatgcttgtaggttcagaaatcacaagcgtatcttctatctcccgtcatgtggatatggctttgccgccaccagataacatatgttccctcttccaactggaaaatggatgcgctggtgtctttgtgtttgccgtcaattcaagatcaccaaagatattatggcgggtcgatggaacaaaaggaacaattcaggtagaacgtggagttgatagtggaaaacatggctaccaggtgttattctctggtgaaaatgggcagtgccagaagacattttacccgttctgtggagtgaatgaagaactgaagacgtttgtccatgacatgttggaagctggcaaagatggagatcacaaggctgcaccccgtggttcttatgtcgaaggcgcccgtgatgttgccgtgctagaagccatgttggaatctagtgcgaagcaaggagccccagttcaagtgaagagattctaacagatccgaaatgtcacataaaagagactacgtttcttctagggtgatttgtccattggatcatatattttcggtagtaaaatgaacattgttccaaattcatgtacataccgtcgaggttatatattaaatatatatgtgaaaaaatgacatacattagaaccaccattcctacactcgtaaaaatcatgtaccttttcttatacactagatatgttgccctattagatattataaatattagtttttttacgggaaatacgaaagaga

SEQ ID NO: 19430 - DNA, 1121 bp, Zea Mays
cgagaaagatgggcggaagaggaggagaacggcagcaagattgacgggcaagatctgcagtacgtggtccttgatctcgctggtgtgacttccatcgacaacacggggattgggatgctagtcgaggttcacaagagccttgatcgtaaagggatcaggatagcgctgacgaaccccaggctggaggtgacggagaagctggtgctgtctgggtacatcaaggacatcataggggaggagtgggtgttcctcacggtgaaggacgccatcacggcgtgccggtacgcgctccagagatctagaagcaaggatgacggtgaagtatagctagcgtccagggacagtcttttagtaggaattatagttcagtagtagctcatcactagctgtagatattgagaagcaggcaggaaagcaagcatcggaggtccttgtataggagaagattcagagctacgactacgagagattggggtgtggttgcggtgcttgcatgtgttggattattgtgtggcatctggtctctccgtctttgtaagggaaatagcgaggtggctggggataggtagctagcgtttgtgtatagaccagttcagctttgcctgtaccagtttgcaattgcagcacaataggctgtttgaatcgctgaaagggtattgcccttcttcatgcgccgaaggaaccgtggccactgtcagtcttatgtatacaggagttagctgcaggacgagaaggagccacggtcactcaaaaatctcattggctctgttattagcctgtttggctaggctttgacatcccacttcggcatcgggttaagtttggatgatcttatacggaacgactacgttctaggacctgtttttgtggtttaatgggtttgatgcctaggtgacacagtgtgtaaattaaagtaccgctgatgtattttactcgttttcctgcatctatcatgcagttatactgcttactgatgttcatcctaggggacctcgtttcccttctcatgctacggttcttccggaatttatggatcggcgacgtgatagcaattctgaaatgagaataatggcctagtatttcatgacttaatttctatggaactttttttaggttaagga

SEQ ID NO: 19431 - DNA, 525 bp, Zea Mays
tgggtgctggtgttgtatgagggcatgtgagccacgtaggctagctgatatgttgctggcaccatgcgaggacaccttagctgcatgtcaaacatgtcaggaacaccttgccccatattcaagtatttatagggcatggtccagtaaagaatactccttgcccatcgagctctaaccaataaccactgcaagggtgaagttgttctggtgttccagccagtgttagtcctctcccttactgtagagttaagttgttcctgagctgagtgtcaacctcctgtgtggtgaccagggtcatccaagtgcccacctcgccgcggtcaagcaatcacaagcgattccccagctgtacagtgcaagtttcgtgttctccttagacgaggtggtatttaaagaagtctactccaatgcctgctcctcaagtggatgaagccatctaactgggtattggatagagggatctagaaccacttcattgcaacaaaggcaagccccggtgcatgcaaccacttctttgtgttttta

SEQ ID NO: 19432 - DNA, 1331 bp, Zea Mays
ggaaggtgaattatttatcaattatgtgaagcctctctctgaaaacaaacaagggatgtcaaaactcaacaggacaaccgggtcacgtcgatgtgatatgactatatgaggcacctggttttcttgctgcttccgctgtttcttcctcaacctctccagctcagctgccgcaggctgcgactgccatggattccaaatccatggaagcatttgtggcaagtgaggcctccgtcttcatgaatcagccccctccacatatgtctagaccaacaattattatcaagctcattttgtggttgctgtggaccatcacccacttagcaatcagcattttaaatttatggtctcatctgatttatagtctagactgctatcttatttcatctggattgttgcggaagtatcagaatcttcatctgggtagactgaagtacttggctattgtggtagatagcaaagaagctaaaagtactgtgaaggtcaagcgactgttatgctggctctcatctatgggtgtgaagtatgtatgtctctacgacattgagggagttctgaagaaatcttttgaacctgctgtgaatgtttcaagagataggactgcaggagaacattttggcattggagcaaacatcaaagatctacactgtagccaaagagagatgatgatagattgtctttctggctctgatggcaaggagggtattgctaaagcagccagtttactttgctcaacttacctcaatggtgatactcatggagatgacaaaaggaaaccagcatttacagaagctgacatggctggtgcactgaaggctgtaggttgtggtggaccagaacctgatctccttctcatgtatggtcctgctagatgccatttaggatttcctacatggagattacggtatactgaaattatgtatatggggccactgaaatcaatgaaatatggtgcaattgtgaaagccttatataacttctcaaagaaacaccaaaattatgggaaatgatagctgatactagtttaaagaagaccatttgatcatggagaatcgacaccttggaactactggacagttactctgcggcccgcatccatttgcttctgctgctgcttactggagcacaggagtatttaacgttagacataccattgacactcatttcatgtttgcttgtaataagataaaaagtgctgtcgatagaacatacatacgggacaacatcccactgaaagttccacccatagcaatgagcaatgaaagaaacacaagaaatcttaccatctcatctattatttcctatgctatgattcctaatgatttatctgtttt

SEQ ID NO: 19433 - DNA, 2845 bp, Zea Mays
gcgcgagcacgtctccagccagctaggtaggcgaggtgacgatggagtcgacaatggagaagccggcggtgatggacgcggcgcgcggcggcggaggggtcgggcgggccaagtcggaccacctggcgccgtcgctgtcgctgagccggacggcgtcggcggagacggtgctgggcacggcggcggacgcggccaagcccgccgggttcgggaggaagcggcgctccgcgtcggtcggcggcggcaacaacaacagccacatccgcaagtcccggagcgcgcagctgaagctggacgtggaggacctcgtcagcagcggcgccgcgctcagccgcgcctccagcgccagcctcggcttctccttcaccttcaccggcttcaccccgccgctccagcacatgtgctccgccgacccgccttcattcagcgacgacgagaacctggacatcgaagccggcacacggcgcaagaaactggtgaccgagccgaccctgccgatatacctcaagtttgcggaggtgaagtacagggtggcggggaagggctcgccgcgggagatactgggagggatatccgggtcggcgtcccccggcgaggtgctggcgctgatgggcccgtccggcagcggcaagacgacgctgctgagcatcctgggcgggagggccgccgccggcggcgccgtcgacggctgcatctcctacaacgacgagcccttcagcaagtccctcaagcgcaggataggatttgtgactcaagatgatgttctctttgcccatcttactgtgaaggagacattgacttacgcggcactactccgtctcccaagaacaatgacacagcaacaaaagaaagagcgagcgatggacatcatacatgagcttggccttgaaaggtgccaggacacaatgattggaggatcgtttgtacgtggggtttcagggggtgaaaggaaaagagtttgcattggaaatgagattttaatcaatccatctttactgtttctggatgagccaacatctgggctggattcaactacagctctaaggatcgttcagcttctccatgacatagctgaggatgggaagacggtaatcaccacaattcaccaaccatctagcaggctgtttcataagtttgacaagcttattctcctgggcaaaggaagtttgctatactttgggaaggcatctgaagccatgccatacttccagtccattggatgcgccccacttattgcaatgaaccctgcagagtttctactggatctcgccaatggcaacactaccgatgtctcagtcccttcagaattagatgacaaggtgcatatggaaaatcacaatttggagaacaataattccaagattgactacaggccatcagcacaagatgttcatgagtatttggtagatgcctatgagactcgagtggcttttaaggagaagaagaagcttctagcaccactgcctatcagtgatgatctgaaggcaactataacatcatcgaagcgagagtggggcacatcctggtggcagcaatattccatcctcttttgtagagggatcaaggaacgacgacatgattacctgagttggatgagaatcacccaggtcatagctacatcggttatcttaggtttactgtggtggcactctgatcccagcacactaaaaggtctagaggatcagtgtttactgcaatctttacattccctcaagagagggcaatgctgaacaaagagcgcgcagtcgacatgtacaagctcagtgcatacttcttggccaggacgacgagtgatctaccacttgaccttttcctcccaatcatattcatggtgatcgtgtacttcatggcaggcctcaaagcaactgccacacatttctttctcagcatgttgaccgtctttctcagcataattgctgctcagggactcggattggcaattggagctactctgttggacatcaagaaggcgacaactctagcttcagttacagtcatgacattcatgctagcaggaggcttctttgtaaagagcgttccaccattcatctcctggctgcgctacctgtccttcaactaccacacgtacaggctcctgctgaaggtgcagtacgaccccgtgccggacatcctgaccaccacgaggcacatggacagcggtggcaccgaggtggcagctctcgtcgccatggtcatcgggtaccgggtgctggcctacctgtccctgagaagggcgaaggccctgggcagctagcgcatcccttcaccgcagtgactgaagcctgagctcgtggagcgggttgggtcattgggtgtgtagggaagtttgtgctatattgcgctgtgaaaagatggaagtctttttttttaacttttctgtctttttcaactaagttctgagcaagtaccaacactgaagaacaaggatctgtagcgagtgtaccagagacaagctgtgctgtaatttttccttcacaacgattgcgtggttaaagtgattgagtataagcgtgagtttagattgccggcatattcttaggatgggtagctctaggacaaattctgttcatactcccaagaacgcgtacatttcatcaatgacattatacgagttcttcgcgatggacagaagcacaggatgaaggcctgatgtcccataggtcagagggaaggtatgatcagtgtttgattcatctacatcacccttatacggtcccatttctgcaatgttcatatgttctaaaattctgggctccatcgatctttccaatctgtgactaaagctcttcttttttttaactgctattaaggtaaacacgcacacgcacaaagaacttttttgcca

SEQ ID NO: 19434 - DNA, 4637 bp, Zea Mays
cacgtagaagctgcatgtgtacgtcgtacattgtctgccacgtaattatatttctgcaacaaggcttcagatttaacacacaaaccttaaagaagttccgactgctgcaatcttcaaagcatgctctcgctccatttgtcaagccattggtggcagctgcaatgcctgccagaactgttgcctctgacaccccaacaagagcaacccacagggcttcttccgtctcccctccaacacgccgaggaggtcacgctgggcgtcagtcctcggctatctcacttatgtctggaaccagttcaactccttctgtcttgccaggccaatgcattcctgtattgctctttgtctttgaggatgatgcggttgatgtttcaagtgctgcagcaagtcccgatgatataggtgatgcatcttcatcaaatcagggttctacccctgatggactaccaaaacagagcttagcttcaaaaagttctggttcagtaattatgctttcccgggcagcaaacaaatctgagggcagttcaggcaaaaaactgcattcgtcactggagggacagatccgtgtcttgatcaagaagtgcagggtgcttgcaggcatggagcctggacatattggcccaaggggcgtaagtaacatgagtcatcatttacccctgttctcactcgatacctcgagggtagttgcactgttggaacggtatattaataagaaacaggaaccactggacaccattgcaggactatttgaagattctttgtgctccaaatcgccattggatattctttcgctcgaaaacaactaccatccaacaaaccatgatgactttcagttgatcaaggattttatatttcggcagtctgatgcgctgagagggaaagggggatattcaagcaatgcaagtgccgggtctgttgcaggtgttggcatggtggctgctgctgctgcagcagctgcagcatcagctgcatctgggaaaccagttaatgcacctgacctccctacttttgataaatggttgtccataagtacctctattctaactgcactgttgagtggaagaaatgtgctgagatgtcagtctgaaagcaagactcatacaagtcctactgagaagaatggccaacttcctgtaggatctaatgctattgagatcgcattatcgtgcttggaaagtaacaatgggctgaacatgaaattttcttcatcatggtgtcaaagggtgcttccagctgctaaggagatatacctgaaaggtttgcctgccttttaccccacaagaatgcatgaagtgcagctacagaaggcattgcggtcctttggctcaatggttaaaggaccagcagtcagggtattctcaaagaagctagaagatgagtgccgggcaatatgggaatctggaaggcagcaatgtgacgctgttagcctaactggcagaccatgtaagcaccgcaggcatggcgatttcttttcatcagatgcaatggagcaacattctagtggatatgtcttcctccatgcatgttcctgtggccggtcacgccgccttagagatgatccttttgactttcagacagccaacgtgtcttttaattgtttccaaaattgcgatgacctattacctacccttgcgcttccaagaggcagcaatgatggttcattttcagtatcctcttggtgcttggtgcgtcttggaggagcaaggtactacaagccaacaaaaggactccttcaaagtggatttagctccaaggagaggtatcttctaaggtggattgtatctgttcataaggggcaagtgagaaatgacattcgttctaatactattacttcatccgcaagatctggtatgaacccgcagactcccccaatagtcactggtgaagtaaaatctgccataacccaagtcacagcacaaattaaatatgcaaagcttgaaaattctggaaaacaagctgaagttgaaccagtgagcaacttaggcattaattttggtaaaggtctgccaaattttactatgaaaaagcccttttctgaagttgttgctggcaccacatcaaaagataccgagtttcctgctcttcagcagacaaggccaccaaaacctggtggtcgaaaagatgagcagcgtcaaatgaatatagtagaccagactaatggccgaggtcatgtggctgtcagccaagggtctgtagctgaaactgaatcggcaaaagcaagcagaaacaagagtagtgaaaatgctgatgggaagccctttttacagatagggagcaatatagtaccagtgattgctggaaatgagactagagaaactagtcagccagtacaacagtttgttgtgtatattggatttgagcatgagtgtccctatggtcatcgcttcttactgtcagagaaacatatgaaggagatcgagtcttcctgtttgcagtatcaaagacctcatctaaacaaagaagcagaagtcaagcatgcacaaaagttgctccaaaatgcatctggtttaatagcatctgcagtggacataaacagtgcacggaaaaacagtaagccattggaatcatcagggagaaacagccagcagcaatcactgcagctgaggattgatgcagagacctcacagccttctcctcggctttcagatccacagaatgccaaaaggtgggagcattattttcgaagcgttacaattgatgatggtggagaagcattttcactgatgaacagaaacttgccaatatatatgcgctgtccacattgcaaggtctcagaaaggaaggaacatcaagatgtaaagtttgctggtgttgtgtctcaacttcagcggattttcattgtgacacctgatttccctgttctgttggcaagctgcccacttgtacagtttgaggggtcatgtttgccatcaaatgtctctgatcatgatcgagaaggatcattcagtattgggtgccgagttatcctcccacctgagagctttcttactatgaggcttccctttgtctatggtgttgagacaaaggagggaagtaaatttcccctcaaatactttgagcgacaaccagaactcacagcatggcttgttgcaggcacagccctgcaaatcgtgtcggtaggggatgtcactgagaaagaaaccgttatgaagtgatagacatgtcatataaagctttactggctttagcatgttctagtcatatatcagtgatttgctatcggtctgttgatggttatattctgtctgaagttttcacttctactcctgaacttgtgctgctaagctgttgacacaactattgcttgctttcactgtgctggaagcattgtgaaatagaagttccgctgatatctgcctgacctggatggtgtatatagatgcaagcagagggggcaggcccacaggcaatcacgccgttcttgtctttgtacatgaaaggtgccaggaggttaagtttagctggttatgtaaaggtccgctttttgaggacctgtccagtggatcaatcccattcctagactggtttgccttgaggcttggagattttgtagtaagactattagttcaattgagctgtttgtccagttgatgagttgttttattcctaggcttgttgagaaatctggccttggaatatagaacccagaagaaaggatttttctgaatgatgttgtagcaaacggttgcttgagatgcatgatctcctcaaataaacttgactgatctgcctgtatcccttattctttcttgtatataatgtatgcagtacaggtatttccccgcagtctttggagaagaagatggatttgtgaagtgatagcacaaaaaaaaaagtcatcaggcgcttctggtggtagactggagactgggctggagaaatgttggagctggaaggaaacgcacggatggctcctgcttgacaagtgtaaaggcaggcggcaagcagggacgtcgagtcgaggccccggccggctccaagagcttctttctccaatccaatccaatccaatccagaaccctgactgcagtccatggtattgtagcgctaccatttgtccacgtccgatgggtgaagtgaagcatgactgactgactgcatgggtttgagtgagttgcttggacaagtggctgtgtgtggtgctgctactgctacctaaccttttgcttggccgatagataagaataccggactgatggatggaagtggatgtgaacaaacagctggttggctcagggcaggctccacaccaccaacggccggagcagatggacatggacgtctcacttaggaggagaaggcagatgcggcagaagcaccagcacactgaatgcaatcattcaatactcatctacagctagccaagatgtgagaagagagcaaggaagaattgtcaagcctcccacgtttccccaatcttctctcttcttttcatttccccacttttaatatgtttattttcctcttatttgcaacagctcctttaattatatagcaacattttttttaagatatagtagtatatatattaattttatcatatctctagtccgaataccacgcaaaagtagctagtaagtaggatgtaccaactagctacagcagtgtataataaagaaaaaagtcgttgggcggtc

SEQ ID NO: 19435 - DNA, 934 bp, Zea Mays
attttatacttgcctgagtattagtattttgcacaccatattcttccatagaaccctcagcctggttcgccccaaagatgttgactgtgatttcctcgatattacttatgtacaatgtggtctaccggaactagaaaaggaagttgacgaaaagatagaccagttcagtgcatgggtggagaaacacccaaaccgcagaagccagatctgcctctcctttttcgacgagaaacacagacaccctggttggtttgtcaacaaaacagagcgcatctattgggagcaatggttcatcaatttgcaagtcatgttccccaaaagatacagcaagtcaaacagctccaaagggctgacaaacatccaagcaaatgccgtggaggagaccagcacaaggcgtgctgcattggaggcgtcgattaacgaagtgctgttccagatcataaagttcgccaacgagaaaaaggaccacattcctgctatccctgacaggattttcaatcacgagatcatgatcccaagctcggattctgtatttggatggaacacggacgtcattcgcagagttctgaatagcgggcacccatactcgctttaactgaagacgacatctcagtgggcgcccgtattcagtttattagcgtgctgccgccctgtttggaagacggctctgttaaccatcgtggtgaaccatataatatgcctaaggaaaaacctagttctgtgtacatcaccctgctcatctggcatgtacatactgtgttgggatcttgctcatcggtcaaacattcttaagttcgattaagtttataaataacaatattatgattctaaataagtttatcatgtaaaagtatttttcatgattgatacttattgcgaagcatctccgagtgagttaggtggttcgagtaacactccttaagtcttgaattcg

SEQ ID NO: 19436 - DNA, 1867 bp, Zea Mays
ggcatccggctcctccctctcggattcccaaacgccaaaatctcgttgtcacgcccacgcaccgcatcgttcgcttcctttcgtcaactccacttctcttctccgcgtcacctcctcttcgccgccgccgacgcttcacccggcagccagccatggatgaggagtacgacgtgatcgtactaggcacggggctcaaggagtgcatcctcagcggtctcctctctgtagacggcctcaaggttttgcatatggacagaaatgactactatggaggagattccacctcactcaaccttaatcagctctggaagaggtttagaggggaagacaagcccccagcacatctaggtgcaagcagagactacaatgtggacatggtgccaaagtttatgatggcaaatgggacattggttcgaaccctcattcacaccgacgtgacaaagtacttgtcattcaaagctgttgatgggagctatgttttcagcaaagggaagatttacaaggtccctgccactgatatggaggctctgaagtcccctttgatgggcctattcgagaagcgcagagcaaggaacttcttcatttatgtccaagattacaatgaagctgatccaaggacacatcaaggattggaccttactagggtgacaactagagaacttatagcaaaatatggtttaagtgatgatacagtggatttcgttggacatgcacttgctcttcatagagatgatcgttatctcgatgaaccggcacttgatacagtgaaaaggatgaaactatatgcagactctcttgcacgctttcaaggaggctcaccttatatctatccactatatgggttgggtgagctaccacagggttttgcacgactgagtgctgtttatggtggtacttacatgttaaacaagccagattgcaaggttgaattcgatatggaggggaaagtgtgtggtgtcacatctgaaggtgaaactgcaaagtgcaagaaggtggtgtgtgatccttcgtatttacaaaacaaggtcaggaagattggtagagttgttcgtgcaattgctatcatgagccacccaatccctaatacaaacgagtcacactcggttcaaattattttgcctcagaagcaacttggacgcagatcagacatatgagattttctatgatatctatgacagatatgaaccagtgaatgaaccatctcttgataattgctttgtctcgacaagctatgatgccaccacacattttgagacaactgtaacagatgttctgaacatgtatacaatgatcaccggaaagactgtagaccttagtgtggatttgagtgctgctagtgctgccgaagaatactgatttcagtcatagtgtcatgtttatcaaagatcacatcgttggcgacagcacatgacccacattaatgaatggctggaatgcgtttattcggttccagattatatcatgccacatgtactgttctgcgtaatgtctactgggctggcagaactatgcacaatgttgattcaagttgatggatggtggtggttctgttatttactagttagtcgaatggtgcacaacattaaacagtgaccatcatggctgtgtgatgtatcataataactgttcagtaaatttgtgctctgcctgagttctgctcgatgctattgacggcgccctaggtgcttgttccactgtgaatgaaccaagtctgtcacccatcatgttcttcaaagatttttaccaaagatctttttggtctgatgtgtcagaccggctcttgtgatggacgtattgtttgccaaattatgcgattatttttggcagatggagtctggcaactaaattttgtggcacgtgatatggg

SEQ ID NO: 19437 - DNA, 1711 bp, Zea Mays
ttggggaccccttggatgggttggtcaagtgcgagaagtggattagggacgatgatgacaggttggagaaatcgaagacaacatcaaagacggcatggtggctgaatcggctgatcgggcagaaggaggaggtcaatttcggttggccatttcctttcgtggagggcaggctctttgttcttactctcagtgctgggttggagggttaccatgtgagcgttgatgggcgacatgtcacttcgtttccttaccgcactgggtttgtgttggaggacgctacaggcctgtcactgaatggggacctagatgtgcattcagtgattgcagggtctttgcccactacacacccaagttttgcgccacataattatctggagttttctaatgtttggcaggctcctctgctgcctgatgagccagttgagattttcattggcattctgtcagcagccaatcattttgctgaacgtatgggtgtgaggaagacatggatgtctgctgtccacaagtcaccaaacatggtggctcgtttcttcgttgcactgcatggcagaatggaagtgaatgcggagttgaagaaggaagctgaattttttcgggacattgtttttgtgcccttcctggacaactatgatcttgttgttatgaagactcttgcaatatgcgagtatggggttcatgttgtctctgctaaatatgtaatgaagtgtgatgatgatactttcgtgagacttgattcagtagtcactgaaattaagaaggtaccaggtgggagaagtctttacatggggagtatgaatatacaacacaagccactacgccatgggaaatgggctgtaacctatgaggagtggccacaagaggtgtatccgttatatgcaaatggccctggatatgttatatcatctgatattgctgattttatcatgtcagaattcatgaagcaaaagttgatgctcttcaaaatggaagatgtgagcttgggtgtgtgggttgagcagttcaataagacaagacccgttgaatacgttcacagcgacaaattttgtccaaatggatgcgtccctgactactatactgctcattaccaatcgccaaggctaatgctatgcatgtggcagaagttactggaaggaagaccagactgttgcaatgcgagataacaatgatggcgtagttcaaaaaagaagaagaaaacaacaattacagaatgagtagcatttgaccatcatccatagagccagtctcatgtaatcaacaaattaggttataaagtaatctgcattacatgggattaattcatacatcttcatggtagtttatatcctccttgagtcatgcaactgatcctacctagtcacaacagtgggcaagccagcacactaataattgtgctctgtgctctctttgagcgcccaaacacataggtagaagttggcaggtgctctggagatgcccggggacttaatttggaaatatagagagtcgaaatagttcagttaagttattactgtttccagaatggctttaaggtctggttgtagttgcagctaaacacatctggttaacagggcaaccttcaagatttcagtcaatttgtttaacgcattatcttattcagtcttgactttacttagggggtgtttgtttgggattataatctgcctaaacaaacacccctttagttacatacattgttttttttagaaac

SEQ ID NO: 19438 - DNA, 1830 bp, Zea Mays
ccgatgtcaagagtgctgtatcagagggccatcttatacatcaggactctgtatgcttttacaaatgagactcttgcaaagtactcctatgccacctcacttcaagccacacttagatatggaattttgattagccttgtccaaggaattggtcttggatttacatatggactcgccatttgctcttgtgctttgcaactttgggttggaagacatctgatccatcgtggaaaagctgatggtggtgaagttgtggtagctttattctctgtaattctgagcggccttggtttgaatcaagcagctacaaacttctattcattcgagcaaggacgcattgctgcttatagactatatgagatgattagtcgttcaacctccagcaccaatcaagaaggggcaaccttaccccaggtgcaggggaatattgaatttcgaaatgtgtactttagctacctgtctcgccctgagatcccaatattaagtggattcttcctcactgtaccggcgagaaaaactgtggcacttgttggtagaaatggctccgggaaaagcagtataattcctcttatggagagattctatgacccaacattaggtgaagttcttttggatggggaaaacataaaaaatttgaaagtagaatggttaagaagccaaattggtctggtgacacaagaaccagccttattgagtttgagcattcgggaaaacattgcttatggaagatctggtacctttgaccagatagaagaggcagcaaaaacagcccatgcccatgggttcatcagttcacttgaaaaggggtatgaaacccaggttggtctagctggtgtagccctcactgatgaacagaaaatcaaaatttctattgctcgtgctgtgctttcgaatccatccattctgttgcttgatgaggtcacgggaggacttgattttgaagctgaaaaggctgtacaagaagcattagatgttctcatgttgggaaggtcaaccattataattgctagacgtctttgcctcattaaaaatgctgattatatagctgtaatggaggagggtcatcttgttgaaatgggaacacatgatgaacttttaaacttggatggcctttatgctgaacttttaaggtgtgaggaagcaacaaaacttcccaaaaggatgcctaccaagaatagcagggagcgtaagtcgcttcaagcggaggacacatcggtgagccaatactttcaagaatcgtcctctcctaagatggcaaaatcaccttcactacaaaggacacacggcatgcttcaattttggcgatcagataccaacagaaactctcatgattcaccaaaggatccaagtccaccttctgaacaaactatagacaacgggataccgatggttgcaattgaaacagaaaggacaccatccattaagagacaagatagttttgaaatgaagttacctgaccttcctaaagttgatgtccatcgtatacagcggcagtcatctaagaattcagatcctgactcacccatatctcctcttttgacttctgatcctaaaaacgagcgttcacattcacagacttttagcagaccccagagtgaacgggatgatacgagttctgaacacagtgaactcgatgaggttcagcaccagaaaccgccatctttttggcgtcttgcaacacttagtattgctgagtggccttatgctcttttaggtacaattggtgctgctgtatttggctcatttaatccactgcttgcttacacaatagcacttatagtgtcagcatactatcaaattgaaatccgtgatatgcgccatgaagtgaga

SEQ ID NO: 19439 - DNA, 1412 bp, Zea Mays
gcgagcatgtgtatggcatctccttgcgttgggtgcctaggagatgtggaggtggtggtcagtgggtcactgctcaccataacatgcgttgctttactgctgccccgaatgttgaagattcttatcctgagcgaccaggggaaccagattgtccttatttattgaataatagatgtaagtttaaatctaaatgcaagttcaaccatccgaaggatatggtgaatgcattaggaacaggaacaaacaatgaatctctaattgctgatagcgctgtcttaccagtgaggccttctgaacccatttgtgtgttctatgcaaaaacaggcaaatgcaaatttggtgccatttgcaagttcaatcatccaaaagatattaagacatcacctttgattgcaaaggaaaccatatatacagcaacaactgatgcagcagatgccccgaccgaggcgtgtaacgcaaaggggcttcctataagacaaggtgaagtggattgctcgttttatatgaagacaggcagctgcaaatatggttctatttgtcgcttcaaccatcctgatcggccagggccagctgcggatatagcttttatggttccactggttcaagctactcttccttcatcagcacccattgtccctgcagtggttgaacctttgccaatgatctatcctcaaaggccaggagaaactgtttgtgatttttacatgaagacaggatcttgcaagtattctcagaaatgcaagtttcaccaccccatcagtcgttttgccccgcattccaaagaaaacggggatcctcaacagcctgcgacacttgctagcctgccaaggagagaggacgctgaggcttgtgccttctacatgaggtctggcatgtgcaggttcggtgcgcactgcaagttcgaccaccctcctcgcgaggaggctatttccgagctgcaggcagccggaaaggaaggaatagaagggccgagcctcgtccagcgcgaccatgatgtctaatactgtatcctgcttcagtatgtaataccatgtgaatcgcactgttagttaatgcttggtgctgtcagtcttgttgggagtctgactcgtaaagctcattatcatcggaagtgtttgtcggaggagtgctggcactaactatttatcttcagttggttgtcgtgttgccaacttgcgatgtcaaggtgcatatttcagttttttagagtaaaaatgcactttacatcctgccgccaaacttaactatgggcctgtttatggccctgtttggtttagcttttttttaccagcttttctaaaaatctggttgtggaaagaatttgagtatcgtgaagattacatgtggagaagatgaagtggtccaaagggtccatgatctagaaagcgatcaatttctattatcacaacgac

SEQ ID NO: 19440 - DNA, 2118 bp, Zea Mays
gccatcatggcgccgacgcttctgctggtagcccttgtagcgctcgcggtggcagcagcaacgccgatggtgatggaggcatcggcgttcacggaggggtgcaacaataggagcacgccgggtggtggtggaggcaccgcggtggggaacaagctgaacgtgcacttggtgccgcactcgcacgacgacgtcgggtggctcatgaccatcgaccagtactacgtcggatccaacaactccatccagggcgcgtgtgtgatgaacacactcgactccgtggtggacgcgctcgccaaggatcctgctcgcaagttcatcgtcgtcgagcaggctttcttccaaaggtggtgggcacagaaaagcctgacagtccaggccacagtacacaaactggtcgattcgggtcagctagagttcataaatggtgggtggtgtatgcatgatgaagctgttgtgcattacattgacatgattgatcagaccacacttggccaccgggtgatcaagaaacaattcaaaaagattccgagagctggctggcaaatcgatcctttcggtcattctgcagttcaagcttatttgcttggagcagagcttggtttcgattccgtgcattttgcaagaatcgattaccaagatagggcaacccggaaagcaaataagggcctagaagttatatggcgtggctcaagacctgttggttcatcatcacagatcttcacgaatgtatttccagtccattatagcgcaccagttggcttcagcttcgaagttttggctgaaaatgtcatacccgttcaggatgacatgtcgctgtttgactacaatgtccaagaacgtgtagatgattttgttgctgcagccatagcacaggcaaacgttacacgtacaaaccacataatgtggaccatgggggatgattttaactaccagtatgctgaatcctggttccgaaatatggacaaacttatccagtatgtgaacaaggatggccgagtgcatgcattatattctactccgtccatctacacagatgctaaacatgcatcaaacgaatcttggccagtaaaatacgatgattatttcccctacgccgattcaacaaatgcatactggactgggtattttacaagccgtccaactttcaagcgatacattcgagtgtacagtggatactatctggctgcgcgtcaaatagaatttttgatgggtaggagctccttgggattgttcacttccagcttggaagatgcaatgggtattgcccagcatcatgatgcaatctcaggtactgcaaaacagcacacgactgatgactactcaaaacggattgctattggagcatcaaaggtcgaaaaaggtgtaaacgctgctctgacttgtctaaccaactctaacaaaacatgtgtatcctctgtaccaaaatttagtcagtgtccacttctcaatataagctactgcccttcgactgaggaagcaatttcagcaacaaagcatttagttgtagttgtttacaatcctcttggttggaaacgtagtgacttcataagggttcctgtcaatgatgaagacctggtggtcaaaagctctgatggaaatactgttgtgtcacaaatagttgtggttgataatgtgacaaacaacttaagaaagttatatgtgaaggcttatcttggagtcacagcaaacaaggcccctaagtattggctaacatttcaagcttctgtaccaccaatgggatggaattcttactttattttgaaatcaactggatctggatacaacaacactgaacatgtccccgtcgtggttcctccaagtaacaacacaattgaagctggacaagggcatttaaagatgtcattctcttcagcatctggacaactagagagaatattcaattctgcctcaggaggagacttaccaattcaacaaagctttctttggtatagatcaagtaaaggagatgccttggacccacaggcatctggagcttatatatttagaccagatggtaatacaccaactattgcctcatcatcggtgactcttaaagttatccgtggacctctatttgatgaagtccatcaacaattcagctcgtggatttatcaggag

SEQ ID NO: 19441 - DNA, 2230 bp, Zea Mays
  misc_feature (2230)..(2230): n is a, c, g, or t
agctaaagctactctcgctccatcaaaccaaccctcccaccatcaccaaagatatatactattactacatagttaacaaactttatctgcctcctgtcctgctaatctatatatcccctctccactactgctaccttctctcgcgcgtctctgctcaaagaataatgtcagcgtagcctagctagctcatagggattcctctttcatccctcctgagatcgacgatctcaccaattaagaacacacacgcacacagcagctacgtacgtacctagctagctagcatgatggaccatcagctgttcgacgaccccttcgggagcagcatctcgtcgctggaggcggaaatcttctccgccgccgcccagctgccgccgtcgccgccgtggccagacatcgacctcgacgacgactacgacatccacgacctctccgcgccggccgccaacgccgctacgtcctcgggcggcggctacggctccggcggctccggcggccacaggaagctcagccacaacgcgtacgagcgcggccgccggaagcagctcaacgagctctactcctccctccgctccctgctcccggacgccgaccaaactagcctaagatgttgtctaactagacaaagcccaagacagacccaaactagcctaacaaagcccaagactgaccaaactagaatttgtatgcaaagtaggatgtatcgtgagccagagtcgagtctctatctcgagctcgtacaccaaaccgagtcaagcatgtctcttctcgacttgtttccaccactaggtgtgtggtgacaacctccatcagtgctgacctcctcgcattctttgcgacccatttaggcatagatcggcacaggtggagggtgtgctcacagctctagccttaagacttcttgcgctctttaaaactgtgtccaacagatcgtgtatatggtcgtgcaaaatatattttttgcactagagatataacacaatttgtagaacgaagtttaaaacaggaggtgagatagataataggataggagtgcttttgggcacaatatccgtagactccagcaaggatgtagagctgaagactatgatggagaagaggggcggatgcgtgatagagaaagggccacgatgcatgagggagggagaggctcaatgtgtggcagagtgtagctagcgtcgggtgcagagtgggtatgagaagagctagggttcatcgtctcttataaattctaggttgatttgggtcaacgactatttatttaagaggcctatctccgttaattgattttaagagacaatcaagttttaagtgtctttgtaaatggtttgtctgtctccaaaaaatcaggggacattttagaagacagtgagattttatgtccacctctgttaatcaaatcgtttgtcttccaaaatcatctatgtaatagtgataatatgataatttattctattgagctaggctcatataaatttagtcaagtatgcttaaatatttctcttattaatatgcaaagtggactctatttgaactcatctaaaatcttcgtattccggttaaaaggttataacacattataatttatttttttttgtaaacgctctaatgtgtttaaggaaaaaatatggctacaactgaagttttattataggaaaattcaacgtcctgtccactgcagtggaagccaaaacacttgtctacaccactctttgtaactaggatgcaggacctaagagcatgtacaatctagatattatgttacggttctctaagcactaatacatctaagaaacttcttcatacaattcaatgtatacaagtcttctatcttattcactagaatctcttaacatatggttcatttatgtgggttgtatggatggaactgtatctaaacttagagaaccgtgctagagacgttcattcaccaaaatatatcttatgttttttacacttatctccttagtaactcttaaaatacagatcatttatgtgggttatacattgccctaacacctatatcttaatgacatccaaaggaaggcatgtaataagaggtacaaacgagctctaaggttttagcctaccatgcatacgaaaaacacaagtatatagatatgtagttttgggcttatttaatctggaacgatagggaaaaaaatgttgtccaacgtaaggattttacttgtaagaaaaaaaaaaagacactgttcatatccacaaaatn

SEQ ID NO: 19442 - DNA, 784 bp, Zea Mays
aatttcctgagttatcagaggaatcagtgaaaatcctgtaccaaactggcaaggcatatgtacatgattccttggacatttatggccgaccagtgctaattgtagtggcagccaaacattttccttcgacacaggatccagttgaaaaccagaagctatgtgcctatttggttgagaaggcagtcaatagacttccgccaggagcagagaatatacttgggatctttgatctgcgaggctttcgggttgaaaatggtgatctccagttcctaaagtttttgatggacgttttttactattactacccgaagcggcttggccaagttctttttgtcgatgctccatttgtttttcaaccaatgtggcaggttgttaaacctctgttgaaatcatatgcctccctggtaagattttgtgataccgagactgtgaggaaggaatacttcaaagaagaaactgtgcctcctgatttccgcgattaggtggtctcggaaacatgacctttaattgattgagaatcgattggcacccaggggggctggcgccttcctataccttttgattaacttctcaaaagttgctcagacgacaacaaacgattggagagtccagtaaaaaatgaccctgtagtcctgtacttgtataacttctgcgaagtagaatgctgagtttaggctgctgtctggagtgctcctgtaccatatttttctggttttggatgaagctatatggaccaaattcatctctgttgaacaattgccaattacataacttgtgtttgccc

SEQ ID NO: 19443 - DNA, 121 bp, Zea Mays
cacgttctctccttgcggggcgactcatctgggcgagcaccaggatggagctgcatattggcgacggctagggtttggattggcgtgaggagacgagggcgattggtgatatgatcccgtg

SEQ ID NO: 19444 - DNA, 2721 bp, Zea Mays
acaccgcacacccttgcttgtctccaggcgtacttgcgtttagcgtctcttccctgctgccatctctgtccggagggcaagccatggcggcgggcggggacggcgtcgctcgccaggcggagctccgccggatcgagggcaacatctgcttcaagaaggcgcgcctcggcgccgccatcgactgctacaccgaggcaattgcgctctgccccgacgtcgccgtctactggatcaatcgggccctgtgccatttcaagcgcaaggagtgggccaaggtcgaagaggacagcaggagggctcttgcgcttgattacactttagtcaaggggcactatctgctggggtgtgcgctactcgagaaggaagaatctgctcttgctatcaaggaattcgaaaagggaagcttgtgaaactgctctgcaggagcatcactttctaactggtacacttgaggaagactccaacaggtcagacaacgagtattcagagcaaattaaactactatcagaggtcttcagccaagcgacagtcgccgatacaccaacagatgtgcccgattacctttgctgtcagataacattcgagatcttccgagacccagtgatcacaccgagtggtgtaacatatgagagggctgtacttgttgaacatctccacaaggttggcaatttcgacccggtgacgcgagaacctctgaaggagcatcagctggttccgaatctggccatcaaggaagcagtgcaggcctacctgaaagagcacagctgggcccacaagttgaactaattggatgccgtgtgctttgctgactgcagatgctgataaatcggggatggcctgttattagagttagattttatgttgtgttggaatgagattgattggatagctcgattcatcgttcttagtattgattgggtaacttgacctgtaactgcaattctgcaaacactcattggatggatgtaatgaagcaagtgtacatgaaacattggttggttcagctcactgcatgtatatggttgcagcattatatatggttggtcgtagacccagtgggcctcaaacaagttaggcctagtttggatactctagtaatgagtgggattgaagtggattaagatgtattgagagagtatttgatgtattggggatttacaccctctccaatcccttcaaaacactccaatcctaaagtatccaaactaggccttaggtgggccggcctctatccaaggcccagccttttacttggcgctgacaagacaaaagagaggagacgagaaagaaaacaaaccctagcccgctacccctgccccttctctcttcgtcgcgcctccgcctccgccgtcgtagcatcctcctccgccacctcggccatggcgacatccccagcgctcctcttcccttctccctcctcggcatcctctgcgccttcgtcggcgcgggtggaggcagtggtgcttttcaacgtctgcgacagctacgtgcggcgcccggaccaggcggaccgcgtcatcggcaccctcctcggttccctcctctccgacggcaccgtccacgtccgcaactcctatgtcgtcccccacagcgagtcagccgaccaggtcgccatcgacatcgactaccaccataacatgtacgcctcgcaccagaaggtgaaccccaaggaggtcatcgtcggatggttctcgactggatttggtgtttctggggggagtacgctcatccacgagttctattcaagggaagtacaaaaccccatccatcttacagtcgacactggcttcactaggggggaggcttccatcaaagcctacatctcatccaatctgtccctcagagatagtcaactcgctgcacaatttcaggaaatccctctggatctgaagatgattgaggcggaaaaggctggatttgagatcctgaaatctactatggtagagaagctccccaatgatctggaaggaatggagtcatcgatggggaagctttacattcttatcgatgagatctacaaatacgtcgatgatgttgtggaaggacgcgtggcacccgacaacagaattggaaggttcatctctgattcttttgcttcggtgccgaaattgtccccggctgctttcgataagcttttcaatgacaagattcaggataaccttgcgctggtatacctgtcaagcatcacaaggacacaaatcagcatcgccgagaagttgaacactgctgctcaagtgctgtaggtttggcggtgtggcatctggtttggacgtggatggcttgatgctatctgtgatgcttggcgtaagtgtgattggtgacagaaatgcatttttgtactcattattattattgctaaatgagagacctgatggaaagggttagccaacgatgagatcccataatgttgccagaatgccagtagagtggtggatggcgagatgtttctgtttggatagtattctgtgctccaggttgaatatttgtaatgctcgttggttttgtgtagcgacacattttacgtcgtcatttagaggtgtggtggcatgcaatgtgatgctgttgttgcaggaaaatcggttttgctgtcctgttatagcaagctttcctcctgcggccctgcttttcatttccctcttgattcttgcctctgcccttcgaaaccggtctaggccgggaacaatcacgtcatcccatgttatgtgtctagcctgaacgaac

SEQ ID NO: 19445 - DNA, 522 bp, Zea Mays
cggtcgcccccgcacgcgtcgccacccctccctccattccatcgtcttcgcttccactccccacgttccccgcctgcttcctccaggccccggccagatccgcgcgcccgcggggaagagggcctcctctcctccctcctcccttggctcgcgctctggtcgaggaggcggaggccggtgccggcgggcgggcggggaggtaggtagcagcttgcggttgcgggagggaagctgcgcgcgctaggctgccatggcggtggagaagacgctgcccggcgcgagtgcggggaggaccgtgctggtcacgggcggggcgggctacatcggtagccacgccgtgctgcagctcctcctcgcgggcttccgcgccgtcgtcatcgacaacctcaacaactcctccgagctggccgtccgccgcgtcgccgcgctcgcgggggaccactcccgcaacctctctttccacaaggcagaaaataccctcctctgatgttgttcacttgttacaagatggcatttggtgtt

SEQ ID NO: 19446 - DNA, 474 bp, Zea Mays
tgtagctcgtccccgctcctcttcaccccctgctttacaaagcgccccgctgtctagcctgagaccctaggaattggtcatccgcgctccaccgaaaaacgcgtcgtcgcgaggtgagagagagagattgtgcgggcggaacttcgagcgccaccggtgaatcctagtggtggaggattcccatcctcggggcgtgaccgtggtggtgcgtttgcgcctgtggggttttccgcgtcggcaattgggtgggagaaccagcagtgagaggtgaattgctcgccggcgtagctactccgccgtggagccgcatctcatcatctcctggggtctctgcatcgaaatcacaggtgagatgtccctcatctcgttcactttgcccccaccgacgtatagcacctttcctttttgaatttagcatgctagggcgaaagttggccttactccggcggtcctccaccgcggtctggaaggcgg

SEQ ID NO: 19447 - DNA, 5482 bp, Zea Mays
gcaatggccagcaccaatttgacaaatcaccacccgccaactctcccactgccacctggggcccatgtgtaagctcgctctccacgatcctccgctgcagctgcaggcggaacgcatcctgggcgccgggactggcgtgggcgcgtggcccacaacccatcgtctccaccgaataggagtacaggacacaccggactcgctgctctcccccgcgttaccgcgtagccgatgcccgatggcttgatcagatcccccacccggacccggcccagatctgtcgtcgccgccgcagtcgccatgggtgaccactctgactccgattcctcccccaagtcctcctcgtcctcgtcctccccctccgcccgccgccgttcctcgccgcagcgcagccgggcccacactgacgagaccggcagcagcgacggcgtcctcgtcgagcttcctactcaggaagcgcggagccccggggccgaccctgacagcggcgtcctcgtcaacatgcccgctgacgacgccaccagcggcgagaccttcgacgacgcccccgaagatctcgcggccgccggctcgctctccgcacgctcgctggacgagtccatagccgtcatcgacttccctgaggtttccagcaccagcgccgagctccgcaagtaccaggaagagaaggctgtatttgctcgggaggcagtggcactccggaggttgctacaggagatgttggggcaggaagcttcagttgcgttgcatggagaggacgctgacgagacactgttgcattcaatgctggacgactgctcgaggcttgtgcttgaacttaactcgatggcacgggccagggagcaagagattgagagcctacatgccagggctgcagaggcagaggtatcaagtgaggttgctcatgtatacctgggttcgtggagagaagggtctgagcaagctgttgggcggatgcttgcatcaattgatgctgtggttaggcaagatgatgccagctttgagggtgctgaccaggatgggatttctattctggaaaggaagacttcattgcttgtggagaggtacaggcaggcctcgatgggtattgaacagcttgagcaaattttagctgaggtgaagcctggtttcgcggccacagggcacggtgaccttgctaccactttaagtgttctttcagatgaattggttggtagcaagagaaatgaggtggatttactgcagaagatgaatgcttttgctgaagagaagaaggctattgctgatgaacttgaggaagtgaaagctgctaggaatgcagtgaatgctgaggcaagcaaagcaaaggcagagtttgagcagatggagcaaaagttatcaacgactaaggagaagctcagcatggctgttacgaagggcaagtcactggtgcaacaccgtgattccttgaagcaggccttggctgaaaagacgggtgagcttcagagttgcatgacagaattgcaaaagaagtctgatgccctgcaagcagctgagagcagggttgatgagctacagatttttttagatgaaaagacaagtgagcatgaaaagtgcttggatgagcttcgagacacatatagtgcatgggaagctgctaagaccagcatggagcaattaaatgaatcaaaaagtgccctgcatgcttccctttcactaaaggatggggtttttgaacgcattgaagatatcatgtcagaggcaacatttccagaagatcttctttccttggagatgacagataggttgggatggttagttgagcagaagaaaattgcagatatgatcttctcagagcatcagaaagttaaagaaatcttgagctctgttgacattccacattctgtcttaacctctgaacttgattcccagatcagttggcttgccagctcactgaaccaggccaaagatgatgcggtccggttgcgtgatgagtctgctgaaatgttggctaaaatggctgcacatgaatcaaagctggtgtcaatgcatgaggaaattgaccgtttgacaattattctactggaagagaaacaggaaaaggatattcttttaaatgaacattctgaattgatgtccctatacaaagctgctgttaataagttgtcccttgtctcatcacaaaataatgagttgctaaaggcatttgcggaattttttgatgtcacattggagggtagtcagtctatggatattgccaaattggtacagcagggcctcagaaatatccaacaaagaccaaaatcttctcctattgagagtggcagctttgagaagctacaagcactactgtataccctagaccaggaatcaacactatgtaagatgattcttgaagaagacatgattaacagatctgagaggactggtgaacttcaaagaatggctgaggagattattgttctgaaaaatgagaaggtatcactgcagaaggaggttgaacgggtggaggagagatcagcattgcttagagagaagctgtcaatggctgtaaagaagggcaagggtctggtacatgagcgtgaaggactcaagcaagctctcgacgagaagagatctcaaatagagaatttgaaacaagttttggaagggaagagctctgagatagagaagttaaaacatgctctggatgaaaataagtctgtaacagagaatgtgaagcaagttttggacgggaaaaacactgagattgaaaggcttaaacatgctctgggtgatagttgcgtggaaacagaaaacttaaaacaagcttttgctgagaaaacctctgaagcatataaaataaaacaagaactggatgcaaagaacatggatattgagaatctaagaggtgcgatagagtcaagagaatctgccatgacagatctcagagagcatgttgaacatctattgtcgtcgcaggttgcacgtttggaaaagttgcaagtagatattgttacccttaatgatgaaaaggtgaaattagaaagcatgttggaagaagccagagcttcctgggacactcttgctgattcaatatcaagccttactcttcctattgatcagccttttgaggggcctatggaaaagtttagccagattgcccaatacatccaggaatctcaagttgctaagagttctcttgaaaatgagctacagaaagcaaatgagcaaattaccttacatgctagcaggcattctgatgccctttccacaataaacatgttagaacatgagttgagtaaactaaaagatcatatttcttccatttctgaagaaaaacgtcaaatgcagttaaatacttctgctgtacaggaggagttggagaaaacaaacgaggaactggcaatcaatttcaggaaccttgaaagtgccaacaccaccattaattcactacaagatgcactatcacaggctagatcaaatatttttattcttgctgctgaaaagaatgaagctgaagctaaatatgaaacagaaataaatgctcttaatgctgagctaaccaaatgtttggaggagttggataaaactcatgggcacttacaaagtcattcaacagaatatcatggttaccttgagaagcttggcatgtttatgatggatgatagtctcttgtctctgatagctgaagaatatggaaagacattcaacagcttgagagatatgtgtcttatagtcaagagtatgcatgagcagctttctgtgaagagttttcagaatgattcaattgtggaggattcagaactctcatcacttttatctcttccggactatgagagctttgttagagaaagattggtcaagaacataaatagaaaagggaatattgatgacacttcatccttctctactattgttgaacagttgagcaaccaaactgaatacctttctagttttttaaaagatttgtcaacctacatgaatagcaatattattgtggtgcttcgttctctgcaactagtgagcaacacctttgcccatactctagaagagcatgacatgttgaaggttgaattggggaacaaggatgctcataacagagctcaagaatctgaagtgctttctctacaaaaagatctgagagcaatgtcatcaaaatgtatttattgcgtccaacaaattgaaattgtttttgacgatatggttgatcttggatatgcaatagacttggctacaggcagctcaagcatagggtctgaactagaggtaactgtgtctgatctgaagaatgaggataccagtgattatagtaaggtggctgatactttgcttgctacaattgacacacttaagtccaagtctgaaaaattatctaccattaaggggcttgtgataacttcattggatgacttcaaaatgaagctgaaacaagctgaagcagctgctgaaactgcttcacatgagcatcagttgtctgttgaaagggtatgcatgctggagaaagaactcaaaatattacaggatgagtgcaacaaaatggaactaaatattcaagagtataaggaaagggagggtgcattgaaggcaagggagttagagttgctatcagttgagcacactcaaatttcagcagacagaggtttaactgacaatgcaatttcaaaagatcaaacggaagctcttgttgagaagataagtaagttaaatatgctgtcaggcgagtcaaatgtgcagagggaagaggctacaagtccgcttgacaaactttttgttgtcattgatgaattcagtgcacttcaacacgaggttgagaccttaagatatgaaaatgaagatttacagttaaatattgaatcctatacccgtgaaattgaacagctaagagaggtctccagaaatagtgatctaactaatagggagttggaatccaaaggaagtgagcttcttgaggtagctgttagtatggagcgaatgattcagcggttaggatatcttggaggaaaagatgtactagaagataacaaacctgctagcacacaagctctcttatcgaagctggaaaagctaataatagcttcaagtactgaatctgggaattctaaatccataatacaggagctgggagcaaagctgcagtcaagggaaaaggcagttgatgagctatcaacaaaagtaaagatgctcgaggatttgtgccatgcacaactttctcagccagaacctagtaaagacagatcatttgaagcatcttcctcaacaattgggtcagatatgtctgatattgaagatgcgggaccagtgggcaagacaacatcagtttcatctgtttctacagctgcacatgctagaacaatgcggaaggggtcagcggatcatcttgttgtcaacattggttcagagtcagaacgattgattgctgcacaagattcagatgacaaggggcgtataaaatcgctccatacatctggcttcattccagctcagggaaagcacatcgctgatagggtcgatgccttctggtttcagttaatttcgtaaaatggat

SEQ ID NO: 19448 - DNA, 3397 bp, Zea Mays
atggcggacgcgggggtgacgggggtgctggccaagctgggtgagctggcggcggaggaggcgacggcgctgctgcgcgtggacgccgagatccgggcgttgcggcggaagctggcctacctgcaggcgctcgtacgcggggccgaccgccagcgccgcggccgcgcaagcgagctgctcctgctctggctgcgcgagaccagagaggttgctttcgaggttgaggacgccgtcgatgagttccacctccgcgtcgaggcctgccgccccggggcccggtggcgccggcgccgcagatggtggtggggctggcaccgcgacgccgtcagcctcgtccaggacctcgccacgcagttttttgtacgtcatgggctgtcaaatcaaatatctaagatcaatgaaaggattgatgagcttaaccagaacaaggaaacatatcaaattgaaagttctccttctgaaatttggagttcttcatcggttgaaatggatcctgagtggtacgaagataaatatgttataggctctagagaacgtgaatttgctatccttaaggacctaatcatcaacaaagagggagatatgcctcaccgggctgtcatctctatttttggggagcgtggcattggaaagactacacttgcaaaacaactgtacaatgacccagatatcataaaacactttgaggtccatgcatgggtatgtcttccaccacatgtcaggttcagggactatgttgagattatgcacatgcaggtcaacccacagattccagaagcttctgagaaaaatgataatacaacatttgcactcggtaacgaagaaaccactgatatggaattcaaccttcggcagaaccttgagaacaggaggtacctagttgttcttgatggtttagtcagcattagtgactggaactcattatttgctgtgctgccacataccaatgccaatggcagccggatcttacttaccacacatctcaatgtgaaggaaatcaatcacatcgacccacagatagctcctgtcaagcttccttatcttgacgaaaaacatggagaggagttattttgtcaaagagtttttgggacaatagaacctccacaaatttataggagcaaggtttactataaaaaagttcacaatatatcaacaggtctacccctggcaattactgtgcttgcaggaatattacgatcaaagtttatccccatggagtgggatgtcatattcgaacaactcgagtccaatggccagccaaaaccggttagaagcatatggtctttggcttttgatgacttgccacactacctcaagtcatgtttcctatacttggcgtccgtttcagaaaatgttattctttacccagatcgtttggtgcgtctgtggattgctgaaggttttgttatgcccaagaaagcagaaacactggaggacgttgggtttgactatctaaaagaactggtcgcgagagggttagtccaggtcgtgcagaaggatgctggtggatccatcaagctggtagccatccacaatctgctccatgcttttgtggagtctgaagcacaggactctagtttccttgaaatccaccatcatgctaatgttgtaaacccaaatgcagtgcggcgccttgccatacaaaactatgtggatgcatatgtccacattcctaatgtgttccccaagctgcgttcgcttctctgtgattttgcagaagaccaacaacgcggtagctcaagctctggagagctgcaacctcagtcgttatggggcaatcttgcagagttgtgttcaagagcctgtggcacttcggagaatgttggctcaagcacattgcatgggctccacttcttacagggctccaggtacctacgagttgttgacctgtatggtcttaagacgcgaaagctgccagatgagatcggcagcataatccacttgaggtaccttggcatcaggaacagcaacctggtggaactcccctcatccatctacaagcttgacagtctccagacgttggatgtaaggaaaacaaacgtggcgaaagccgtcgatgagttctgggacatcgaagcactacggcatgtgctcgccgagaaaatgattttgcccgattgctcagtagttcccttgaataatttgatgacactcaacggtgtggtgccttgtggtccgtgggatgaaaagagctgccccttgaacagtatgatttatctccgatccttgtccctgtctgacatttcagcagcccataccgccgcgctttcagcagctctgaggaaaatggaattccttttgtacctgaacctgtcaggtgaatttctcccgtccagcatgttcaccagctcaagcatgcgccgtctccagaccctcatcctgcatggtaagttacaagggattaatgatctgccgagcgacgaccgctatgtcctaccaaaccttaccatgctctatttgcatggatctgaggtgtctcagcagtttgtgcacaagcttggtacgcttccgtgccttgttgagatggagctgtcagctgtttcgtacagtgagggtgagatgaaactgttcttggacggattcccaagcctagcaaggctgaagctcaagaacgtgtctatgttacaggaggtagagatacgtggaggggccatgccaatgctttccatcctagccatgtatgattgcgacagcttgaagaccttcaagaacctgaatagcttggaacaccttcaagaagtggcgatctacaatacgccgccggagattgttgataacataaagcttgaggacgagaagcttttcagcaagatcaaactcctgactaaccccatgatgacagcagaccgagactttccaggtcatgttgtcagaatgagaattaaaatgttggatgaaccggctcatgatctacgtgtcgcagtggcctctgaaccacattgcagtgacatggagggtgattatcatggtgaaaggaaagcaacagaccaagtacactacggccctggtctgttataaataaatattggagttggtcaataattcaggaaaaatctgcagtgttttgcagcacataataattgtttgtgagtagcagccagtgatcggcggccgggagagcagcgaccccccgaaaaaaaaagtcactagtaagaaatgttatgctatcgtggcataacatgttgttatcattttccttttcgttctgaacttgttaaatgtttcctgccctcaagtttgtttcgaataagatcactggtggtgccctgtatcccagttttcaggttctagtttggatattacagtcttaattatcttttcagtttggacattgtaataagaatcatgaacttgtcaactttgaaaggctctgatcactggtggtgctctgtatccc

SEQ ID NO: 19449 - DNA, 2076 bp, Zea Mays
gtgaccaatctattttatgtgatatttgtgtctattatatgtaccttgtggctttgcaggttgctgtccaatcttttttgtgtgcttatatagtatcatttgaatgctgtctttgatgcttcattttatttaatttttttcaacttcagtaaagtagcatatctgatcattatatatcctgtcatttagcaatgaatagaatcttttagatagtagtggaagcacctttgtattatcatatatatctttggacatctattgaaactctattccatggtattgctattcaacatatatatatgtatatattcgtctagctgtccaatcttcattagccccatagttttgcgcgtgggcaacggtagatgggcatcactagcttgacgatcttgatcgaatcgtgctaggaatccaatgtctggtggctattctcagcagggatatcgccctcctcgtcctcagtcaaactggggcccgccttctgtgccaccccagcagcctggctatggttatatgcagcctggggcttatcctggggcaccgccacagtatggtgcacctcagcaaccttatggtagctaccccccaacatctggtggttatcagactggatgggatcagtctcaaaaccagcaatctcatacaactccccctggtactgggtatgattattatagtcagcagcagcaacctcagcaacaatctgcccctgggacagctgcttctactgatgccactagctacaattatggtcagccttcgacgtatgcttcacagggatatgattctacctacactcagcagagtggtgggcagcaagcatatggacatgatggctacactggttaccagacccaagggcagcagcagggctactctcagcagactggttatgatcagcagggttatggcacatctgcttatggatcagctgcaagctcgacccaggatgggtccaactatggtggtcctggaggggccagtcaggcatctccagggcagcaaacatcaaacccagctgctggaagccaacctggctataccagccaaccgcccactagtgctgcagcaacttacccacctcaaggttcagctccatctggatatggcgctccaccatcccagtctggctatggcacccaaccaccacagcaagccggatatggtcagggcgcttatgggcagccttctccacagggccagaaacctcctgcattgtcaccttatggacaggctccgcctcctggttctgctcaggctggttacgggcagtatggttacagccaacctgcttacggtgcaccaccagcttaccctggtgcacccattgcaagccaccagggctatggccagcagcagtcttatggccagcagcagtcttatggcgatgcttatggtagtgcaagctatgggcagcctccagcctactctactgaagcaacacctcctgctgcatcccaggatcactctgctgcccctgctgcggcccttggaacaacagcttcgacagctcctgaaaacagtgggggcgcccaaacatccgctgaaacttgagcttcagcagctaattgggaacaaacattttccaagaccctgccgtgtggtttcctccgcgctgttgcttaatataattacgcatctaatttagggtctacaactacaagttatttatttttctgcctgttgtttttgacaccatgactttctgtttccttgctatattgagtagtactttgcagttattttattgctggcgtatatgtctggactagtgatatatgtgtttgtgtggttacccttgttggaccgtaatgggtaccttccggcttggtctggacagataaatgcccatctatatgtattctgagccctgttatgattgctctaccgtcggaggtttctatgcccacttcagctggtgatgatggttatgtatgaaatttggtttcaatatttcgtaagacttatgtatcggtccataaaaggtttaagcagcatgaaagtctgcctttttgtttttgctgctggtagttctgagtctctaaagctaatgttctttgtttttttttgaacgga

SEQ ID NO: 19450 - DNA, 391 bp, Zea Mays
agcaccgtgcccagccgccgcggcgcctcgcccaccactctctctctccctctcccccctattcccccacgacgtcgtgactacctccactacgatccttcccctgcttatggagatgacagttccaagcatactccaacatctctctccctacacgcacaactagccatggccgcgcggccactgcaacccgtgcgagcacaccctgcgatgcacgagtgttgctctgcacaaccgctcgacggtcgtcccccagagcttccccatgatgcgcgtcgtgaagcccctcgacgaagaccctaggaacacctgcaggggtcggccatcgtgcacagatcgtgattcgtttctgagcttcgaggaatcgacggtcaagcttcaacgaccaaat

SEQ ID NO: 19451 - DNA, 1157 bp, Zea Mays
tcacttctggatagaagtttgggggcccgcgtgcagcgtcacagcctcccacccacaaagagataggaggatagcgtctatccccaatcctcccgccgcggcgacgccttcccctccctccttcctccgtcccatgctccgccgctgacacgttggcccgacttaaccttacgatggccgccgcctccgccatcaccgccgtctccggcgttgtgcttccccaaaccttcctatcccaccggtcgccgccgccgcagtgccgaagctggagaaccggagcctgtcactacttcagctgaatccgaagaggaggtggccgaggggtctgtcgctgtggcggaggcggaggaaccgacgccgccgagcaagccgaaggttaagttcggcgaaataattgggattctgaataagcagttcattgaggaggctgagaaggtgaagactgtaccggatctgaggcctggcgatatcattgagcttaggatgcaacggcccaacaaaaggagattgtcgctctttaagggcataatcatcgcaaagcacaaagctggtgttcacaccacaatccgtgtcagaaggatcattgctggtgtaggagttgagattaccttcccagtgtactcacccaggatcaaggaaatcacggttatcaggcacaagaaagtgaggagagcaaagttgtactacctgaaagacaagcttccccgcttttcaacattcaagtgaaatcagatatgctgacagaacaacttttccaccaccatctcgatttctcttaaacctttttttcacttccctatcgatatcatcatatttcactgtaatctctgggtatcagatatgtaatatctacagctttatagcatacttggcttagcgcaatgttttgtttgttgtcagtgtacaaaattcatactagcaccttgttattatgaatttgcaaatacaaggttatgtactcttgtgcgtcgagtttgtgatgaatgattgttaggtcattcttaattggagtttcatactcattaaatatggtgatacatcatcatgcttggtgatatgacaatgtaattaagagtagagatatagagagagtttggtgtgagatgatagagtttcatggggatgaaaccctgcatacatgattatttagtttaaat

SEQ ID NO: 19452 - DNA, 4157 bp, Zea Mays
gttttctttctactggcacttttatttgatcggcttctgtaatatgcattcacggcaatcaaatttaagcatggttatagatgttagtggaaaagaattcaaattcacctgggcatctgaacgtggcgaattgtgtgatatttatgaagaacgtcagagtggagaggatggaaatgggttgcttctggagtgtggctctgcttggcgcaaggtgaatgtgcaacgcattttggatgaatcaacaaagaaccttgtgaaaatgcgctcagaggaggctgaacgtctctcaaaatctcgaaaatcaatcgtgctggaccctgccaatccatctgtcaagagtcaggccaagtcaatggctgcagcagctgtagaaggcaatccacggaggatgcactggaagcagaagaatgaattttttaagaagaataaagctgctgttatcaccccaaccaaatcagtttcgaaggtcaagttatctaacaatattcccaaagggaatatctcgagttcacctgcaccttctcctgaacaacctggagcaagcaatccttcatttcctgttggatcagatgcaaataatgaagtcacaacaccttttgatttgaacaaaggggaaaacagtaaacatgagaaatcgactgcaagtaagatgtctaacaaaggtataaatcgccgtgcaagttctcatgctgcaaatgtggataataatacaaaagaagtgcgaagctacttgatatctgtgctctcaaaaaatccaaaaggaatgggcctaaaggccttggagaaagttgctgcagatgcatttccaaatgcatcaaagaaaatagagagcatcgtcaagaatattgcaaattaccaagggcctgagaggtatgttctcaaaccagggttggaggtagaaagctctaaaaggcatgcatctgaaggagtaagatccatcagcgagaatattgaggaatctgctccaagcctaaagattgatgatcctgatatatgtgagaggattgacattgtgggctccccacttgctgtaacagatggaaaactcagtaatgatagtgaaggtaaggctggaacttccagtgacagtggaagtgacagcgatagtgatagtgacagcagtgacagtggaagtgatagtgagagccaaagcagaagtgctgcggaaactggtagtgggagtagcagtgatagtgacagtgatgcctcatcaagcagcaaggaaggatctgatgcaattgttgatattacaagtgatgatgacaaagcaaatacagcacacacaaaagtagtagatgaccttaatttgtcttcatcaccaagagatttgacaagacttaatgttgacgatgaacaaattgacattggaacaaatctggactacaggagtgcatcaccccatattgatctgaacaattttaatactggcaatgatgatgcagcagcagagggctttagttctggcaacctgaacaagccatctgaaatgccgggaagcaagaacatgacaaacaccagaatggattctatcggagttgataacaagcacaatgaaatgtctttcgtggacaaccttttcgatgattccatgagagcagccagtgagaactcacccaagggggaagctggtcaattgacagtgcagcatggcaataagagaaaatcaacatctaaggatgaatcaaaactcgtcccagtgaatattgccaaacccaaattaaaaaggtcttctggtagtgagaactccacagcaaagcctgagagtgccaaaaaggccaaacctgacgtaacatcaccaataggttctttatcagaacacaaaagaagtttaccccctgaaaagcataccaatgataggttgaacaaggagacggggaatgttagccgtgatgcttcacgagatagcagtcctgccatgaaaggaagaccttcagctcctggaaatttacagaggatagatcagagcccaaatttacctatcccaacaatgcattctgagggaacaaaaggaaatgctgttaaatcaagttcaaagaaaaaatcagataagatgcagaaaccatggcatggtattgatggtgactttggctcatgttattcacatggtgtagatcaccatgccaattttgatggctctgatgattcttccacaagaaaaaggagtagacatgagaatcctcttattgatgataaaatgcttaagcattcgaaggacactaatgctaatataaattccatgaatttaaccaaaagttccagagaaattgttgtgcctgatgaggtaactgcttttcctgaatctaatgaaagtaatggtgagccatcaaattcacaaagagataatgttgagaaatcaccttatggtaaaaaaaagctccagagagagctttctgatcttgagttgggtgaacttcgcgagacttctttggaaaatgatgatggaaggataaggaagcaatttgagagaaatagttcctccaagtcgcttgatgctaaactaactggtgtaaataacttctaccccagtataaatgacaggaagactcctgtaaccgtctttcatgataagaggaaaccttcacctcaagaatatggaaatagaggccatgtaaaccaggaagggtttcagaggaaggcagcagtgtacgcgtttgatgataataggcctcaacaaagagagaattttccagagagcctgcatttgccaaagattgataattcagattctgagaacataatgtatccagataggtcaggagaaaaaacaagcaaaagggaaactaggatggcacatagtggaatgctagagtatgctgatatgcagaagaagaaagcaacctcaaggcttccacagaacggtactaataatgtcatagtgtctcgaatgcagaaatcaatatccacatcagataatgaggaaagaagtagaaacaactctttgattgagacaaagacaggtagaaagagaagagacagttcttcagatgatgataatttatttttctccaagtatgataaagatgcaccagaactcaaaggtccaataaaagatttctcacaattcgaagattatgtgcaggagtacaatgagaagtatggagtctattcttacttgagcagtcagatagacaaaactaagtcagattttttaagggttcaggatgatctcaatgttgcgaaagaaagagacaaggaacagtattataacacggtggaaagactcagagacatgtatcatgaatcaggagcaaggcataaattgatgaagaaggtcttccttttgcttcatgaggaactgcagattattaagcaaagaattaaagatttttcagaggcctattgaaatgagtcactcataacatgtcacttgcaattgtgtttcggagactgtcgctcatcgtaaggctgataatgtctgggcatgagcattatgctttgcctttgtagaagtttgcttgtcttggaaagattcagtcaatggcgcatatcacaggaaacctgagagactccgtgatttctggaatcacatcgtgctgaatttgatagtaatcacggtgaagtggaggcaaggacagttcaaatatcaatgacgttgttggacacctccgcagccccgcacgggggagatagcagaagaaatgattcatcactcagggaagaggtaatgtcgggaagcgaggaggccttacctcagcagttttgcagctagtttggcactgaactgtaaccgggcggttctctttgtagatgttctgtatcttttacccccacccccagtgaagggcgcgatctctccttccctggcattgtacatcactttgtattagtgtgattcatgtcaaactgaagtaagttgctagctgtgtacatatatatagagccggtagagaagttttgaagcgaggagagacaaatctgggacaatttctttttaacgcgtacatcaattcttcgatgttgcagttcagtttctgaaatatgcatatgctctactgtatattggaccaagcctgaagaacaattccagagcatatgaaaatttggatctttaaactggctctcaaactatttagattctcaaaataggtaggtattcctcaacagatcctgtaaaccatgttctctgatttttatataaagatctgtagtttttaaaa

SEQ ID NO: 19453 - DNA, 369 bp, Zea Mays
agttgcggttgtgaataccaagttccctgagattgggaagttgcttcttgttcgtgtcgtgctccagctcaagagggcatataagcgaaatgacaaggtggtggcacatgaacttgtggcgctggagcttcttactgtactcctggaaaatccgactgatgatagcgtcgaggtggctgtgggttttgtcaaagagtgtggggcaatgctgcaggacttgtctcctcaagggcttcatggtaagctatttcagacaattgtctgagtatggcttgttaaacttgttagcttttggtggtgcatgatcgttttggccacacacattttatagcatcaacattcatttatggatcttcaaattgtatatcc

SEQ ID NO: 19454 - DNA, 941 bp, Zea Mays
tgtgaaatcagccttagcatccatccaatttgacaggactaacctagggattacttgggttgctatgtggcatacttggacccatcaaggcctatgcttcagaagtctgcaggaaagagcaccaagctctgggaatctctcttgttacatcttcacgagccatagctcttgttattgggcctgctattggaggcttccttgcacagcctgcacagaagtacccaaatcttttctctgaagagtccatatttggaaggtttccatacttccttccttgctttgtaatatcgttgctagcagcaggatcatgtattgcatgcatttggcttccggaaacgctacactttcatggtgatgacaaagtagaagctattgaagaactggaggcacaagttcgtggctccgaatctacaaaagatctgcataagaattggcaattgatgtcagcaataatcctctactgtgtcttttctatgcatgacacagcttatcttgaggtattttcactgtgggctgtgagcagtagaaaatttcgggggcttagtttgacatcccaggatgttggtactgtgctagccatctcaggttttggtgtacttgtataccaactcgctatttatccttttcttgcgaagtattttggaccaatcaagacatttcggcctgccgcgatcctgtcgatcattctcctcactacgtaccccttcatggccaatttacatggcctggagcttaaaatactcatcaacattgcatctgttttgaagaacatgtttgcggctaccatcactattgcctgcaacatcctacagaacactgcagtgacgcaagagcagagaggcgttgctaatggcatctctgttaccctgatgtccgtgttcaattctgttcctccagcagcagcaggaattcttaaatatcttccatattcccttcattag

SEQ ID NO: 19455 - DNA, 1539 bp, Zea Mays
accgtgagagggggagggggtatttaactgacggcgggacgaggatgcaagctctcgcggcagcagcaactgcagtggcggcgcctacccccgcgcgcctccgtctcccgctcctcttccgcgccccgcgctccgtcaggtcactgtagacccgcttcttcctccaggcttctgcggatctcgtgcagtgccaccactatgggagacgagacctcgacctccgttgctcctcaggagcaggaatccactgtgcgggctgggagtgtcaagcaacagctctccaggctggtcctttcatccctccagactacattgcccgatgtggagcaacaatgctatgggattatggtcaaaggttaaaggatctggaacaattttcaaaaaccctaattccattgggcaggccattgccaagaatctgccgtcttctgatattattgaatctgcatctgttgctggacctggttttgtgaacattaccttatcaaaccgctgggttgcacagagaatacaagatatgcttgttaacggcatcaagacttgggcaccagttctgccagtaaataggacagtggttgatttttcatcacctaatattgcaaaggaaatgcatgtgggacatttaaggtctacaattattggagatacattagcacgcatgtttgagttctcgaatgttgttgttctgcgcagaaaccatgtgggagattggggtacacagtttgggatgctaatagaatatctttttgagaaatttccaaattggcaggagataggttgccaggccattggggaccttcagattttctataaagcatccaagcataggtttgacagtgatccagactttaaagcaagggctcaacaaggagttgttcggctacagggaggggaggataaatatcgagaagcatggaaaaaaatttgtgacattagcaggagcgaatttgacttggtctacaagcgcctaaatgtggtgcttgaagaaaagggggagagtttctataatccttatattcctcaagtgctggaggaattgagtaacaaaggcttgatcaaggagagtgagggtgcccgagttatatttattcaaggtcatcaaatccctttgattgttgttaagagtgatggtggcttcaactatgcctcaacagacttaactgctctttggtatcggctcaatgttgagcaggcagagtggatcatatatgttacagatgttggtcagcagcagcactttgacatggttttcagtgctgcaaagatggccggttggctcccagatccaagtgaaaagaagtttccgaaaacaagccatgttggatttggtcttgttcttggttcagatggcaagcggttccgaacccgcagtactgaggttgttcgattggtagagctacttgatgaggctaaatctcggagcaaatcagaactactacaacggctcactgaaaatggcaaaattgttgactggacggatgaggaattagagcaaacttcagaggctgttggatatggtgctgtgaagtatgttctgga

SEQ ID NO: 19456 - DNA, 788 bp, Zea Mays
cttggtggcacggaggacacggagacgcttgtgatattaccgggtgttttggggtgccataggggatggagagggctccttggcgagcccctcaaccactaatcgcccttcgcgaactcactggcgaagcaaaaccgctaatcccgttgaacacacatgacaacagcacaacggctcacatcccagatcacgatcggacagcggcgagagggaggaacgggtgcagacgacacctagtcgcgtgcgggcgaggcagagggtgaggaggttctcgtcgagggaggcctgcgagtgcaggagcgacgacacgctgccgctctccacaacaccccgcgagatccgcgagatccttatcgtaggcgcgggggccgaggaggaggcgaaggagaggggacgagatcgtctgcagtcacacgattcgacttgcctctgtagtcacttcatctatgtcgtttgttgcacatcgaacaactactagcttcttctatacgttttgtccgtccacagcccattaactctcgacccattaacgtgttgtagttttatttgtggccgctggtcttggtaattttagcgccaattcttatttttggcatgacttcggccaacagagagcgactcttgtgcttaagttttgccatcctccatttgatgcacatgtgatcaactcagaattctcatctattctttaatactttgattacattatggttcctttacatcaaaacacatgggcgttcagatgggtatggcgttctgatggccattgttccttcccatttgacatt

SEQ ID NO: 19457 - DNA, 7315 bp, Zea Mays
gcactagtctgatgatgaatgggagtagcatcgtggtggtctgaacttcacagggtgaaataatggcggagccctaccaactgaacggcatactgaacgggatgcctaatttgagtcatccatcctctccatcagaggtcgatgaattctgtaaggcacttggtggtaactcgccaatacacagcgtgctagtcgctaacaatgggatggccgcggtcaagttcatgcgcagcatccggatatgggccctggagacctttgggacagagaaggccattcttttggttgctatggcaactccagaggacttgaagataaacgctgagcacataagaatcgctgatcagttcatagaagttcctggaggaacaaacaataacaactatgcgaatgtacagcttatagtggagattgcagagagaactcgcgtatctgcagtttggcctggctggggtcatgcgtctgagaacccagaacttccagatgctctagatgagaaaggaatcatttttctcggaccaccatcagctgcaatggctgcactgggtgataagattggttcttctcttattgcacaagcagctggagttccaactcttccatggagtggatcacatgtaaaagttccaccagaaagctgccattcaattcccgaggagttatataggaatgcttgtgtttccaccacagaggaagcagtggctagttgtcaggtggttgggtaccctgccatgatcaaggcatcatggggaggcggtggtaaaggaataaggaaggttcataacgatgatgaggtgagggcgctgttcaagcaagttcaaggagaagtccctggctcacctatatttattatgaaagtggcatctcagagccgacatctggaggttcaattgctctgtgataaacatggcaatgtggcagcactgcacagtcgagattgcagtgttcaaagaagacaccaaaagattattgaagaggggccaatcacaattgctgctccagacactgttaaagagcttgagcaggcagcaaggcagcttgctaagtgtgttcaatacgttggtgctgctactgtagaatatctgtacagcatggaaacgggcgagtactattttctggagcttaatccacggttgcaggtagaacatcctgtgactgaatggatagctgaaataaacttgccagcagcccaagttgcagtcggaatgggcatacccctttataacattccagagattagacgcttttatggaatggatcatgggggcggctaccataattggaggacaatatctgctgttgcaactaagtttgatttggataaagcacagtcagtgaggccaaagggccattgtgttgcagttagagttacaagtgaggatcctgatgatgggtttaagcctacaagtggaagagtggaggagttaaactttaaaagcaaaccaaatgtttgggcctatttctctgttaagtctggaggagcaattcatgaattttctgattcacagtttggtcatgtttttgcatttggggaatctagatctttggccatagccaatatggtacttgggctgaaagagattcagatccgtggagagatacgcacaaatgttgattacacagtggatctcttgaatgcaacagaataccgcgaaaataagatccatactggttggcttgacagcagaatagctatgcgtgttagagccgagaggcccccatggtacctctcagttgttggaggagctctatatgaagcatcaagcaggagctcaagcgttattactgattatgttggttatctcagcaaaggtcagataccaccaaagcacatatcgcttgtcaatttaactgtaactctgaacatagaggggagcaaatacacgattgagacagtaaggggtggaccccgcagctacaaattaagaatgaatggatcagaaattgaaacagagatacattcactgcgagatggtggacttttaatgcagttggatggaaacagtcatgtaatttatgcagagacagaggctgctggtacacgccttctcattaatggtagaacatgcttactacagaaagaacacgatccttcaaagctattggctgatacaccttgcaaacttttgcggttcttggttgcggatggctctcatgtggatgctgatacaccatatgctgaggtggaagtcatgaaaatgtgcatgccactgttgctgcctgcctctggtgtcattcactttgttatgcctgagggtcaggccatgaaggcgaatgacctgatagcaagattggaccttgatgacccatcttctgtgaggagagccgaaccatttcatggttcctttcccaaactgggacctcctactgctatctctggcaaagttcatcaaaaatttgctgcaagtgtgaattctgcacacatgatccttgcaggatatgaacataatatcaatgaagttgtacaagacctgctaaactgcctagacaaccctgagctcccttttctacaatggcaagaacttatgtctgttttagcaacacgacttccaaaagatcttaggaatgagttggatggtaagtacaaggagtatgaattgaatcctgacttctgcaagagcaaggatttccctgcaaggttgctgaggggggttattgaggcaaatcttgcatactgttcggagaaagatagggttacaaatgagaggcttgtggaaccacttatgagcctggtcaagtcatacgagggtggaagagaaagccatgctcgtgttgttgttaaatctctatttgaggagtatctgtcggttgaagagctcttcaatgataaccttcagtctgatgttatagagcgtctacgccttcaacatgcaaaagaccttgagaaggttgtatacattgtgttctcacatcagggtgtgagaagcaaaaataaattaatactgcggcttatggaagcattggtatatccaaacccatctgcttacagggatcagttgattcgcttctctgccttgaaccatacatcatattctgaactggcacttaaagcaagccaacttcttgagcacactaaattgagtgaacttcgcaccagcatagcaagaagcctttcagagctggagatgtttactgaggaaggagagcgtctgtcaacacctaggagaaagatggcgataaatgagagaatggaagatttagtttgtgctccactggcagctgaagatgcccttgtagctttgttcgatcacagcgatcctactcttcaacggagagtagttgagacatacatacgcagattgtatcagccatatcttgtaagtggaagtatccggatgcaatggcaccgagctggcctaattgccttatgggagttctctgaagagcatcttaagcaaagaagtgggcaagatgtgcccctacagcaagtagaaaatcccattgagaagagttggggcgtcatggttgtaatcaagtctctccagtttgtagcaactgcaattgatgttgcactgaaggagacttcacagtacggaattggtgtcagaagtgtctctaacagtaaccatgtacattctaatcaaagcaatatgcttcatattgctttggttggtatcaataatcagatgagtactctgcaagacagtggtgatgaggatcaaacacaagaaagggtcaacaaactattcaagattttgaaggataatactattacatcacatcttaatggcgctagtgttaaggttgtcagctgtattatccaaagggatgaagggcgtccaccaatgcgacactccttccaatggtctgttgacaaactttattatgaggaggatccaatgcttcgccatgtggaacccccgttgtctacattccttgagctggaaaaagtaaacttagaaggttacaatgaagtaaaatacactccatcacgtgatcgtcagtggcatatttatacgcttatcaagaacaagaaagatcagagattaaatgaccagaggatgttccttcgtaccatagtcagacaaccaagtgcaacaaatagtttcctgacaggtaatattgacaatgaagtagggcacacacaagcttcgtcatcgttcacatcaaacagcattctcagatcattgatgggagcactagaagaaatagagctacatgctcatagtgagactgtgagatcaggccactcacacatgtatctgtgcttactgagagaacaacaattgcatgaactaatcccgttttcaaggatgactggtaaaattgataaggatgaaggaactgtgtgcacacttttgaagcatatggtattgaatttatatgaacatgttggggtcaggatgcatcgtctttctgtgtgccagtgggaagtcaagctctggttggtttgtgatgggcaagctagtggtgcttggagagttgttgttaccaatgttactggccacacatgcaccattgatatttaccgagaagtggaagaccccaccacacatcagcttctctaccactctgccacaacctcggctggtcctttgcatggtgttgcattgaatgaaccatacaagcctttggatgctattgacctcaaacgttatgctgctaggaaaaatgaaaccacatactgctatgattttcccctggcatttgaaacagcgctgaagagatcatggaaatcaagtagctatggtgttagcgaagctaatgagcacaatcgattctatgctgaagtgaaagagcttatatttgctgattcggttggagcatggggcactccattggtttcagttgaacgtcctccaggcatcaatgatattggcatcgttgcttggaacatgaagctgtccacgccagaattcccacgtggccgggagattatagttgttgccaatgatgtgacatttaaagctgggtcctttggtccaagagaagatgcattttttgatgctgttaccaatcttgcctgtgagaggaaacttcctcttatctatctggcagcaactgctggtgccaggcttggtgtagcagaggaaataaagtcatgcttccatgtcggctggtctgattatgagagccctgaacgtgggtttcagtacatttacctcactacacaagattactcacgtctaagctcttcagtaatagctcacgagctgcaactaaaaaatggagaaaccagatgggtggttgataccattgttggtaaagaggatggacttggttgtgagaatctccacggcagtggggcgattgccagcgcatattctaaggcatacaaagagacctttactctgacatttgtgactggaagagctgttggcattggggcttatctggctcgtttaggcatgaggtgtatacaacgtcttgatcaaccaattattttgactgggttttcggcactaaacaagctcctggggcgggaggtgtacagttctcatatgcaattgggtggccccaaaatcatggctacaaatggcgttgtccaccaaactgtgtcagatgaccttgaaggtgtttctgctatcctgaaatggctcagttatgttcctccatatgttggtggtcctcttcccattatgaaacccctggacccacccgaaagaccagtaacatacctccctgagaatgcttgtgatgctcttgcagccatctgtggcattcaggatggtgaagggaggtggttgggtggtatgtttgatagggaaagctttgtggaaacattggaaggttgggcaaaaacagttatcaccggaagagcaaagcttggtggaataccagttggtgtcatagctgtagaaacccagactgtgatgcaagtcatcccagctgatccaggtcagcttgattccgctgagcgcgtagtccctcaagcaggtcaggtttggttcccagattctgcaaccaaaacagctcaggcattactggatttcaaccgtgaggagcttccgctgttcatcctagcaaactggagaggtttctctggtgggcaaagggatttatttgaaggaatccttcaggctggttcaacaattgttgagaatctgaggacatacaagcagcctgcttttgtatatatcccaatgggtggagagctacggggaggggcctgggttgtggtggacagcaagatcaatccagaccacatcgagatgtatgccgagaggactgcgaaagggaatgtccttgagcccgaaggattggtggagatcaaattcaggccaaaggaactggaagattgcatgctaaggcttgacccagaattgattggtctgaatactaggctgaaagagatgaagaaacaaaatgccagcatctcggaaatggagaccatacggaggagtatgactattcggatgaagcagttgatgcctatttatactcaggttgccacacgatttgccgaattgcatgacacctctgctagaatggccgccaaaggtgtgatcggtaaggttgttgattggaaagagtctcgggccttcttctacaggagattgcgaaggagagttgctgaggatgccctggccaaggaagttaaagaagctgctggcgagcagctttcccacagatcagcattagactgtatcaagaaatggtatctagcgtccaaaggaactgaaggtgatggtgaaatgtggaatgatgatgaatctttctttgcttggaaggatgatcccaaaaactatgagaattatcttgaggagttgaaggctgaaagagtatcgaactggttctcgcatcttgctgaaagttcagacgtgaaagctctaccaaacggtctttcgctgctccttaacaagatgaatcctttgaagagggagcaggtcattgatggcctcaggcagcttcttggttgatcgatggtggcaaagtggagcatgaagccctgtttagttgggaacggattgttctggttgtagtcatgtatttagctgtttaacatgtatttaattgggtggcgttactccacgtcatacggtacaacagcaatcctgatcaagtgattatttattcttcaatcgaagtagtacatgattttcatcagtaagctttgtgcttgcaattagggataaaatcggatggaaatgaactgaaaaacactcattttcgtttctatattttttttataaaaatggattctaattcagaaaaaccgtgagcaaaaacataaggttctcggtaaagaagggatttggacagcgcatatattgaaagaccggtaggagatgcaatagagacccgattctcgatttcttgtggaggatttctctattaggaataaaaaacggggaagtttctttctccacatgaa

SEQ ID NO: 19458 - DNA, 2151 bp, Zea Mays
cgttgggtcactgttggcaaggtgttgggtcgacgattggagctggcgtctacgtccttgttggcacagttgcgcgggagcattccgggccggcattgacgctttcatttctgatagccggaatagcagctgcgctttcagccttctgctatgcggagctggctagccgttgcccttcggcaggaagcgcctatcattattcgtacatctgcgttggcgaaggagttgcatggttgattggctgggctttgatacttgaatacacgattggtggatcagccgttgcccgtggcatttctcctaatctagccttattttttggaggacaggatagtctgccatggattttagcacgacatgagatcccatggcttgatgtcgttgtagatccttgtgcttctttcctcgttttcgtcgtcactggccttctctgtgtggggataaaagagagttcatttgtgcaaggagttgtgacggtcttaaattgctttgtgatgttatttgttatcatagccggtagctacatcggcttccaaacaggatgggttggctacaaggttgctggcggatttttcccttatggagcgaatggaatgcttgccgggtcagcaactgtcttcttcgcctacataggatttgattcagttgccagcacggctgaggaggtgaaaaatccacaacgagatctgccactgggaatcggaacagcattgtcgatttgctgttccttgtacatgttggtttcagttgttattgttggtctggtaccatactttgctatggacccagacacccctatttcatctgcttttgccaaacatgggatgcactgggcaatgtatcttgtaacaactggtgctgttcttgctctctgctcaaccttgatgggatctatattgccacagccaagaatattgatggccatggcacgagatggcctgctaccatcattcttctctgatgtccataagacgacacaagttccagtcaaaagcacagtagtgactggcatctgtgcagctgctcttgctttcttcatggatgtctctcaactggctggaatggttagtgtaggcacgctactcgcgttcactatagttgctgtgtccatcttgattcttagatacgttcctccagatgaggtacccctcccatcttccctgcaagcatcattccgcttgagccaagaaaatgacgaggaaaagctgaggggtacccttggagatgatgatcatgagcaaggctcagctgaaataagtgatgggttctgatcctcacgacgtcagcctcggcaacattcttgcccttcccggtgagatgctccgtttgtgttttgggtggcatgctcctcctagctggtctgggcatgctctgctggattgaccaagatgatgggaggcactcctttggccactccggaggattcatctgtccgtttgttcccttgctgccggtaatgtgtatcctcataaatacatacttgttaataaatcttggtggcggcacgtggatgcgagtgggggtgtggctagtgatgggggtgttcgtctacattttctatggccgcacccacagctcgttgacggatgtcgtgtatgtccctgtggccgaggcgaatgagatatacgggtcatcctcttcgttagggtttgtggcgtaaagagagatggaaggagatgtttgttgaagcctatcttgagccagtcatggtacttctcacaaaaacctcaaagatcctgactggagcaggtacctgcttgagctattgtgttgcaggcatgggtttgaagaattcaatttgtacgtcatatttttaaaatgtgtaaattgtaacgcacggctaagcttgtgtgtctctgttggaggaatgtaaatattagtatattgcatagaactatatataggtggtgccaatatacaggtgtttaaaaaaaagggggggggtcattctaggaatctgtatgttttactacgaacttgttctaaattcctaggaattcaaacaggcatgtctgaggcgtattatgtggttaaggcctcaaaggtccaaacacattttatttcatgttgaaatgaagattacacgagcagaaatgctcacggaaaaaacaatagtacatcaataattcagattcactgcaccaggtttcc

SEQ ID NO: 19459 - DNA, 1934 bp, Zea Mays
atagctggtaagcgtagtggaggaagagagggaagaaaacgaagcgaagccaaagcaaggtctgagccgccggagagggaggtggccgggtgggaaacctctctcgcgcgtcaggcgtcacgtgagaactcccgatccaccgggacgacggattcccgccgctcccccgcgcgcggcttcttccggtgcggtcggcggccgacggcggaagctactggcccaagcaaagtgagtgaattgcgagtccaggcggcgatggcggggcgctgcgattgacgtgcgacgactatgggcatccaagggaacaaggcggcgacgcacgagcacgacttcctctcgttgtacgccgccgccgccgcggccgccgccgccaaggacgctcctctcctgctccacgactccaagacgccgcctccttctcaagggcaccagcagcagtgggcgctccccttcgccggctccttgcaggtcagtccgccgccgcagcaggcgcaaccggataggaagggccgcggcggaggcggggtcatggattcaggctccagatccagcggcggagccgggttcgacgacgaagacggcctcaccacgcgccgcgaggtctcctcctcgctccaagatttggcagtaagggtggattggaagggtgggagctgcagcgatggcggtacaaatcaggggccaaacacaccacggtcaaaacactcggccacagagcagcgcagacgcagcaagatcaatgataggtttcagatacttagggagctgttgccacacaatgatcaaaagagagacaaagcaacatttctcttggaggttattgaatatatacgttttttgcaagagaaagcgcaaaaatacgaggcaacattcccagaatggaaccaagaaaatccaacgatgcttccgtggagtaaaggccaaatcccaggagattccccgcctgacccttcacatttcgtgagaaatggatcctcccctggatctaatttcactgggaaactcgatgataatcacacatctgcagctgcatcaggggcactggaccaggcagaaactaatcacgtggctagcggctgctacagatcatcagaaactccggcgaatattacaaataatgctatatctcagtcccaacctcaatggacaggtccgtcccctgtggatgactctgcagtgaaaagtgaaatgcttaacagccaggagttggcaatagatgaaggaatgatcagtgtgtccagtacctattcccaagagttacttatctcgttgtctcacgcccttcagagctcaggtgtggatctgtcccaaaccagcatctctgtgcagatcaacctgggaaagcgtgctggcaagagatctgcatctgctggtggtgtatcctccaactccaaggaaccaccagccgatccagcatctagtaacgaactaggcggccatcacgtgacaacgttgggagctagcgctgacggtctcctcccccacgcgacgaaacggcataaacgggacaacagctgatgatgggcctctctcactccgcctcgttcccagacgacagacggattgatcattcttttttttttctcccagcccgacgggaggctctctcttggattggttgcacatcgcgtgctcggtgatgggctgagaccccggctgtattctttttgatttgatcgctcccgccgccatcccctgtctagcccattgtttttacgtagaggaacgaaccgtggagcttcccattgcggattgtgaagccgctcttcttgtacacaggcttccattcatctgagaagcttcttcccctccttgaacaggtctctccgcgttttagacctgtatactagcaacctgtaagatatgattatgatgtccagcagctctcccaggcacggcaccggccagtcaagttgttccgttatttctatgta

SEQ ID NO: 19460 - DNA, 1101 bp, Zea Mays
ttatgtgagtaccgcagatgaagtaaagttttggtatctgaaactgaatccaaagtacgaagtcagtaatgaggagtgtgtctctctcaggcttgaactgtcgcagagttcagtgaaactcgacactatctttgaggcatctttcaagttcatgatatatgatcagttaatcggaaagcacaaggtgcatctaggtaaccacagcttccagactgcaagtacgagctctgccatcgcattcatgttacctctgaaagcactcagacaatcctctagatttattgtcaataacagctgcgtatttggcattggcttcatcaaagttgccactatcaaagttaacacgacgctagaaacactgtttgtcaggaagatgaacatcttcaacgaggccaaagtttacacttggaaaatcgaggatttctctgctctgaagaacccgtcccactcaccggagtttgagatcgctggatacacatggattatctctttgaatccatcctacgatggtaacagcctgtccttattcctgaaaatgaagaagacaaacgacgtccccaaaggctctgggagcctggtcgagttcgctttatccatcaaagaccaggaaaacggcaaggacaggaaatatccaggcaggtgccagttctcgagcaaacaccatcgctggggatggaagaagttcatctcgctggaggacttcaaggactcgtcaaagggttatctcatcaagggcaagtgctgcatcgaggctgaggtcgcaatcagtggctcttcgaagacggagtactctatgtaatttgatttgtgagagctcatgattagtgtttattctcgctagaaccaactatatagcgtgttccatatgtattagcatgccatcgagactctagcttgctctatagatatctcgacgtatccgctcttcaagcttcgttctgtcgagttgaatgtggtctaataagtgaatatatgcaaactgggatcttattattttaggctattctggcaatctatcttgattgcgacgaatgatttcacagcagttcttttttttctctatctaatttttgctgtcgagtcttattagttatgctcttc

SEQ ID NO: 19461 - DNA, 2612 bp, Zea Mays
accgttccaagtgaacttacggatttgaagctttgtaaatgagattggagttgctcataacgagacatttgatactatccacaggttttagggatctcagctacccaagaaagagatgcttgttgctacgtttgtctcatgtggcatgcttagaaatttgcaggtgaggtaccgctcaagctacactggtagctttccacactggatacgggaactggactccccaagagaagcttctctgcttaaacagatctataaaagcgatccagaaagagttgtacaaatctttgaaaggcacccttcattgcattccaactctgctgctctttctgagtacataaaagctcttgccagtcttgacaggctggaggatagccccttgctcaaaacattgcagagaggatttgctacttcagcagctgaggaagaaagaagtactggtcttgctgctttcgggagtgtgggtcggcggacgaaagatggagctcttggtacagcgaatgcacctattcacatggttactgctggaaccggtcaatttaaggagcaactttggaagaccttccgaagcgttgcacttactttccttgtgatctccggcattggagctctccttgaagacaggggaattagtaaagggcttggattgaacgaagaggttcggcccaacatggattcgaagacaaagttcagtgatgtcaagggagttgacgaagctaaagctgaacttgaggaaattgttcactacctacgagatcctaagcgttttacatgccttggtggaaagcttcctaaaggtgttttgctggtgggaccacctggaactggaaaaactatgctggcaagggctatagctggggaagctggtgttcctttcttctcatgcagcggtagtgaatttgaggagatgtttgtgggtgtcggggctaaaagagtgagggacctgttcaatgcagcaaaaaaatgttctccttgtataatattcattgatgagattgacgcgattggtgggagcagaaatcccaaggatcaacaatacatgaagatgaccttgaatcagttgcttgttgaactagatggctttaagcagaatggcggggtcattgtcattgctgccactaacttccctcagtcacttgacaaggcgcttgttaggcctgggcgcttcgaccgtcatattgtggttcctaatccagatgttgagggccggcggcagatcctggaggctcatatgtcaaaggttttaagagctgatgatgtggatctgatgatcattgcaaggggaactcctggtttctcaggtgcagatcttgcgaacttggtgaatgtagctgctctgaaggccgctatggatgaagcaaaagctgttacgatgcaggaccttgaatatgcgaaggacaggatcatgatgggcagtgagcgcaaatcagcagttatatctgatgaatccaggaagattactgcgtatcacgagggagggcatgcccttgttgcgatccacacagagggcgctcaccctgttcacaaggctacaattgttccgaggggagtttctcttggtatggttatacagctcccagagaaggaccagcatagcgtttcaagaaagcagatgctggcgaggctggatgtgtgcatgggaggaagagtggctgaggagcttatatttggggaaagcgaggtaaccaccggttcctcgtctgacctaaactacgcgactaggctggcaagagccatggtgaccaagtatggtatgagtaagcgtgtgggtcttgtttcctacagtgagaatagtgttagcggccaaacaagtgtgattgataaggaggtgaaggaaattctggagaaggcgtacaataacgcaaaggcaattctgacaactcacgataaggagcttcatatgctagcgaacgcccttcttgagcatgagacactgtctggagcgcagatcaagaaattactgccacaggtggacaatagtaacaataagcagaagaaggctgccaaggtgccgcagaagacaccggcagccagagccaagggagttgcacaagaggcggcagggaaagccaagggagttgcaggtacagcagcggtggcacaagaagcggcaacagcgaacaccgagggaggtgcaggtacagcagcggtgccacaagaagcggcaacgtcggtggcagcgaaagccaagggagttgccggtacagcggcggcggcacaagaagcggcaacagcaaacaccgagggaggtgcaggtacagcagcggcgccacaagaagcggcaacgtcggtggcagcgaaagccaagggagttgccggtacagcggcggtggcacaagaagcggcaacagcaaacaccgagggagttgcaggtgttggctcatagtggcattggggagaagcacaagtcagcgttttgtgcagccccaactagatgagcaccaagtgtgattagggcaacaatgtgtttggtttccaaccctagatgatcgcggaattgtactggaatggaacactaagcatcgagaatactaatcctttcgtccatgtttcacatgatatattctctgaaacaacgtttggaaactctcacagtgagtaggcagagtagc

SEQ ID NO: 19462 - DNA, 3235 bp, Zea Mays
gagacggggaggcaaaggcaccacgagccactctagagacgcctcctccgtttgttcgagctgcctgggcgggaaagagaaagcgagaccgagaccgcagggattgaaaaaagagggtgcaaaagcaaggctcggattcttgcggggcgagcgactcgtttctcgtctctgcgctgcgagcgaggctcctgctcctcgcggtctcgcttccctccaagttccaatccagcaccgggcgccaccgctaatcagtgctgatatatgaaccccgcatttggacatttggtggtggcaaggcaacgccaaccttccctgttgctgctttgaatgttctggtggttgtcggatggatcgccgcagttggctctggaagcgcaagtcattggataagagccctggggagagcgatagctctggctctgcttcatcacactctgagccttccttcgatgatcaggaatgatgatgttccagattctgtaaagaatttgaatgagaaggtgtccccaaagtttaaggtcgatgatgtccaggattctgtaaagagtttgaatgagaaactttctgctgcccttttgactatcaatgataaagatgacttggtaaagcagcacactagagttgcagaagaggctgttgcaggttgggaacaagctgaagctgaagttgcttctctgaagcaactacttgaaactgcatcaaagaagaatacctctctggaggatcaggtcagccacctagatgacgcccttaaagaatgtgtaaggcagcttcgccaagcacgtgaagaacaagagaataaaatccatgagacagttgctaagaagtctaaagaattggagtctgagaagtttgagctccagcaccatattgctgaactcagtaagcagttgcaagccacgaaactagaagctactacggtgcgtgtccagcgtgatctgcaggaaaagcttcagatagtggagaaagaaaacaaagacctcaaggtagaattactcgcactgtccaaggacctgaagatacttgcacgggaaagagacctgagcaaccaagcagcagaaacagcaagcaaacttcacctggaaagtgtgaaaaagataacaagagttgaggcagaatgccttaagttgcgtcatttaacgcggcgtacgtccttgaccaatgattcaaggctgataactaacagtgcttgcatggaatctcagactgacagtcagtctgacagtggggagcacatgctagttgatgagatgaaaaattctgattcatgggcaacagctctgatagctgaacttgatcagttcaagaatgccaacaacgacacaagaaatcttgtgaataattcggttgaaattgacctgatggatgatttcctcgagatggaaaagctggctgcactgcctgaagtagactgtgtaagctctagctttggagctgaaactgattctgaccaaggtgtgagtagagataaatcatcaaaagttaaaactgaaccattgcagtgtcaggtgacagatttgcacgcaaagatcgagaagattgaaggtgagaaaagggagcttgaaatggcccttgcagatgccagagttcagcttggcacatcatgtgatgctctaatggtggccaacaacaggttgattgatttgcagatgcagttggacttggcaaatgagtccaaacatgctgctttcggagaagctgagcgactgaatggtgagaggaaagatttggcattgcaactggagtccaggtcttcacaagttgatgagcttcagctgatggtggcatcgctggaaaagaatgtagacaggaaggtgttggaattgcagttagagttagtttctgtggaggctgcagatctgcgcaagacagtggcttccctggaagagaagattgatgcagagataactctctctatgcagcacaaaacaaatgcagacctggcagaggcgtccaaagaatcattagaggcgcagctgcagtctgcaaacacagagatagggaaactgaacgggattgtgcaaactttagagaatgaggtgaggaaagagacagattctcgtgaagaactactgaaacagatagaggctatgaaaattgagtcagagagatcactatctgtggtgtctaccaaagagtcattagaggtgcagctccaggtggcgaattcagaagttgcaaagttgcgtgggatggtgaatgctctggagtgtgatgcggcgaacgagaaggcatattcttcagatctccagatgcaacttgaggcagtggaaggtatcaggaaggtgttggaatctgagcttgagtcttcacaccaggaggtgatgaggctgaaggagaaagtttcgtccttggaagcaaggatcaaggaccagacctcgttgcttgtagaatatacagctaaatcagaggatgcagtgtcccggaaaaaggcaatggagggtcaactagaagcagcaaatctggaagttacaaaactgagaaacaaggtgagcctgatacaaggcaaggtggagcaggagaagcttctgtcagaagagtacgaagcaaaatgccgcaagctggaggcgcaggtgttgagggacagccgagaggcgaaactttggcgcctcacgaactcaaacggagacctgaaggtgaagcaggagaaagaactagtcagtgctgccgggaagcttgcggagtgccagaagactattgctaaccttggccgccagctgaaatcgctaacagatcttgatggcgtggtggccgatcctgaaaagctggaatcgagggacacgcacctggacttcagagatggcggagacgtggctgatggactgtatgaactgggtcttcctaagaggaacggtagctgcctctcaccccttcggtcggatccgtcgccgaggggtttgccgtcccttagtagctacctgagcaaaacaaaaaggtgaaaagtctgatgggatcattcaccattgtgcttgtgcataaattatttgacagtctatggatgatgccagttgtgacctggtggtagatcggtgtacatttacagaacttgatggttgctcacatgtgtactttctccttttgttttgctctcattttgcgagactgcagggtttgtgacaaatttactagatcttgtgagactgtagtgcgttattctcgcgttggaattcaactcgtctacaacaaaaatagaagaaaaaaaacaaattcaaccggtcggcaaagtagaagtagg

SEQ ID NO: 19463 - DNA, 151 bp, Zea Mays
agttggatgagtggcttgaagaacgacagttaatgaccaaagtggttcagttacatctgcagcgagcccgagactggatgaaacgccatgcagacaaacaccgctcagagcgttcctttaatgcgggggattctttgtacctcaaattaca

SEQ ID NO: 19464 - DNA, 2693 bp, Zea Mays
cagacgtagttaatgatgaagttggcgattctttgcatcgaagcatccagccgaggaaatcaacggttacaattggatggttggtccgaccacaatcaatcttagtcgcacaacgcgcctccctgctccagttttccattccttgcgcccccttcagatccgatctgatccacgccggcgagacaccggaggaccgccatgacgctcagcctccgtcgcaagcagctcgatgttatcgtgcggatgctgcacctgaaccagcagcagttgccgaacggcggcgagggacagggagaggacgatgcgtacaagatcctggttatggatccgccctgtatctccatcctctcgcctgtgctcaagctcggcgacctccgccaccaaggtgtcaccctcaccctcgccatcgatcgtccgcggcaggcggtgcccgatgcgccggccgtctacttcgtccggcccacccccgggaacgtggaccgagtagcggccgacgccgccgcggggctctacgggtctttccacgtcaacttctccacctccgtcccgcgacccctgctggagcgcctcgcaaccgcctgcgccgccgctccgcccgcgtgtgcgggccgcgtggcgcgcgttgctgaccagtacatcgacttcgtctgcatcgaggatgacctcttttcgctagcgcagccccgggcctacgtcgcactcaacgaccccgccgctgccgacgccgacatcactgccctcgtcgacgccgtcgcgctgggcctcttctgcgtagtcgccacgctcggtgttgtgcctgtcatcagttgtgcgcgcggcgggccagcggagatggtggccggcgccctcgacgcccggctccgcgatcacctactcgccaagcccaacctcttcacggaggctgcatctgccgctgtcacgtcattccagcgccctgtgctgtgcctcttcgacaggaatttcgagctgtctgtaggggtgcagcacgactggagctaccgcccattggtgcacgacgtgcttggcttgaagcagaacaagctgaagttgccggcagagaagtacgaattggatgactctgataaattctgggtggcaaacagctggtctccattccccaaagttgctgaggaaatcgaagcgcagcttgccaagtacaagcaggatgtggatgaggtgaaccagcatactggtggtggcaaggttggggttgagtttgatggtactgatctaattggcaacactaagcatctcatgaatgcggtgaactcactgccagaactgacagagcggaagaatatgattgataagcacaccaatattgcaacatctttgcttgggcatatcaaggagaggtctctggatggatactgcagctgtgaaaatgatatgcttgtgagtggcactgtcgaccggaatacactgctgagtctcatcagagggaagggtaccaaggaagataagcttcggctagctgtgacctacctgctgtcctttgcgacaccaccatcatctgagctggagcaggttgaggccgctctgcgggaatcggaagttgacatgtctgcatttcagtatgtgaagaggataaaggcattattgaatacccaatttgcagctgcctcaggcacagcaactaagagcaacatcgtcgattgggcagagaagctgtatgggcagtccattggcgctgtgaagaatctcttgtcagatagtaggcagctggccttgacaagaacagttgaagctcttatggaagggaaaccaaacccagaggtggatgactaccttttgtttgatccacgggctcctaggtcaggaactagtgggcagtttaaaggacccttcagagaagccgttgttttcatgatcggtggtggaaattacattgagtacaagagcttgatagagctaaagcaacgctcacagccttccaaacatgttatatatggtgcaacagaaattcttagtggggccgagtttattcaccaactggcagaattggggcagaaagcagggttgggtggtggcagcagcaacataccaccaggttcagcacaataggtaggatgctcttacaagaccttttaatgttaaggagtgattcgagcttcagggactacggtaaatacgctcataccccacattttattttaaggagcgttccaggctgcatagattagtgatatcaaatttcatgaaaagtttatgccccttcgattgattagttgtcaatacatagctttgttgtttcaatttgggttttgatattgcccatgtatgactatttttacttttctgtactctatttccttgcccccctccctttattttactaagaaatttttcttggaattctgtttgcacactcaaagaaatccgttcatgaatatttgtaacagaaacctagttctgatgtttggataatttgattttggttgaaatcttcatagttccaggctgttacatcttttacttgtagtgcaaggccatatgtgggttcttgaaaccccatatatatgactaaccatctcaataatatgtatgcagggtggcgtaatatataaattcattttgtgtgttggggatataagtttattacttgttttatctacaatagttggatacttggattgggaaaatgcattgtagcaatggcaagctgaagagggctgtagaccttacttgagtgt

SEQ ID NO: 19465 - DNA, 2178 bp, Zea Mays
tgctctcgcgttcccgcgcgaagccgaaaaccctttggcgctctgcgcgcgatcgcgcccctcccctccacgcccccgcccgcccttttcttccccacccgtctccgttccccgccatccacatccgacattcctcccccaagttctctcccatccccaaagtatcatccaatttccctccccgctagccacaatgccgactcttcgcagcgcgacggcgaacgcgtcccccgtggccaccccatcccctgccgcggcgagcacgccgcgcagcgtcaagcgccggctgacgccaggccgcgccggcgagtcgcccaaagcgtcgcggcacacctcccctcaccgatcccctcacgccggcaccggaactgtatgcattccgaagctgctctcggcgtcgcccaagtcctccaggaagcgtctctacggcgaccttgtcgcagccgagaagcccaagtggaatccccgagatgccgcgcagattagggctgtcaaggaggcgctgcacgtggcaacagtgccatcgtctgaattggtttgccgggataacgagctcaggcgtgtccttgagttctgcaaggtgtgcgtccaacaggagaaggctggtagtctctatgtctgcgggtgccctggcacagggaagacattatctattaacaaggtcaaggatagcttggtgtgttgggcagatgagatgggaatggagacacctgatgccttagcaatcaattgtacaaacctagcaaacacctcagagatttttggcaagatactaggcaaattgcagaaccaaaagaagggaagcagcaaattgttgccacttcagcaacttcagagcatgttttccaacaaggatttagctccaagaagaatgatgttggttattgtggatgagatggactacttaataacaagagaccgtgctgtgctacatgaccttttcatgcttacgacttatccattctctagatgcatactaataggaattgctaatgccatagatttagcagaccggtttcttccaaagcttgaatccttaaattgcaagcctcttgttgtgacttttcgagcatattccaaagatcaaataactgacatagttaagcataggctaaaggttcttgagtatgatgtatttgaaccactagctctggagttctgtgctagaaaagtggcggcagcctctggtgacatgagaaaagctctaggcgtatgcaggagtgctgtggaggttcttgaagcaaggctacatgattcgcctgatcaagaattaggaatagtgacatttgaccatatggatatggctttgtcaaaagcattcaagtctgctgtcgtagatagcatactgtgtcttccccagcaccaacagatggtgctgtgtgcgttggcaaatacttttcagcattgcaagaaaaaagcaactactctaggagagctcaacaaatcatacattgagatttgtagatcaacccaagttccagcagttggaatgcttgaattttctaacatgtgtatggttttgagcgatcaggggttcatgaaactagggcagtccaaggaagataagcttaggagagtaacacttcagattgatagttcagatatcacatttgcttttaagggaaatcgcttctttcaaaaatgtctggagcagccaagatgctaactagacccatagcagagagtagatcaatacacttactgttgtaatacattacagtattagtttattgacattatcaagtaccagcaatttcaacccctggatgtgctgctcaggtggtttcattcaacatggtcaaacgtaccttggttacatcatgaagctctttcttgcagtgcagggataagtacgtgggacgagttatgatagtattatgtgacacaattctcccaaagatggctgagtgttgttatgatttctcaatttttggttcttccagaactgattgatcatgtagctaaacatttaacatacaagaacatttgtttacacatttcttgcctaaaggctaaatcagtaatgagaagctgcactaatttaatgtgtctgccagatcaattgcatgcttctgatactttatacagtgacagtgacattgttgatgtaaatgcttccccccttatgtggaaatggcaatagggatgcttctcgaataaagatcaaaacaattgaac

SEQ ID NO: 19466 - DNA, 2275 bp, Zea Mays
ttcaaaaggtgattggtgctttcgacctcattagtgccttttgttcaattgctggacccaaggagcagagttctgtcgacatggcatctccaagaggaaggatgtcatttccccttcgttcctttctgatgatctgcctcatggctcagctgggagcttccaatgttgtactcatggcgaacaacactaccctgtcgttcgacgacgtcgaggcaatttttactccagcagtgaaaggttcaggtgtaaatggtgtcctttatgctgtggaacctatggatgcatgcagtccattgaaaacaaaagcgataggaggctctgtctcaccatttgcgttggttataagaggcggttgccatttcgatgacaaagttagaaatgctcagaatgctggattcaaggctgctgtagtatatgatactgaagacaacggtgtccttgtttcaatggctggaagctcgtctggagtccacatatatgccgtgtttgtctctaaagcgtcaggggaggagctgaagaaatattcaggccaaactgacgcagagttgtggataataccaacatacgcgaactcggcttggtcaatcatggcaatttcatttatatcactgcttgttatgtctgctgtcctagccgcgtgtttctttgcgaggagacaccagataagacgggacagggctcgacttccccaaactcgggagttccatggaatgaacagccggttagttaaagcaatgccaagtcttattttcacgaaagtgcaagaagacgactgcacatcagcaacatgcgccatttgcttggaagactacagtgctggagaaaagctaagggttctaccttgtcgacacaagttccacgcagcctgtgtggacctatggctcacctcctggagaacattctgccccgtatgcaagcgggacgcgaatgctggaacaccagacccccctgtatcagagtcgacgcctttgctctcatcatccgccattcgcttaccagaaccaaccgcttcggcttccttccggtctacagtggcagcagcagcgtctccccccaggccaatcagccggcatccgtcaccatcacggtccatatcccgcaagcactccgtttcgggttccagcatccctggcacccctatccccaggtttcatgcaagctcatcatctcctacctgcacaagtggaagcagtttggacctcgcaaacatgccgtcgtctccatggcctcgcgcttcgcaccttgcatctgctcactcttcgtgcggtggccgcctgtccccgccgatccacatcaggaatacctctgcagcgcacgtctcgcgctctgcctatggatctcccagccgttacgtaggctcgtcgcacatgtcccgtggatctccgagttgctactaccttggatcttcttcagggcagcagcatccttacctgaggcactgcaccttgtcaggcacgagcctgttcaccatggtgccccaatcaccgcaacagaaccagctgcagcacggtggagactcggaaaaagatctgtcagctgctgcaccattccgtcagctctactacctgcagcattgtccagattctggcacgtcgtctcagtcgcttccagggtgctgattcttcattcttgctgcaaaattcaccattttaacattgatggtggctccagtaaagctcccggccgtgaggaatcttacatggcaccgaattgacatgtggatttgagctcctcagttcaccatgatgatgagagaaaaaaggtgcgacagaattgcttgtaagaagagagaattgcaccccccagaatgtgtggcttcatcttgaagaagcaaatgcccatgtcgggtttcaccagcgtttagcgtgtactgatacagctctgtagtaattctagttgctgtttgtctatcgaggtttgagccggtagcattccttcctctcttttttgttttcctaattttgaattagttatatgacagacaaggttttcaagaaaagaaataacaagttttacccctgcatttttacagagaggtatgttgaactcaggatctttgccttgcctcgatgggatggttttttaccactgtgttgtttatggtcagtgaaatgtgcatgaagcctcgatggcacttgttctcccgttcagtatgaactacttagtaagtcgctagcagactagcaaattcactataggaaatttaaatttatgggggagttgctctgatgaggcggaaagattgttggtgccaagaaacgcagcagcagatcga

SEQ ID NO: 19467 - DNA, 1136 bp, Zea Mays
gttgtgtattggctatctacttgtccttcatgatctatccaattttctccatctttttttccaattgtataaataaacagtgtaatattcttgtgattatccttttgctgccttcggctttttattaacttctgtgtgagtgatcgaatgagcatataaattatctacgttgtttttcctttttcctttcacttgcaagtataggacccataagcttatgtctactattttccaagaaaatttagagttagtcaaggcagcctgttttcattgcagttatataacattttgggccagtaaaacattatgtggttttatacagtcaagactctaaagtgtgtctactctgtttcttctctctatgtatctaaccttttaagcatgcaggtggaaggggctaaaggtttcttggcagtgcttagagactaccttgacacactatgctcgaacttgagatctcatacaattaccaatgtgcaatctaacaatgacaaggtttccttacttttaaaagagagctttattggttctttcccaagccgggataggccttttatgaagctttttgtggacacccagttgttctcagtacatacagacctagttctctctttttatcagaaggactaagtgtctggcagacttgaatgtctgcctcgtcttgccaagtgtttgtgcaaagagctcgaaggagaagccatataccgtcagaaaaaagtggtagattgccaggatccagttatgggtattgaagaagaatgcttgtagctgcttaagttagtctggtgcggtaatccaaggttttgttggctgtagttggtgcccccataagaagccttgtatggattgttcctgcaaatgcctgtgctgtaacggaaccgtgtctgtggcaaaatctccgaacatgaatgcgtccatttggcaaatctaagcgtgcaatgggacatcgaagaaaatgtaataattcgtggtactccctccaggccgaatcagttgacgctatggtatttaataacggtcgagctttcttattttaaactggatttgtagaaatattaacaatatttgtattattagaaaagtttattactaaaacagattcagagatttatataacaatactagttatgtgcttt

SEQ ID NO: 19468 - DNA, 2787 bp, Zea Mays
caaacgagcaagccttaagcccttaactgacgcttgtgagggcgtcggcagttcgcgacaccccgtgcagccgtgctcttccgcttgaactagggcgcctccgcctccgcgcccgcgccgccgccggctgtagccatgtccgacgaatacgtggacttgcccgtctcggacgaggatgaagaagagctcgaagatgagatggatgatggtgatggggagagtggtggtggaagctcgaagaaaaaggccaagcagcacgtggagcagctcaagcggctgcagcaaaaggatcctgatttctataaatatttagaagagtttgataaagatttgttgggatttgatgatgatgatgatgaaatcgagaacgaccgggagactggggttgaggagaaagagcaatatgtatctaaagaggaactgaagcatgtgaaaccgattacaatggaaatggttgattcctggtgcaacggagtagagaatgaaaagataggttctatccgttctattcttcaagcttttcgcagagcctgccattatggtgaagatcatggggacaattcaactccgaagctcagtgtcatgtctggcagcgtacttgataaagttatgcactttgttttgaaacacatggataaagtcctccgtcaattacttggtgccccaagctatggagggaagaaagaggtaatcagtgagctgatgctgagtaagtcatggaagaggcatggtaatcttatgaggatctatcttgccaatgcgcttcatatgataacagagatgaccgatgagcaaatgatagcatttactgtacaccgtgtcagagcatcagctgtttttctggcagctttcccatcgctcctgaggaagtatgttaaggctctgctccatacctgggctagaggacgaggtgcaatgcctcttgtttcttttatgttccttcgagacttgtgcattcaagtaggttcagattgccttgatacttgcctcaagggtatctataaggcttatttggtgaactgcaaactgtccaaatctatcagcggatcaaaacaacaacacattcaattccttggaaattgtgtcagagaattgtatagtctggatccacaaagtgcgtatcagcatgcttttgttttcatccgtcaactgggggttatcctaagaggagctcttactgaaagggggccaaagtcagtgaaggacaaaaggcagaaagaaagtagcaaatcatcgaaaaaacaagcggagaaatcttaccaaaaaatttatgattggcaatacatattctgccttgagctttggaccagtgttgtgtgcggatgtagttctgaggaagaattccgacctctagcttatccgttgacacaaataatacatggtgtggcatgcctcgtacctagcgcacgttacttccctgtgcgctttaggtgtgtcagaatgcttaattgtattgccgaagccactggtaccttcattcccgtgtcctccctgctgcttgatatgcttgaaatgaaagaacttagaggacgtccagatggtgttggcaaagccgtgaatttgttcagtgttaaacaggttgacaagaaaacagtaaagacacgtgcctttcaggaagcttgcatttattctgtggtcgatgagctggctaaacatttgacccaatggagctactccattgccttctttgagatgtcctttattccacttgttcggctccgaagtttttgcaaaaccattaaagcggacagatttaggaaagagatgaaggatcttatctatcagatagaggccaatgtcgagttcattaagtcaaaacgagtggggattgcattttcacccaatgacccagctgtagagtcatttctgcagaccgaaaaggaagaacgttgcagccctctctcaaaatttgttgctactttacaccagagagcgcaagacaggatggatgctctggatgagaccagtgtgattgtgggtgccgagtcctcaaccttctcacggaggttatcagaagcgcagaagcaacaggatgagcaggacgatgatgaaggcactatcgctttcagtaagaactggctgtctgaaaataagaaacccaaaaccccaaaggaggataaaaagcgaccccgggaggatgatgatgtcgcgactgaggaggatcgggttgaggatttggtcttgagctcagatgaagaggatggcaacaatgaggaagcagacgatggttttgttccggttgaaggtgatagtgatgaagactttgtagaccctgacagcgaatataagaaacaaaagaaggcgaagctgaagaagaggaacaagcgccagccatttctgcacaaggcgccctctagaacaaaaagtaattcagggcccaagaagaaggccagacattagttatgcctgatagggcttggcaaatatgctgccgttgtgatgtatgcttctgagttccgaccgataaaaacattgtcccttgagtggaaaaattattatattttttcaagaaaaatttcaagtctttttttgaccccaacaggactgagatagaatttccaatctgagttttcatttcagtgctcaagggtttacatgattcaaatgtaaagggtttacattgccatggaaaaaattgtacaccaaacatcacaaatatctacctgttcctggtagtgtttatatacgtctagcatgggcgaatgtccatattattgtctgatttgattcatggatcgtcctttcagttctaaatgaactgccaagggctttccacggtaacttgac

SEQ ID NO: 19469 - DNA, 1149 bp, Zea Mays
gctacttcttggcgatagtcatcacaaatgttcttctagtgttgcttaatgcacagtcacatatatgtcacctgagagaattcgtaatgagaactattcttatgctgctgatatttggagtcttggactaacaatattggaatgtgctactggaaaattcccatatgacgtaaatgagggccctgcaaatctaatgttgcagatacttgatgatccatcaccaacaccaccagtagatacttgttcattagaattctgctcattcatcaatgattgcttgcagaaagatgctgatgcaaggcccacatgtgagcagcttctgtcacacccattcatcaagaggtatgcaggaactgaagtggacttggcagcatatgtcaaaagtgtagttgacccaacagaaaggctaaagcaaatagctgagatgcttgctatacattactacctcttgtttaatggacctgatgggatttggcatcatatgaagacattctacatggaacaatctactttcagtttctcagagaacgtgtatgttggccagaatgaaatttttgatattttgtcaaatataaggaaaaagctaaaaggtgataggcctcgagagaaaattgttcatgttgtcgagaagctacattgtcgtgcaaatggtgaaactggggttgcaattcgtgtgtctggatctttcattgtgggaaaccaatttcttgtatgtggcgaggggataaaagctgaagggatgcctagcttggatgagctctctattgacattccaagcaaacgcgtaggccagttcagagagcagtttatcatgcaaccgggaaacttaatgtcatgctattacatatcaaagcaagatctgtacattatccaatcctgattgaacatattatttgtaagattattctctgaagcacatgtatagaggatttagaagaattcctttcggacctggttttgaatcttatttactttgtggaactgaaattttgggccaaacctctgacaagaattgaaaagtttaagtcttcaactatattcatgtttagaactgtttttatatttggttggtattgataattttcgttttgtcgtgaggtcccaggaggatgtgtgatttgagtaatggctgaaatttatcatttttta

SEQ ID NO: 19470 - DNA, 3245 bp, Zea Mays
ctttcccattcgtctcgtctcgctctcgcctgccgccttcccttcgcgtctcctcgctccggccgcagcagccgcctccgccctccatccgcaaaattacccaatccatcatccccgaaccctaaataaatcctcgatcggccgcgcgcgggaatcaacggatgggaccgcggccggcggctccgtagcggattggaggcgctcggttcgcgggggccgcggttcggctgccgggtggcgcccgcttctagaggaaaatattagccgtcctgctgttatagccggtcatctttcacgttctaatagccgtaatgttcttgagggcccaactccaatcaggtcatctgattcacgcaagccacaactgcagaataggtcagaatccatgaatggcctgcgatctggatccacttcaccgagtctggtcagggtccaaagtcttggttcttcgatgtctcataccttcgcttctgctgttggttcatctatctcaagaagcaccacccctgacccccagctgatacggagaactcctagtccttgccttcctccagttggagttcggatggggagttctgataaaaaagttgaagcttctgtttcttcacttaatcatgatggtgctgacattgtggcaactctgtctagcttaagcctatctggaaataagatgtcgaatgtggaaaatgaagttcagactcatgcttaccagaactttggtgatcaggctgatgtgttgtttaatgtaccaaaggaacataggcaattttcaccacggaatttaactcaaaaaactgatgaagacttgcttaatgcccctgaatatgcagttttcccaaatggggggagtaacttcagtaatttgcatgctagtaaggtggcatctcatagcaatagcaagttccctatgcaatcaccacacggtaatgccaacaagaaaggatctttgatgagctcagctggatcagtttctcagtaccagcacttgaatggtgatagccatgacattgatgtatctggatggcatactcatacaggtggttttacttcatccatgctgaacaatcaactgaatcctgatggtgactatggcaatgttctttcgaatcatggtggatcgagttatcagggccaaccaacagagacgatgtacgcacaatgcttgcaggcaaaccctgattcaccccttggcgcagctgcaagcatgagccctttccaagggaggggttttactggttcaggacacttggatagtcctggataccaaaaagcttaccttgggtcattatttggccagcaaaagctacaatatgggatgccatacctgggcaattctggtgctcttaatcaaaatatctatggcaatgattctgcctttggcattggaatgacttatctaacaagcccgccatctactccatatatctcatctccccaaggccatgttgggcaaggaaaccgtctgactcgacttccagcagtggtgaggaacaccgctggaggatccatgggatcgtggaattcagagaatggtctgatggataatggttatgggtcctccttgctggaggaattcaaaagtaacaaaactagatcttttgagctgttagatattgtaggccatgtggtagagttcaggtattatttccttgaaattctaacgtagtcaagttcatttattttggtatgaatctactatggttctctctcttacctttcagttcggatcagtatgggagtcgctttatacagcagaaactagaaactgcttctactgaacagaagaatatgatttttcctgagatccttccccaggcacgtactttgatgactgatgtttttggaaactatgttatacagaagttctttgaatacggaactgaaacgcaaacgaagcaactggcaaccctgcttaagggttttgtgttacagctgagtcttcaaatgtatggctgccgggtgattcagaaggctttggaagttgttgaagtggaacaacaaacacaaatggctttggagcttgatggatctatcatgagatgtgttcgtgatcagaatggcaaccatgtcatccaaaaatgtatagaatgcatccctcaggagaggatacgatttatcatttctgcattttacggacatgtcgtggagctttctatgcatccttatggttgtcgtgttattcagaggatcttggagcattgtgacgatgaaagcactcaaaatgccatgatggaagagatcatgcagtccgtggttactttaacggaggaccagtatggtaattatgtaatccagcatgtcctgcaatatgggaaaccagaagagcgttctactataattgcacaactcgctggacagatagtgaagatgagccagcagaaatttgcatccaatgttgttgagaagtgtcttacttttggttctcctgagcaacggcagattctaatcaatgaaatgcttggcacaactgatgagaacgagccgttacagaaggttctggagacatgtgatgaccagaaccgtgaattgattctttcccgtatcaaggtccacttgaatgcactgaaaaggtacacctatgggaagcatattgtgacacgtgttgagaagcttattgccgcaggagaacggcgcattggcgcactaccctcctgctgagatggcaatggttaggtcacctgtacagcagaagatagcgaggcctagctttttaccattaccagtagtcgttaatattgagcaagtacaaccgcagaagttaaaaaagaaaggctcccaaatcctttgtaaataaaggagagcctctggaaataaataagaatgagaaaagatgagattttacttgtcctcgaggaaagacttgtatatttgtattgtttttcccccctcttgcaagcagcaggataaagaagttttaaatattttgtcgagaagcaaagcagttactagaaggataaaggttttaggatcatagatgatgggaaggactgctgtagattctccttttttccttgggtttcatcagtcagtgtataagtactaatgtccatgctgatgttaatctctgtaagactgccttcagtttactgaatcttttttttctcttctggtgcctgccaagtgccagcatctgagcagttcttcaaatattacttgtttccaaccactcaactttcgtataatgttcataaaatgtttgtagctactactgaccttgatatgtgatgcatcatggaccaagaaaa

SEQ ID NO: 19471 - DNA, 2630 bp, Zea Mays
atggcggtagcgccggtggtgcgccagcagagccttacagagggattgatttcctgtaggactgatgttcaatgtttgcatagatggcagaaggttttgaaccctgagcttgttaaagggccttggtcgaaagaagaagatgagatcattactcagatggtaaataaacttgggccaaagaaatggtcgaccattgcccaagctcttcctggacgtattggaaagcaatgtcgggaaagatggcacaaccatcttaatcctgggatcaataaggacgcatggacacaagacgaggaaatcaggctcatccatgctcatcaaacttatggaaacaaatgggctgaattgacaaagtttttaccaggaaggacagacaatgcaattaaaaatcattggcacagctcggtgaagaagaaagttgattcatacagatcatctggtttactggctcaatcccagggcttcacacctgttgaatacactgctggtggtttaaatgttgattcttcatctgcaataaccaatcaaattagcgaaggcagtggttttaatgtttttcgggaggctgaagattcgatggagttaagtcagtcttcgtttgccaagggttcttgctctcaggaggagcaaaatgatgtgactttgggatctcatttgcatgtgcatgaatctttgtgtccagatggttccactaatgatggcaatggtgcttctggtttacctgacattcatcaccgcttatgcacttctgacatggatcaagataaacacttgcaggaaggaatggatttggataaacacttgcagcatgaattctctcaaggaacggatttgcatcttgatgtagatgaagtgccaaacaactttgtgataaaaggtagccagtcatctaatgagcttgcagttcaatttcatgacacagagattatgaatagttcaaaaaatgatggagtgtctttggtaccacatgctataacaccatgtgttcccatcttacctagtgtttctggatgtgtgcataacataaatgtgatatacgaaatgggcataaaaaatgataattgtttccaatctgaaaagtgccaggatatttccattcaatcaggtgcatactcgtctgaagctgcaggcagctttttagcaccactttacccattgcagacatctgaaccagcaataatgatgggtggccctgtgtactatcagagttctgtaatgtcattaccaccaggctttatttcttctgatggtgcttctaatgcatctggtgtcaaatctgagacaagttactatcctgtttctcgccaaaatttggagattaaaacttgccacaatgcttctggtgatcctgaacaaaattcatatattagcagcgaagatgacagaaacaagacttctgaacctatgggcagaatatcagaatctgaaaagaaacagcaagttgatgttgaacaatcatgtttggagcctgcagcctgcattggaaaggaagcattatctagtcatggtgacaccatattaagtaaaaaggaggatgctggagctctatgctatgaacctccttgctttcggagttttgaatttccctttgtcagctgtgagcttgtaaactccagcgatctcccagaatatagtcctcttggcattcgagagttgatgaggacatccttgaacttccctaccccagtaagattgtggggctcccctactagggatggtagccctgatgctgtgctaaagaatgctgccaaaagattcatgtgcaccccgtccataatgaaaaaaaggcacagagatcttttatctccagtttctgatataagaactgacaagaaaccaaatactgaaagggattttatgagctcaggcatatcctctacaagagttgggaaatcttgcatggatagcgctgatgattcagctgatttagtttcaccgaaagagagtgcatttcaaaagaagctgaagctttgtcacgaaaacaaagaaaatttgaatgaaattgctgatcaaggagaaaatgaagccaatgcaaagcattcttcagggattcttactccgagcagtgttgacaaccataatacacataagcatggtccaaattttcgaattcaggagctaaataccactgtacaggctttgtctaactctaaagacataatattttctagatcaaagccatcagaacatgttgaaaaatctgcagcctgcattgatgcagattacgagtatttgaacatattggctgatactccaggtattaaaagaggcttagaatctccttctgcctggaagtctcctgtgttcacaccattccaggatgcatacttcatgagcccagcaagcagagcttttgatgccttaggattggtgaagcagattaatgagcagagtgcttctgctgtggaggaagcacatgaagttctggcaaatggaagcccatggaaacaacataacaaggaaaactctgacaaagaaaatatagaaaatacagctttgaagcatgagcatgtcacaagcaaacctccatcgatactcatgcctagttccagtctccggctgttagaaataagcaacaaggattatggatgctaatgcaaattctcagtggcaaactggcaataatctaa

SEQ ID NO: 19472 - DNA, 3943 bp, Zea Mays
ccttcctcatccagacactccccttgccgccgcctcctctgcccctctcgcgccgccatggccacctcgctctccaccccgtcgcagctccgcacctcacactgccacgcccgccgctacggccgcctcctcggcctccacccgcgcgtctcctgcgcgcgctgcccggctccccgccgcgccgccgccctctccgtgcgcgccaacgccgcctcgactgatggcgacgctgccgtcacggtgcgccgcttcccggccgcgccgaccaaggctgggcggctcgcgggcgtcaagaagatcatgatcctcggcgcggggcccatcgtcatcggtcaggcgtgcgagttcgactactccggcacgcaggcgtgcaaagcgcttgccgaggagggctacgaggtggtgctcgtcaactccaacccggcaaccatcatgaccgacccgggactcgcccaccgcacctacatcgggcccatgacgccgccgctcgtcgagcgcatcatcgacgccgagcgccccgacgcgctgctccccaccatgggcggccagaccgcgctcaacctcgcggtctcgctcgcggactcgggcgcgctcgaccgcctcggggtgcgcctcatcggggcatccctccccgccatccgcgccgccgaggacaggcagctcttcaagcaggccatggaccgcatcggcctcaaaacgccgccctccggcatcggcaccacgcttgaggagtgcctcgccatcgccgaggacatcggggagctaccgctcattgtgcgcccggccttcactctcgggggcacgggcggtggcatcgcttacaacaaggccgagtttgaggacatctgcagggccggcctcgccgcgtcgcacactcagcaggtgctcgtcgagaagtcgctcctgggctggaaggagtacgagctggaggtcatgcgcgacatggctgacaatgtcgtcatcatctgctccatcgagaacatcgatcccatgggagtgcacacgggggactccattaccgtggctcctgcgcagacactcactgacaaggagtaccagaggctcagggactactcggtggccatcattagggagattggtgtggagtgtggtggttccaatgtgcaatttgcagtcaatcctgctgatggggaggtgatggtcatcgagatgaatcccagggtgtccaggtcgtctgcacttgcctcaaaggcgacagggttccccatagccaagatggctgcgaagctctcagtaggctacactctagatcagattcccaatgatattaccaagaagactccagctagcttcgagccttccattgattatgtggttacaaagatgaagtctgttggtgaggcgatggcattggggcgtaccttccaggaatccttccagaaagctgtccgctcactggagactggttttgcgggatggggttgtggccctatcaaggaacttgattgggactgggaaaagataaaatatagcttgcgggtacctaatccagatcgtatccatgctatctatgcagctttcaagaaaggcatgagggtcgaagatatccatgaaattagcttcattgacaaatggtttcttacagagctcaaggggctagtggatgtagagcagttccttttatcaaagagcctagatcagttgtcaaaggatgacttttaccaagtgaagaagagggggtttagcgacaagcagattgcatttgcaacttcttcatcagaaagtgatgtgagatcaaggcgtttgacattaggcgtcactccgacatataaacgtgttgatacttgcgctgctgaatttgaagccaacaccccctacatgtactcttcctatgagtacgaatgtgaatcatctccaaccaataggaagaaggtgctgatattgggtggtgggccaaatcgcataggccagggcattgagtttgattactgttgttgccatgcatcatttgcacttcgagaggctggatacgagactattatgatgaactccaatcctgagacagtctcaactgactatgataccagtgatcgtttgtactttgagccactgacagttgaggatgtatcaaatgtccttgatttagagcgcccagatggtataatcgtgcaatttggagggcaaactcctctaaagcttgcgctacctattcaacagtacatagaggagaacaaaatggtgtctgcttcaggcactgggaatgttaagatatggggaacatcaccagattccattgatgcttctgaggacagaaaaagatttaatgcaattctcgaggagcttcaaattgaacagccaaagggagggattgcaagaagtgagtctgatgccttggcaatcgcctcagaagtaggttaccctgttgtggtccgtccatcatatgttcttggtggacgggcaatggagattgtgtacaacgacgaaaaactgatcaagtacctcgcaaccgcggtgcaagtagatccagaaaggcctgttttagtggacaaatatctaattgatgcagttgagattgatgttgatgcattggctgacacagctgggaatgttgtgattggtggaattatggagcatattgagcaggctggtatacattccggtgattcagcatgttctcttcctactagaacagtctcagcccaatgcctggaagttatccgttcatggaccacaaagctcgctaagcgtctgaatgtttgtggactaatgaactgtcagtatgctatatctacttctggtgatgtgttcctacttgaggcgaaccctcgtgcttcacgcacagtcccttttgtatccaaggcgattggccatccgctagctaaatatgcatcattgatcatgtctggtgtgaccttgccggagctcgggttcactaaagaagtgattcctaagcatgtgtctgttaaggaggctgttcttccattcgagaaattccaagggtgcgacattcttcttggaccagagatgcgcagcactggagaggtgatgggcatcgactatgagttctccggtgcctttgcaaaagcacagattgccgctgggcagaagctccccttaagtggcactgtgttccttagcctgaacgatttgacgaaacgacatcttgctgagattgggagtggattccgggagcttggcttcagcatcattgccacatctggaacagccaaagttctccagctcgagggcgttccagtggagccggtgctaaaaatacatgaggggcgaccgaatgccagggatatgctgaagaatggtcagatacagatcatggtgataacaagctctggtgatgctcttgactccaaagacggtctccagcttcgtaggcttgccctcgcctacaaggtgccaattatcacaaccgtcgacggcgcacgtgcctccatagatgccatcaagagcttgaaggacaagtcgattgagatcctcgccttgcaagattacttccagactgccgatgcttcggcagatttacaagcagcggcacagaccaccccttagtgctgtcttccttttccatgtactgtgatcctagctcgagccaaaacaacatcccatatgaattattttgtttacggttgcacctgcagcatgcatggcgcaaggacaggcatccagatcgtatcggtgacaagcatagctagacagaattggtattgggcgaatgtagttgtactctgtaatgttagttagggtgatgagcatccacaataaggcttcccaactgcgattttgatgactatcatattctttgtggagatttacattgtatcattgtcgcatacgaaactgtgcgacatacatgtaccgtatgcatgttatcagattcttagatgaccacacattggcacacccgtctctcgtctcgtgttctttcactgtgtgctctacaattgtacaaacaaacgattgtgtcaag

SEQ ID NO: 19473 - DNA, 1893 bp, Zea Mays
atatgattcactgcccataaaatgaaaacatgcgctatagccctagtaatgctggttttcagctacccaacttaatttgcacaaaagtacttgaagaagaggaagaaaactcttctgaaggcaggagcttgagctttgaagctgttacacctgaacaggatgccccatataatgatgacaatgaagaatctcaaatgcctgttgagaagcatcaccatattctggaagaggttgatggtgagcttgagatggaggatgtagctccaccatctgatattggggcaaccaccaagtgccaaccagagcaaagtgacaccaatcgtgcaccatctgaccaacgcccttcagatgctggccctccacttcctgtggaccggcctccatctcctccgccattgccatcatctcctccacctgtccccgttcctcagagtgcacagatgcagcctaaattacaaatggcatctgatcccatggcgccacatcctcaaagagctacatatagtgttcaaagtcaacaacagcattctattgcagagcacccaggtaacatgaattcttctgttgcaccattgccacccccaccgtttaacagttcaggatatggagggcaacaaaatcagataccacctcccccaccaatggcaccactcaatcctcctggtccccatggcagtttccctgctcccccagcaccttaccatgggaacaactatcatcggcctccaaccacatccatgcctaacgagggatatcatcagcaaccaccaccccctccaccgcctccaaatcaattcccttctgtgccaccagaacaccaacataggccacatcactggggtaataactgtccaccgtatcccgagagatatcggtacaatggacatgatcgaggtaatcacagacatgatagaaggcatcatggacatgacagacaacaccattatgatgatagaggataccactacgatgatagaggatatcactatgatgatagaggccattactttgatgatagaagacatcattttgacgatagaggacatcactttgatgagagagctattagggggccaatgcacaatgatgccgctgaccagggaagatattcttttcctccaggtcctcctcggattcctgaccattttgaagctccaccagccccaatgcactatgggcgaccatcagatcctccgccaaggccttgtgcaggctggtctaggccgcctaggatatctgataactattctccctcgagacattctgtggagcctccagtttcacatacagctggaggtcatggtggatggagacctagataacctttttcggtatcgaagcggtgctctgatgctttccttggtctgtgggggcttaacctgtgggagagtctgtctggtgtctctgcttcaggttgaaggcacccacggaggtggagcactccaggaaagtgggagctggtacctgcctccttgtacagatgtatctcatggattctacggcggtcgggctgcctgaactgctgtttgtaccctagtaggggtttagactgcgcgaccacacgcagagctgagttgtaggggtgtagggtgtcttctatcaaccgatcgtagtcttacattgtactgtttgttagtgcaacagtcctcgattccattgctgaattcctcctggcctcatcagacgacagccagctgctctgatgtcttgccgaaactgtttgagcacagcgtacatatatgcctaaaaaagagaaatataaatcattttgcccgttgcacctgcttatatataagagcatggtcgaactaaggggtgtttggtttctaggttcgctcaattttattttatttaatatggaaattttagttaacctagaaattagtctctaga

SEQ ID NO: 19474 - DNA, 2618 bp, Zea Mays
caagtcaaccatgtgagattgcaagtcaacaaaagattccaagaactttgtggctgttggagtgttggtattgtggaaattttcatgcacaaccataacaacgactacacctttattacaattgtgagttgtattgtgaaatgcttgacgaagttgatgaggcggcaattgaaaaggaagataatggaaagatggaggacatcgattgcaatcatgacatccggattcatgaagatttgggtcatgtatgccgtgtgtgtggtatgattgtgagaagagctgattcaataattgattatcagtggaaaaaggcttcaaggagaagaacgaatggctatggaggacattcaaaagatgctgatgagatagattgtggtactgttaaactgtctgaagatttcatagtcgcagatattgctattcatcctagacatgctcggataatgaaaccacatcagttggaaggtttcaactttttggttaagaatttgattggagacaagcctggaggttgcattctagctcatgccccaggtacagggaaaacatttatgcttataagcttcattcagagcttcatggcaaggtatccatctgcaaggcctcttgttgtgctgcccaaagggattctaggtatatggaagacagaaattaaacgatggcaagtgcaggatataccagtgtacgatttttactctgtcaaggctgaaaaaagagtagaacagttgcaaatcctcaaatcttgggaagacaagatgagtatactatttcttggatacaagcagttctccacaatcgtcactgatgatgggggcagcaatgtcacagctgcatgtcgagacaggctgcttaaggttcccaaccttctgatacttgacgaaggacatacacctagaaatcgggagactaatgtactcgaatcactaaatagagtggaaacaccacgcaaagtggttctttcgggtacacttttccagaatcatgttgaagaagtgtttaatatcttgaatctcgttcgcccaaagtttctcaggatggaatcatcccgtcctactgccagacgtataatgagtcaagttgaaatagttggtagaagttcgaaagggcttgctgatggcgcattcactaaggcagttgaagaaaccttattgaatgatgagaacttcaagagaaaagctcatgttattagaggtcttagagaactaacaaaggatgttcttcactattataagggtgatatcttagatgaactacctggcttagtagacttcagtgtgtttttgaagctcacacccaaacagaaagacattatttataagttggaagcacatgatcggttcaaaagaaatgcagtagggagtgcactgtacattcatccatgtctttcagaactttcagaggttaatgctgagcatagggctaacacctttagagatgatttagttgatagtctggtagattctatcactgtgagagatggcgtgaaggccaattttttcatgaatatcctgtcacttgctaattctgcaggagagaaagtgctagctttcagtcaatatatatctcccatgattttctttgaaaggctgctggtgaagaagaaaggctggcatgtggggaaagagatctttatgatctctggtgatactagccaagaagacagagaattggcaacggaccattttaacaactctgctgacgcaaaaattatgtttggttctatcaaggcatgtggggagggtatctccctcgttggtgcgtcgagagttgtcattctggacgtacacctgaacccatctgtcacccgtcaagcgattgggcgtgcattcaggcccggacagcagaagaaggtgtttgtgtacaggcttgtagctgccgattctgacgaggtaaaggtccatgagacagcattcaagaaagaagtcataccgaagctgtggttcgaatggagcgagcactgtactacggaagacttcaaacttggtcaaattgatattgatgactctggtgacgaactgttggatactaaagcaatccgcaaggatatcaaagcgctgtatagaaggtaacaagctttgtggccactggacaccatgtacatattgcagtgctgaccgtcgagctgatccttaaactgaagaaagaggtgacgggtgttgcggtggctacattgcgcggtcattcccagctatatccgtggaatggcggcttcttttgttcgtagtatgtgccaacttggggcagcagtcagctgatccccagacacatttctagactcttttttaggctcaagtttctgagaattaacctgctatggcgtttagccttaagtaaatatttcgttcgcaacaataataacccagtaaacctaatttgttcttgtgcgtttgtggtggtggttcttgaaatttacctggcgccttcttcctgggctagatgctatgcaggtgtcacaggttggtttgttggcatgtagaatcgggaaatgctaatctcgaaagctcgtagtttccttttcccccccgggtgacatgtttattcacctcttactagttaccacgtccatttccaactataagatatgatactttggcttttgaagatacattacttttatt

SEQ ID NO: 19475 - DNA, 3149 bp, Zea Mays
ggcattcatttcgtgaagctgaagagcacaagtgcctgaattctgagttgtggcatgcatgtgctggccctctagtttcattgccttcggtcggtagtcgagtggtgtattttcctcaaggccacggtagcagcatcaacaaataaggaaatggaggctcagatccccaactatcctagtctacctccgcagcttatatgccaactgcataatgtgactatgcatgctgatgctgagacagatgaggtgtatgcacagatgacactccagccactcagtccacaagagctcaaggacccatttttgcctgctgagttaggcactgccagcaaccagccaacaaattatttttgtaaaacactaactgcaagtgatacgagtacacatggtgggttctctgttccacgccgagcagctgagaaggtgtttcctccactggatttcaatcagcaacctcccgcacaggagttgattgcaaaagatcttcatggcaacgactggaaatttcgccatatttttcgagccaaagcggcatcttctgacaacaggttggagtgtctttgttagtgcaaagagactggttgctggcgactctgtcctttttatctggaatgacaacaaccagctgcttctgggaattcgccgggcaaacagaccacaaaccgtcatgccatcatcagtactttctagtgatagcatgcatattggcctgctcgctgctgcagctcatgctgcatcaacaaatagccggtttactatcttctataatccaagagcaagcccttgtgaatttgtcatacccatggctaagtatgtgaaagctgtgtaccatacccgtatatctgtgggcatgcgtttccggatgctttttgagacggaggaatctagtttatatggggacaattacaggaataagtgatcttgatcctgttcgctggccaaactcgcactggcgctcagtaaaggttggatgggacgagtcaactgctggagagaagcagccaagggtatctctttgggagattgaaccgttgacaacttttccaatgtatccatctccttttgctcttggattaaagcgcccatggcctgcaggcctgccttctttatacggggtgatggcttgacctcttctcttatgtggcttcgagacagggcaaacccgggtttccagtcactgaatttcagcgggcttggtatgagtccctggatgcagcctaggctggataattccttacttggtctccaatctgacatgtaccagaccatagcagcagcagcagcattacaaagcactacgaagcaagttccaccttcagcaatgcagttccaacagcctcagaacattgctgatagatctgctcttctatcaagtcagattctgcagcaagtacaacctcggtttcagcaaatttaccctcaaaatctcaacgaaaacaaaattcaaggtcatacacaacctgagtacctccaagtccaacagcagcttcaacgctgccaatcatttaatgagcagaagcctccgatgcatccacagcaacaacagcaggaaccacagcagcagcaatgcgtccaaacaccacaggatcaacaaatgcaagaacagaagcatctgcacaacttccactccttgccagatgcattatcggccttttctcagctttccccagccactcactccccaccttccgcattgcagacagttccagcattctcgcatcaacaaaacttcccagatacaaacattagctctctctcaccatctactggcccttcaatgcatggcatgttggggagattaccttccgaagcagcttcgagcctcccatgtgtggcaatgaacgcccctgtatcggtatctgacccatggtcatccaagagagttgcagtggagtctgttaacccttgtcgacctcatgtttcaccacatatagaacatttggatatggcgacgtgtaacatgccgcagagctctgcactagcaccattacctggacgggaatgcctagtggatgaagatgggtgctctgatcctcaaaatcacctcttgtttggtgttcacatagactcgcattcacttctgatgcaagggggcattccagcccttcagaatgataacagttcaggcactattccatactcaacctccaatttcctgagcccttctgagaacgatttccccttgaatcaaccgctacgcagcgcgggctgcttagatgagtcggattatcttccatgtgcagagaatgccgaacaggcaaatcaacagtttgcaacctttgtgaaggtttacaaatccgggaccgtcggaaggttgctcgacatcactagattcagcagctacgacgagctccgtagcgaggtggggcgtctgtttggcctcgagggccagctggaagaccctctgagatcaggctggcagcttgtatttgttgacagggaggacgatgtccttctggttggcgatgacccatggcaggaattcgtgaacagtgtgtcctgtataaagatactttcaccggaggaggtccagcggatgggaaagccgggcatccagctcctgagctcggctccttcaagaaggctgggcaatggctgcgacagctacgcgagcatgcaggagccgagaggcctggacgctgggatggcgccggtgggttcggtcgagttctgaagacggcggagggaagcccaccatggccctcgggtcgaggattactctccctcctgtatgtttctgcagcacttgctagctctgcgacttggaacaaagcacgtagatcaaatggagctctgtgctgctccccgtctgatgatgtcttatggtatagactcgtagcagtaactactacatgttgtatacatgccggcacttcagttcttatcgagtagcaataccgctagtttagtccatccaatcaactacgttcttgttcctatgatcctgttgttgcgatgcagtaaaaccttttttttgtcataataacctgtatattgaaactgttcttggctcccacggtatacggctgacgacgagtgacgagggaaactggaatttgggggcatttcacagaattgaaactactgataattccaacttaccgatgcaattccaattccaacttggtcagaccaacattgccgttgct

SEQ ID NO: 19476 - DNA, 3085 bp, Zea Mays
ggacaactcaaccaccaattcttctgctccgcctgccacccacgaacaaacacgagcagcaaccgtagcctgccagaagatcgcacgcccgtcgccaagcttcgtttctcccccttcccctcacctccgccgttccctctcctggacccccaaacacagcgtcccgaaatctagcctgactcctctctccctgcctgccaagaaagaaaaggcgccacgttgacatcgcggatgccgtagcgggtgggcgggcgcgcgcgcgtgccagccatgcgctcgtgatggcccggccgttccagaagatcggccacggcctcgaaaggttctcgttcaggcgccggaggtcggcgtcgtcgccgccgttgccaccactggcctcggacggcacggacgcctcctcgatggaggcgcaggcgcaggcgcaggtgcaggcgccgcctttcagcaagagggcgctgtcgaggagctgcgggtccaaggggagccgcctgtccgtggacctcccgccgccgctcgccggcggcccttcggacaggggtgcggccgggacctcgtcctcgtcctcgctcgcggtgccgcccaagcctgtccggcacgagggcccgccctcagatgcggacatcgtgagggagaagttctccaagctgctgctcggggaggacatgtccggcaccgggaaaggggtcacatccgcccttgccctgtccaacgccatcactaatcttgcagcttctgtgtttggtgagcagcgccggctgcagcccatggccgccgagcagaaatcgcgttggaagaaggagatctactggcttttgtccgtcgctgaccacattgtcgaattcgttccttcgcagcaggtcgccgagaacgggacctgcatggagataatggtaacccagcagcgccaagatctgaaaatgaacatccccgcgctgcgcaagctcgacgcgatgctcctcgaatacctcgacagcttcgagggcgagcaggagttctggtacgcgtcgaaagatgcggacgaaccggggaagggcaacgtgccgaggcaggacgacagatggtggctcccgaccgtcagagtccctcccagtggcctgtcatacgcgtacaggaaatggcttcagaaccacaaggacctcgttgcgcaggtgctcaaggcagcgatggcgatcaacgccaacattcttatggagatggaggtccctgaatcgtacatggagtccctcccaaagaatggcaagtcaacgcttggagattcagcgtacaagcttataaccgacgactgtttcgacgccgaagaacttctgcgctccgtggacttgtcggacgagcacagcatcgtcgatctgaagaaccgggtcgaagcctcggtggtcatctggcagaagaagatgacccacaaggacagcaagctgtcgtgggggcacaacgccaggcacgagaagaggggcatgttcgaagggcgggcggaaaacgtgcttctcctcatcaagcacaggttccccggcatcgcccagtcggctctggacatcagcaagatccaatgcaacaaggatgttggccttgccattctggagagctactccagggctctggagagcttggccttcacggtcatgtctcggatcgaagatgttctcggcgcggacctggccactcgagacgaccccaagaacgcagcagggttgatgaggatcgccagtttaccttgttcggacgacaccgacaaggtcgtctcggacgccaaggccgaggtggagaggatgaggaggatggagccggtcccgccggcgccgatgctgtacgacttcgtcggcccacgggaccaggacctcggtccaagggtgacgaagatctcgtcggttgcgaccaagaggttctcgtaccttgagaatttgggtgggacgagaagcccgatagctagacactagctcctatagctatatgggtgtgagtgaggctagatggatcttggattggatcatgccgccacagagactttgtaaatagcacagatgtccacaggatcatgcatggcattcgggattgagggtgccgatgtgaggtcttggcatgtttccatgaactgatcgtgagaccatagctcatgaactggttggtgttcaacgatgggcctgtgggatttgtacttgtgtaatatatttcaaaagatgagaggaaaagattgtatattttttctctagtagcgccttgttacaaattttagtcctgcaccaaaataataatagtaataatagcagatcgtttctggccagatgacacgggatgaacattaatcacatcagcatcagcaactaatttacaaaaaacacagcgaacgtttgcctaaggatgatgtaacaactgacagactaataaaagcaaaagttcaaaatattcttgacgtcgaccagctgttgctttctttgcgtatatataaagaccctagacgtcgtcagattgcgttacacaagttgctgtcttgctgacatacgcgaagaaaaaggcacaaagattccaaaccagcattctgcaagattcaaacacaagttacatcatcaggaagaggaagaccgaaacacgaactcctgtaatgtaccaacgctattccatctcacagctcctgcatacgattggagtgtgccatattagtgcagctgtcttgccaatgcactgcgccgtgatagaacgccgttggcatcccttaaactccgtgtcctcctgtactcgatctctgcatccgagcaagaatggccaggaagcgatttctttcttacttctatgggttttagggatatttcatctgctgtctttctgaaaagatgaccatctttcctgatacactcgtcctcagactgatgacctccttttgttcctgccaggtgaaaaaagaaacacagtaagaaattgcggaaacacaaaagacaacaatagtaggggcatatcaaatttgttcctattataatctgtctacaaatcagcctacagtatgtatttcaagccagcagattattgtttcctgtagtagcaagaaaattctaatgttacctttgaacacgtccaaacgcagaactttgtttggaga

SEQ ID NO: 19477 - DNA, 6120 bp, Zea Mays
tcgccgtccgcgccttcggcttccgcagttcgcacagctgacagcagtccattcaccgtccgcgcctccggtcaccgcacagtagtgaatccattcgtcgtccgtgcctccgatcaccatacaaccgtgaccgttagcagcaccttgatttttgcgcgtcctccgccactggtggcagcgacgcgcttccgaggaggttagagcgttggctgctatggcgccgcctcgcgtcaccaggaagaaggggaagggcgccggcggcaagaccgacctgcgtcccgaccggaagcagttcaaaaggcaccacaaggaggatgcagccgctgagcagggggatggcaacggagagcggcagcagtcggcagcgccgggttctgcagcgctcctcgccgcagcttctgacgaagctgactttccaagagggggacacagcctcctgagcaaggatgagatggcggaggctcgtgcggaggcggagcaggatttcgagagggaggcgaagaaggggaagggaaaaaggaagaggagtggcggcgagtcgtctggttttggcgtggatgacgacttggggatactcttcggtggggccaccactgggaagctcccacgctttgctaatcgcatcacagtaaagaatatttcaccaaatatgaagctctggggtgttgtaattgaggttaaccagaaagatattgtgttaagtctacctggtggaattagaggctttgttcgctcagaggatgtttgcgacattgctttgcaggaaaatcgtaaggatagtgggaacaatttatgcgcagaagttgttcatgttggtcagcttgttccttgtatagtcctacgagtcgacgatgatagtagagaaggaaaagtaaacaaacgggtttggctatcattgcgattaagcctattgtacaagggacttgccctggatggcttgcaggaaggaatggtacttactgcccaagtcaaaagcatcgaggatcatggttacattcttcattttggagtatcttcctttagcggatttatgcagaaggatgacaaagaagatgtgaagactgagcgccgacaactgatgcaatgtgttgtgaaggcgattgacaaaactcgggccattgttcacttgagttctgatgaagacttgctttctaaatctactattaaggatctgaaaggcctttctattgatcatttgattcctgggatgatggttaatgcacgtgtccattcatttcttgaaaatggactcatgttatcatttcttacttatttcagtggaacagttgatatttttaatttgttgaattccttcccctctggtaattggaaagatgattacagtaagaataagaaggtaaatgctcgcatcctgttcgttgatccatcaacaagagcagttgggcttacattgaacaaacatttacttcatcttgaagtaccccctattaatctaaaagctggagatatctacgataaatcaaaggtgctgagggtagataaaaaggccggtctctttcttgaaataccttctccaactccatcacctggatttattagtatacgtgatgtgtcagacaaggatgcaaaaaacttggagaagttcaaggaaggcagtagcttacgtgtccgtatacttggagtgcggaatcttgaaggagttgcaataggcaccataaaagacagtgcttttgaagggtctgttttcactcatgatgatgttaaacctggaatgttagtgagagctaaggttgctactgttgagccattcggtgctattgtacagttttcaagtggcgtgaaagcactttgtccgcttcctcacatgtcagagttggaacatgttgttaaaccaccaaagaaatttaaggttggagctgagcttcttttccgtgtgttgggctgcaaatccaagagagttacagtgacatacaagaagtctctggtgaaatcaaaacttgatgtgctttcatcatatgctgatgcaaaaattggtttagtgactcatggatggattactcatattgaaaagcacggttgctttgtaaaattctacaatggagttcaaggttttgttagcagatctgaccttggattagaggctggaactgaagcagaaaatgtttatcatgttggccaagtggtcaaatgtagaattatcaatgtgatccctgcttcaaggaaactaaatgttagttttgtcatatcccataataggattgctccaatagacactccaaagttgggcagtattgtctctggtgttgtggaacggcttactcctgcagctgttgttgttagtgtaaatggcttctccaaggggacaatactgaatgaacatttggcagaccatcatggtcaagctgctcagttgaagaatgtgttgaaacctgggcacgagttcaaccaactcttagttctcgatactgaaggtcaaaatttagttctttcggcaaagcactcacttataaattgtgcaaatgacattccttcagagatatcacagatgcatcctggtgttgtagttcatggttacatctgcaacattattgaagctggttgttttgtccgtttcctcggacatttgactggtttctctcccaaggacaaagcagttgataggtggatagaaaagctttctgatgcgttctatgttggccagtcagttcggagtcatatactcagcgtaaatgcagaaactgctagagtaaaactcgcacttcaacagtcaatgtgctcctcaatggattcttcatttattcagggatactttcttctggatcagaagattgcagcattgaagtactcaagcaatgactgggctcgccattttggcattggtagcttagttgaggcggaggtgggagctatagaagaatatggtattatccttaacttcaaagaccatctggatactgttggtttaatcgagcaccatcaacttggtggcagtagtgtggaagtgggatcttctgtgaagggtcttgttttggatttatctgatggagttgttaacttgtccgtcaaaccagagctaattgacagtgtcagaattgttggaaaaaagaagaaacgccaaagggccgtagttgcagacttggagcttcatgaggaagtgaatgcagtcgtggaaataatcaaagacagctatatggtcctttccatccctgagtacaattatgcaattgggttttcaccactgatggattataactcacaactgcttccccaccaccactatgataatggacaacgcattactgtggttgttggaaatatcccaagttctgactcttctggaagacttatcttactaccaaaagcttcagcacagtattcttccctctctgattctaaaagggctaagaagaaatcaggctacaaaattgggtcacttgttgaagcagagattattgatatcaaaccgcttgagcttctactgaaatttggtggcaatcttcatggaagaatccatattactgagattcttgaagaggattctgctgagcatccctttagtgaactcagaatagggcaaaagcttactgccagaattgtttcagaggctgaaccttctggaaagagtggcaaaaaattcaaatgggaattgtctattaggccatgtatagtcaatggagagtttgctcaaaaagaacaaaatcacaccacaaatgggattgtacgtgcttatgttgtcaaggtggataaggaatgggtctggttaactgtatcaagaaatgttatggctcatttatttttacttgatagttcttccgagcccagcgaactgaaagaattccagcagcgctttagtgttggccaagcagtgaaaggtcgtgttatcagtgtgaaccaggagaaaaggttacttcggttgaaggcacttgataaccaatgcacacaaccgaatatagatgaaacacaagaaccaaagtcctctgtgtttggacaaacaaaacaaggagatatcattggtggacgtgttcaaaaaattctacctggtgttggtgggctcgtcgttcagattggacctcatctccatgggagggttcattatactgaaattgttgactcttgggtgtctgaacccttgtctggattccatgagggccagtttgtgaagtgcaaggtcctgtctgtgagccgctcatcagaaggatcacttcgagttgatctatcactccgttcatcaaacctgatcagagactctaacaactcaagactagatgatctggaaacctgtacctcccggattgagaagatcaaggatctgctccctggaactgagattaagggctatgtgaagaacgtgaattccaaaggatgttttattatgctttctcgaatggttgatgctaggattactctatcaaatttatcagatgaatatgttgaaaatccacagaaggatttccccgttggaatgcttgtacacggaaggatcctgtctacagacccatcatcagggagagttgaggcatcacttaggaagaccactggttcaaaattggaaaagctggatgatattagttatagtgacttgcatgttggggatatcgttgatggccaagttaagcgggtggaatcctttggattattcgttacaattcggagaagtgaattggttggtctgtgccatgtatcagaactttctgatgaacctgtcgttgatattaactcttgctataaagctggtgatatggttaaagccaaaattctgaaggtttccttggatgaatcggaaggttccgacctagaggataatattagtaatacatgtcttgaaattgctaatggaactgaagcaaatgctaaaaagagtgataaacagttaaagaaggaagcaagaaaacaaagggaactagaaatcagtgctatggaggaaagggctttgcaggaagatataccacaaactccagatgattttgagaagttagttaggagctccccaaatagtagttttatctggataaagtatatggcaactttgttagatcttgcagatgttgagaaagcacgtgcagtagctgagagggctttaaaaacaataatccccagagaagaagaagagaaactaaatgtttgggtagcatatttcaatctggaaaatgaatacggtagtccaagggaggatgctgtgaaaaaggtattccaaagagccttgcaatattgtgatcccaaaaagctgcacttggctcttcttgcgatgtacgagaggaccgaacagtatgagcttgcagatgaacttctagacagaatgaccaaaaggttcaaaacttcctgcaagatatggttatgccgcattcagtttgctctcaagcaaggcaaggatgttgagtacatcaaagccattgtaaaccgtgcacttctaagtttgccacacagaaagcgcataaaattcctctcacaaactgctattctagaattcaaatgtggggtgcctgaagaaggaagatccagatttgaactaatattgcgggagtacccaaaaagaacagacctttggagtgtttatctagaccaagaaatccgccttggtgacgtagaagttatacgggcattgtttgagagggtgacttgtctgaccctacctccaaaaaagatgcagttcttgttcaagaagtatcttaatttcgagaagtcactgggtaaagacaacgaaagaattcagcttgtgcaacagaaggcaatcgaatatgttcagagttcactgccgtcacaagacaactcttgaactacatggagacttaataagcccacaaacaatcattaggaaataccagtcgtactgtagatgtgatctctttgatgactccttgaacattattgtgaaaaggtcaatgtaaaatgtgggctgttcaaaattttgtttgaaacctttatataagttatgagtctagtatgtcatgtttcacccaattttttggaaggaactattctaagccggatctggttcgaatattgaccttttctatctgtggtattgactgatgaggcacaattgaatgggtaactgtctgtgctactctgtcacacccgggtttcggacaccaagacacgggcgcgaacataatcacctggtgttgctgggatcaggtcttacacatatgatgaatcatg

SEQ ID NO: 19478 - DNA, 3203 bp, Zea Mays
cccacttcgcgtccacccatcagctctcgtcctctcaccgtcctacgctctgccgcccgccaccaggcgccagatcgacaccggaggtgatgtcgccgccggcgagccaccgccgccgttctcggttccttagctggccgctgctcttcatcgcgatcctcgcgatccactcgctggcagtatacctttttacccgcggcttcctcctcacccgcaccgagctggacctccacagcagccgcgacgacttctcgccgcagggcaacgtctcccccgggtgcgactcctggcccccggccgccgtcgaccgccttgtcattgtcgtcctcgacgcgctaagatttgatttcgtggcgccgagtaccttttttgcagagaagcagccgtggatggacaagctgcacgttttgcagaagcttgctgccgacgaaaagacctcttcaaggatcttcaaagctctcgctgatccaccaacaactagcctccagcgccttaaggctctcaccacgggtggactccctacctttattgatgtcggcaatagttttggtgctcctgcaatagtcgaagataatataatgcatcagttggctaaaaatggaaagagagttgtcatgatgggggatgatacatggatacaactgtaccctgaacacttcaacaagtcattcccatacccttcctttaatgttaaagaccttgacacagtagataatggtgtaattgagcacttgcttccatctcttcacaaaaatgattgggatgttcttattgcacattttcttggagtggacatatatttggtgttgactcaaccccgatgatccagaagttggagcaatacaatcagatcctggagggtgttattgacacattgagaagtctatccaaacctggtggtacccatgagaatactttgcttttggtaatgggtgatcatggtcaaaccctgaatggtgaccatggaggagggactgctgaagaggttgaaacatcgctgtttgcatggagtccaaggaccccaccagatgcagtcttatctgttcttgatgatagttcgtgcactgttaatctgcatggggaagaggtttgcgtcagcactatgcagcagcttgattttgcggtgactatatcagcacttcttggcataccttttccctttggaagcattggccgtgtaaacccagagttgtacgccttgagtatcgggacatgggtaaatcaaaggaggggtaccaatgcttgtacctcacaggatgatctagaagcatggatggggagatatgctgaagttctatgtgtaaattgttggcaggtaaagagatacattgatcaatattctgctacttccgttattggatttccatcagaagacctgcaacatatcatggacctatattcaagagctcaggaaaattggtcagcttctctgataactagttcatcagagacatgtagtcaagaaaaagtagagaagggttcagttctgctgcagcaaattgatgcatacaatgacttcttgaagagttttgcaaagcttgctcgctctgcttggacagaatttgatttatggtcaatgggcattggtcttttacttatgatgttgtcagttatcattcaggcatccatgcttgtaaatatgaccataagccaatcttcagatcagaaaagttctggttcaagcataattcatagactttcccttgctttttctttagtcgtgattcgagcagctagtttcttatcgaacagctatatattggcggaaggtagagttgcaaattttcttttggccacaagttgtatcaccagtgtgtggcactcggtgctgaaggggaacatcagcatagaaaactttgtttttcttcttttaaatattttcacacggtttggaattgaggttgggatgtcaaaacaattgcctgccccaacaattacaaaggatcatcctgtgagcgtcatttataaaatccttggtgctaattcttgcaacatcctcttggagctattccccatcatatctctagcctttgtggcttacattatgttgaaatgcctatcccgtgcaatctgtcagaggttcttgaagttctttcttttgtgtggaacaatggtgagttatttatctatagcgtttcattgggcttcagagactactttgtttgctcatgctgggactgttcaagaatttggaagaagtttggctcctcgcattgtttacactattggaggtctatcactagccatttctgcattttctcggatatttggttcaactgttcatttgaagttgaacaaaaggataattattttatcggctgtcatgctttgttcttggagtccaactattttgatcctgttgggaaggcaaggtccatttgtggcattgatttgcatgacaggagcttggtgtatgataaaattgcaacagaaacatcagagagagacagaactctctgttgctgaccctgtttcggtgattcagtggagccttcttgcagtttgtctattttatatgacaggtcactggtgtacatttgatggcctccgatatggtgcagctttcatcggttttgatcattttcatatcattcgacaaggccttctactttccattgacacctttggtatttctcatgtcctgccaattctaagccttccacttattgccatagtgtggtacaacaccatatccaaggacaacgaactgaaggacgtgattctcaacaatattaataaggtgcttttgatgtatggtcttataacaacaatcactgctacgctaacaatcatatgcgttgctattcaaaggcgtcacttaatggtttggggtttgtttgctccaaagtacgtattcgatgcaattggccttctcctcacagacttgttaatttgtttagcatcaatctactacagctgatgttgctttgcttcttgagttgcactgctaaccactaacacaacactgctattatgcttttgtgtgaatcggttgcagctagagatgctattttttcttattcttcttgtgactgcagtaagaccacacactaaacttagttcattcgtatttgtattggccaagtaagcataaaatatacaaccatagttggtctttcccacggatgttcacacttatacaaaaaggatactccctccgtcctaaaatatagttctttcaaaaatatagttcttcctagcct

SEQ ID NO: 19479 - DNA, 3104 bp, Zea Mays
aatccaacaatccaaaccacccacaccacaccaccctgctcttcacgagctcctccactctgttcttccccgccgctccactgcgcccttcctcccgccgggatcctaaaccctagcccctagggagcgggagaggcgctgctggcgctcggcctcgaccagcgcaccgccgagaacgcgctcgtcaacgccaaggtcaccgccaacctcgcctccgtcatagccgaggctggtataaaggaatgcgacaagtcagtcggcaatcttctgtatgcagtcgccaccaagtacccaactaatgcacttgttcaccgtcctgtccttattagctatgtcttgtcaacaaagataaagaaccccgcacagctagatgctgctctgtcatttcttactaatactggtcctgattctctagatgtggtcaaatttgaagaagcatgtggtgtaggtgtggttgtttctattgaggaaattaaatctactgttactgatgtgcttgaggagaatatggaagctataaaggagcagcgatatcacataaatgttggtacactatgcggacaggtcaggaagagacacccctggggtgatgctaaggcgataaaggaggaaattgacaagaggcttgcagaaatcctaggtcccaagacagaagctgacaatataaaaccagtgaaaaagaagaaggaaaaaccagcaaaagttgaggagaaaaaagttgcagttgccactgctgccccaccatctgaggaggaattgaacccgtacactatatttccccaaccagaggaaaacttcaaggttcatacagaaatatttttcagtgatgggaacatatggagagcgcataacacaaaggaaattttagaaaaacatcttaaagcaactggaggaaaagtgatgacccgttttccaccagaacctaatggatatcttcatattggtcatgccaaggctatgtttattgattttggtctggctaaggagcgaaatggccattgctaccttagatttgatgacacaaatccagaagctgaaaagaaagaatacatagatcacattcaggaaatcgtccattggatgggatgggagccctacaaagtaacatacacgagtgactatttccaagctttgtatgaacatgccgttgagttaatacagaaagggctagcatatgtggatcaccagactgcagaagaaatcaaggaatacagggaaaagaagatggatagtccatggaggggtaggccaattgaagagtctctgaaattatttgaagacatgaggcgtgggttgattgcagagggtgcagcaactctccgtatgaagcaggatatgcaaaatgagaacaaaaatatgtctgacttaatagcatatagaataaaattcaccccccatccacatgctggcgacaagtggtgtgtctatccgagctatgactacgctcattgcatggtggattctcttgaaaacatcacacattcgctgtgcacacttgagtttgacatacgtcgcccttcatactactggctacttgttgccttgggcctttatcaaccatatgtgtgggaatattcgaggctaaacatatcaaatactgtgatgtctaaaagaaagttgaatcgacttgtgacagagaagtgggtagatgggtgggatgatccccgcttgttgacactggctggtctccggcgacggggagtatcatcaactgcaataaattcctttattcgtggaatcgggataacgagaagtgacaatagcttaattcgtgttgatcgtctagaatatcacatcagggaggagcttaacaaaacagcccctcgaaccatggttgttttgcgacctctaaaggtggtaataactaacttggaagaaggaaaagtactagaccttgatggcaaaatgtggcctgatgcttctgatactgatgcttcctcccactataaggttccgttctcaagaactgtctacattgagaaaactgattttcgcctaaaggactcaaaagactactatgggctagcccctggtaaatctgtcatgctaaggtatgcgttccccataaaatgcacagatgttatctctggtgatagtcctgatgatattgttgaaattcgagctgaatatgatcctttgaagacttctaaactgaagggtgttcttcactggattgctgagccagcacctggtgtagagccattgaaggtggaagtaagattattcgagaaattgttcatgtcagagaatcctgctgaattggaagattggcttggcgatcttaacccacactcgaaagaggtgataaaggatgcttatgctgtaccatcacttgccactgcggttctgggtgacaagttccagtttgagcggcttggttacttcgccgtggatactgactccacacctgagaaactcgtgttcaacagaactgttaccctccgtgattcgttcgggaaagctggacccaagtgactgttcagtgtaatttagggagggcgctggttttgatcggttgcagaggcgcacctgaactatacagtttgtgaagaaaatggtcgtctaatacagaacagtttaaaggccttactctttataaaatttagggttttttaatctggtgccctcagttttggtgatgtgttcatttgtaccccttgtttacttcgaatcagattttgtatgatagtgttagtgtcccgattctaccgtctgtaaccgaaaggtcccgggttcgagccccagcctctgcatattatgcgggtaaggcttggcgcttaaagatacaattcccaagaccccgcacagtgcgggaagcctacagcactgggtacgcctagtgttagtgtcccgattcccattctgtttgatgtcatactattgtgatgggagttctgttttcccctgcgtcctcttttttttgcaaatccttactgtgatactactccctttaattttcaaattataagccattttgatttccttggagagtcacatcacaagtctattaaaattataaagaaaacgaagatttatcaaaattataaagaacaaatatttataacataaaatagatatagtataaaaatattataaaaacataa

SEQ ID NO: 19480 - DNA, 2902 bp, Zea Mays
ccacggcccacacccacccaccagggcaacccctctatgaagcctgggcgcgcagtgttcaaacctcccgaccgttggagaccccaacccctaaatgcagtaatgctcacccgcaacgttcttctcccaatcggttccacctgatgcatcccccgccgacttccttcttcttcatcatcgtctcttcatcgcttcaggaggccgccgcataattagagataggacttagagatataataacccccagctcctgatccccaagccctaggcgtaggattccacgtccatcgatggcgctggacacggggacggcggcgggtatcgacgaggcgtacgagttctccgcgcccaggttcttcgacttcgtcgtcgaggaaacggaggaggccgtacgtgccgccgagagctggttcgaggctgcccgcagccacgccccctcgccgttcaacccaaggatcaaggaatcgagggcggaggtcaagctcgcggtcctctgtgatttcgcgcaagccgaggagccggctccagaggtaaataaacagaaggagccagctgacgaaatgtcggggccgcctgcggctcaagaagagagagatgaatcgcccccgtctctggagttcctctcggcgacggacctttctgtaaaatcagcagatggtggttctaccagcacgcttaagatgcagacgcgttatcctgcccctcctaccaatgttgcccctgcgagttcgacatgtgacagctcttcagtgaatactgatgcgcgcacgccgaagatgcaggtaaacatgtgcagagcaggtcctacggctgcttcgacgaatgtcaagaggagcgtgatgatcaagggtggccgtgatttggtggggactggaaaggcagccactgctggcgctgaaattgctcaagagaaccaagcggtgaagaggcagaagctcgatgatgggagagccagacagatactcaatgtcaagactaaggtgctgcctcataaggcgagagctgatttagctggaagcgaaatgaggaggtcccatgaggatatgcgctctgcgaaggaagcagatccatatgtatcagctgcagaattggttaagaagtttgaatcagggaccagagagcttagcatcactcacagtagatgtcgttctcatgaggatgctgcatcacagcgaagcctgcgaaggcctaagcttatgttaactagacctaaggaacctgacttccagacttcccagagagttcgaacagtaaaagtgaagagctctgcagagatagaggaggaaatgttggcaaagatacccaagttcagggcacggccattcaacaaaacgattgctgaagccccttcgttccctccacttccaaggagaaccccacagatacctgaattcaatgaattccatcttaaaacaatggagagagcaagtcgatatgcggacacctgttcagaagtttcttgtgcagatactatccagagtcaaaataagacactgaaatcgagacaagcaaagccaccacaacttcatacagcaatgagagctcggccaccaagtgtgaaaagttttcaggaacttgaactggaggagctggagaaggcccccaagttcaaggccaagccattaaacaaaaggattcttgagagcaagggagacattggtgtatttttccatccaaagtctcaggtcacagctcccaaaaaattccatttttctaccgatgttcgcttgggccctccatcagttgctgacttatttgacaagctctctcttcactctgaatgttcttcaaacagcaacagacaagatgtgcccagacgcaccataccaaaccctttcaatctacaaacagaggaaagaggtcatttaaaagagaggcagctagaagcacatctcttacaaaagaagatggaggaggaaaaggccagggttcacaaagctaatccttacccatacaccacggactacccgacgatgccaccgaaacctgagccgaagccctgtacaaggccagaaggctttcaactagagagttcggtgagacatgaactagagcagcgaaggctgatggaagaaaaacagagaatggagagtgaagaggctcagaggagaatcttcaaagctcaacctgtaatgaaagaggatcctttcccacttccggagaaagagcggaaacctctcaccgaagttgaacagtttgtgttgcatgttgatgagagggcagtgcagagatcagaatttgatacattgataaaagagaaagaaaagacttacaaaaggttgagagaggagaacgaattcgcgcacaagatcgaggaagagaaggcattgaagcagctgaggagaaccatggtgccacatgctcggccgctccccaagtttgacaggccattccgaccacagaaatcgacgaagcaggtgacaaggccgaagtcgccacagcttcaggtggatgagcgaggggcgaggaggcacgctttgatcagatgatcaccgccgttgtttatctatcttgtactacactgattgtcatgcgcggtcaagatcatatctcaatcttgccgtcgatctgttgttggttactagattctttcttctgctgaccagtgaccatatgtagagcaggccaggccctaataacagcaatctttgtcagcacaacgcagctgacacggtgtatgcccttgccctgtgtgtgtttgtgtgccagtgtgtgtgtgtatgtttgtgtaagtgtaatatgattacctcgatggtgagacttcttaatccgatgatggcttgatatagagcttgtgttgacccgtctggaacgtccgccggcagcgtgccatacgcacgcgtgttttctttcttgcattcaaataacttgaccagatcgagagagaacatttcatgtcttc

SEQ ID NO: 19481 - DNA, 410 bp, Zea Mays
cagcatagtgccctttaccatccgtctccgccgccacacatgggtccaaaggttcagcagctcattcgtgcgcagcggcttcaccaggtactcggccgcaccaagcctcaagcacttgacaacaacagacacctcgtctctgttggacatcactgcacagttccataagatagggaggacgggtcacagaaagcacatcacagtaataggcacaaccgcacaaggcgcagaataggaaggctgcctactgatgatggggatgtggcgcaggtccttgttcctggcaatgtacttgagcatcttgaagcacttggagaccggcagatcaacctcagccaggatgatgtcgatctcgccgccctcgtagttgagaatattgatcacctgccgcggagacttggcgcaagtta

SEQ ID NO: 19482 - DNA, 1537 bp, Zea Mays
cgcggggaggggcacgacctgtcttgggtgacaatacaactttcatcatcagctaaagcaaggtccccagcgcaaaaactatttacaaaaatatctgtcgtcctctgtcggacaagagcgtctctcagcgtagtaccaaattttcctctaccgggaaaaaggcgaagaaagaaactaacagacagacagtcattaaaagctccggcgactatgctcccgcctccgttggcgatgagcagttcaggtcgagatcgaacacggtgggcttcctcgccgacacagcgaccgatggcgacggcgacagatccactaccgacgaacagtccgagtcgctctacgccacggtgaccgtcgacgccagcttgagcacacgacaccctgcttccgcggtggctgcgcaacttcccctcgtctgcctcggcctcgggctcgcatccgccctcgacctcggccgttcttcctcctgttcccgccgccgtccgccgccgccgctgcttggcggccgcctctctcacacccaccgcagtgcgggcgacgaggaccccatgactatgatgacgccgccccctctcgagcagcagcagggggacgagatgctggtgccgcaccaggagctccctgtcgctggcccagaacctgccccacagccgatggaagttgttgcgcagacagaacccgccaacacagcggagacccagccacccgaggacccgcagacgtcgcgcttcacctggacaattgaaagcttcagtcgtcttaacactaagaagcactactctgatgcgttcgtcgttggaggatacaaatggcgtgtgctaattttccccaaggggaacaatgtggatcacttatcgttgtatttggatgttgcggattctgggagcctcccatatgggtggagccggtatgctcagttcagcttggctgttgtgaatcaggtccacccaaagtatacaattcggaaagatacccagcaccaatttaatgcacgcgagagcgactggggtttcacatcgtttatgcctttgagtgacctatatgacccaaacaggggttatcttgtgaatgacactgttgttatcgaagctgaggttgctgtccgcagaatggttgattattggacttatgactcgaaaaaagaaacaggttttgtaggtcttaagaatcaaggtgctacctgttatatgaactctctccttcaaacgttataccacacaccatattttagaaaggctgtatatcatatgccaacaactgagaatgacatgccatctgggagtattcctttagccctgcagagccttttttacaagctccagtatagcgacaacagtgtagcgacgaaagagttgaccaaatcctttggatgggatacttatgattctttcatgcagcatgacgtgcaagaactcaacagagttctttgtgagaaactggaagataagatgaaggtaaatatgaaaataatgaattatcaatacatctaaaaggacagaccgagtgttgtcagctcccacatgaatggggtctagggaag

SEQ ID NO: 19483 - DNA, 777 bp, Zea Mays
tgaagctgctggaggacgcgccggggcagtggagcaccgtcgctgggatcgaggcgcagatgggcgtgctgtactacatggtggggagctgttcaagatagacgaggctgcgcagctgtttgaggaggcgagggcggtgctggagcaggagtgtggcgcctctcatcctgacactcttggcgtgtacagcaaccttgctgcaatctatgacgccatgggaagagtggaggacgcgattgagatcctggagcacgtgctgaaggtgagggaagagaagcttggcacggcgaaccccgacgtggaggacgagaagaagaggctggcagagctgctgaaggaggcggggcggtcgcggaaccggaagcagaagtcgctggagaacctgttcggtaccaactcacagcgggcgaagaaggaggccgggaggaggtggtccaacttcgggttcaggagctgagctgaggtgccctttttgtttgtaacattaaaaaaaaaggcacgtgtaaagatgttgctgtaggtgagtagtattgttagcaaggtgggtggtgattatgctgtttgcttggcactgcattgctgttactgttttgggttattttcgagttaaaatttgttttttttattattaactgcgagctgagctgctgtacccggatggatggagaaagagtctttgtggtgttgactgatgagtgatgaaaatacctgttattgttagtacattgcttccttccattggttgagaatccaatgtgaggtggcacatggccacgc

SEQ ID NO: 19484 - DNA, 2982 bp, Zea Mays
tgctggcatgtggcgagggcgtccgtggcggctgtggaagtccatggttggctacaaagttcggctggaaggcatgagaggaagagatacgcgccttcttttctgcaccactggagtcctgttgcggagattgttggtggacaggaatttgaaaggtgttacccatgttattgttgatgaaatccatgaaagaggcatgaatgaagattttcttcttattgtcttaaaggatcttcttccacgtcgccctgagctgaggcttatattgatgagtgcaacccttaatgctgagctattctcttcatactttggtggagcacccatgatacatatacctggttttacatatcctgtccggagtcattttctggaagatattcttgaaattactgggcactggttaactccatacaatcaaattgatgactatggtcaagaaaaaagttggaagatgcaaaagcaagctctacaaaagcggaagagccaaatcgcttctgttgtggaagatgctgttgaagctgctgatttgagggactatagttcgcgaactcgtgattccttatcctgttggaatcctgattcaattggttttaatttaatagaaaatgtcttatgccatatttgtcaaaaggaacgatctggtgcaattcttgtatttatgactgggtgggatgacattaatgcattaaaagagcagctccaagcaaatccattgcttggaaatccaagcgcagttttgttgctcgcttgtcatggctctatggccagttcagagcagaaattaatatttgataagcctgagcctggagtaaggaaaatagttcttgccacgaatttggctgaaactagtattactatcaacgatgtagtttttgttgttgattgtggcaaagcaaaagagacatcttacgatgcactgaataatactccctgtctgcttccaacctggatctccaaggcttctgccagacaaagacgaggacgagctggccgagtccaaccaggggagtgctaccatctttatccacgatgtgtatatgatgcatttgctgactaccagttaccagaacttcttagaactcctctccagtccctctgtttgcaaataaaaagcttgaggctgggaagtatatcagaatttttatccagagctttacaatcacctgaatctctatcagtacaaaatgccattgaatatcttaaagtcattggagcatttgatcagaatgaagaattgacggttcttggaaagcacttgtctatgcttccagttgaacctaagttaggaaagatgcttatttttggggctatttttaattgtctggatcccatattaaccatagtttctggacttagtgttagagatccctttttaacccccttcgataagaaagatcttgcagagtcagctaagttgcagttttcatgccgggactacagtgatcatcttgcacttgttcgtgcatatgatggatggagggaggctgaaagagaccgtgctggttatgactactgctggaaaaattttctttcggtgcaaacattgaaagcaatagattctcttcggcggcagtttctctttcttctgaaggatactggtttggttgacgaaaacatgactatgtgcaataaatggagtcgtgatgaaaatctagttcgggcggtaatttgtgcaggactgtatccagaacaaggagaaatccatctccctcaagacaatggaagatggacaggttatgctttattcgagttcagttaatggtaaagaaaccaagattccattcccctggctagttttcaatgagaaggtgaaagtgaattctgttttcctccgggattcaactgctatatctgattctatactgttgttattcggaggctgcataaaacaagggggcttggatggacacttaaaaatgcttggaggttatcttgagttcttcatgaatcgcgatcttgcttcaacttatgtgagtttgaagagagaacttgagaatttaatccattgcaagctccaaaacccaaggatggatatccaaacgagtgaagagctgctatcagccatccgtttgctggtgactgaggatccatgcagtgggcggttcgtgtacggccgacaggagccaagatcaaagaaagcaaagacgatgctttcgccatcctctctgagtgaggctggtggcaacggaggggataatgccaagaaccagctccagacttacctgacccgggccgggcacagcaaccccacctacaagacgaagcagatcaagagctatctcttcagatcgacggttgagttcaacggcatgcagttcgtggggcaaccgtgtgcaaacaagaaacttgcggagaaagatgccgcgagcgaggcactgaactggctcacaggagatggtggagcgattactgactctaggggggctcaggatgcagaccccatgtccttgctgatgcaaccaccgcgtaggcgtcgacatagccatcgtcggaggaactgattagcacgacatgcttttcttcctttttgatcgttttcttatttatgtagcattcgagaagcatagttaagcatagaaggtagcgaggaaaaaatgttatagactcttgaaatgtactacaatagttttgacgtgcagtgcctgtgaattttagagcatggttcgtcagtggtgacggtgagtgatgggctgatggcgtgcgagaatcgcagagaacactagctgtaacggtcgaagggtgatccaattttttttttgctgtgggtactgaattcattatttgttggcgccatattaactgaagagttatgcgtagtgggcaagggcagccacgatgtatgtatttagactaaggtagtctaaatgagggggctcgtgtcaggtatcattgtatgttgtcagatgcggagaactggagactaagactatccgccggttttctctaaatttctaactctatatcaattttttttgtcacatc

SEQ ID NO: 19485 - DNA, 3039 bp, Zea Mays
cttctccatttcacctgatccggacctctgagatgtcgatatgaatggagacctgtaacttgtatatatattagggcttagttttcttgtttcagtatctgtttggagttagaagcaagggttctcatggcatctccacaagaatccaattctctgtgcttgaagcgaaagcttgttgatgactgcctgtcaaaagactgcaaatctcgccgtgtcaaatctgagaatgagccctcatctgattcatttgctaaacgctgcaactgttgctgcactcgacctaatcttgccaatgattgtgtgaatttcctgaagagtggagcgccaaaccgtgtcatgtattacaaaaaaggttcgtggcacaattttccagagcaaataatgaattccctcatcgatgaatttaaaggaaataaatcaagtgttgtctctgtgatggatgatgaaccaatccttgttgatttcttatcaatgaccctggtcaacctgaaaaccagaaagcagcggtctgttgcctggtttgatgacactggcaagcgtttctttccttctctgttctttgatgaggaaagtgatgaaatgcccaaacaggattctggcaatgttaataacactgcacaaggaataatgttagataaggtcacgagttctccacctgaagtggtcaagcaagttgttcttgaatctagtccaccagtccctcaaaaaccttcaactgtggatgtcttgcgcaagaagatcacatctgtggaaagaggtagcgaagggtttctatttgtccaggacctttttctctctggtatgaacccgtttgcaacaccaaataacatacttcatgtccaccgctactctccaaacgatatcaccgcacaatgtagatttgaagcttttgaaagacagatgaagtcaactaaagaagcacgtggtgatgcaaatgttaagtatggctggctaggatctaggaagagtgacatagttaggattctcattaatggtttgggtactactgcaaatcctgttgagaaagctggtttgagtgctggtgtatatctttcacctgaaaatcgagcctttaccagtgtcggtctttgtgatgttgacgaaaaaggagtgcagtatatgttgctgtgccgtatgatattgggcaatgtagaagctgttgaacctggatcccaagagtcttttccaagcagtgagatatatgattctggtgttgatgattgttcaaaccccaagtgttatgtgatgtggccatcacatctaagcactcacatccgtttagaatatcttgttagtttcaagcttgccccaaaagttcgaaattatttgcttgacctgaaaggtttatggtttaatccatcactaaaagaacttggcacggacatttgtacacttcaacctgtaatgtgtgaaacaggtgaaggaccaacttccccatggatatcattcagagttctgtttgcagttattcaagacaatatatcatctgtggcaagggagttaatcttccatcattatgaagagctgaaggaaagcataattacccgtgaagaaatggtgaagaaaatgataattgtagttggagagaaagtacttttggaggccttgaagaagcttcattactgtccatcattatggtacaggccttctgttgaagcagtgtctagtgattctgtaatggcagcaccaggaaaattatccttggataaggcaggtggagttttttcattaactcttagtgttaaccatgttgattcacatgcaccaaatggtgtgtctgaacaatccacagttcttagcaccaaaggatgtgaaacccttgcagcggatatggtgcccaatggtcaagattgtccggcaccaagtggtgtgccagaaacatctagttctgctgttgccatgcgtggggcttctacaagtgtggaacccaagcgcagagatcctcctgtacagattgtgccacctggaagctctgcaaccccatgtgccaaaaatcaagattcttttgtaggaagagtgacacctatagctcgtgatgggcttttgaggacaatttgtggaagctcttcatctcctggcggttatgcttctctagcgcaagctaatacctcccaaaccaatggagtttctgccccaggtgtcactcctaggggctatgaatctgctgtaccaagcttgtcacttggaaattccgaaagtacaggcgtgaaacaagtaaattctgcaccaagaatgacacctgaaggccagaagttcctttcgctgggtattgcgccacgaagcccagcactgcgtgatttagtaaaatgccaggccagttcgacactcgttgccatgcctccagcgggcctgggaaaatcacggtccatgaagatcgagggccatgattctctggcaccgagtgtgaaggagccaaaaggcaatggtggtctagcaccaagtaaaacgccaaagctgcatgaacctgtgatagctgatatgagcatcaagagctgtgattctctagcactgggtatcgcaccaaatggccatacccatgatggtccagcatcaggaagtggggaggccaagaaagagcaggcagcactagtaactggctcgcagagtaaatcatctgtaccaagtcttgacgctagcagccatgttaccggggcagcgagcgcccttgtcgcactatcaactctgcgggagaagggcgggcgttagaggagcagcagcagcagcagtgtagttcccgttggatcagatcctttttctctactgtacatgtttctatgtacaggaatcatccccgtcgactctgatccccagtgcgtacggttgctgttggtggccagtcccctatatgttgcttggcagcaaatgttttggttaataattagtttttataaaaggaatattcacccttgttatgttctctacatgtaaattatctgaggtatacttgcattattatgagtgctataatcttttcttttactacatgctctaaactgtatcgtgtattcaataataaaatgttaatttactccctccatt

SEQ ID NO: 19486 - DNA, 1766 bp, Zea Mays
tttgcttgcttcatctccttgttagcgaatgccaattacttgtctgtgaaggaactgatgatgatcttccacaacttccacataggagtatcagaggcagcggacgtgttagtggtaatgggagaactattgttcctgccggttcatatgctagagcaccaactgacatggaagcacaaattcaacaacttgagcaagaagcatattgttcagtccttcgtgcattcaaagcccagtctgatgccattacatgggagaaggaaggtctcatgactgaacttaggaaggaactaagagtatctgacaaagcacacagggagctgttaaataaagtcaacaacgataatattatatgtagcataagggaatggagatcaacaggagggcttcaagcaagcatgtccaataacccacaaccgattcatgaccctgttccaagtcctaccacctctggccgtaagaggcaaaagacatctcaatctgttcctgctttacctgcacctcctgcaatgcattcacaacagctggctacaccaacacagccatcgtcttcaactgctaggaaagcagtacccccagtccctaaaggcaaaaagacgaaaccaggtcagaaggtaccaggtggctctgcagccaagcctatgccatcttcagcaggtcctagtggaagaggaccacacatgaataggaattttccaggtggttctgctcctgaagctcaagctcagaatgtcgatccattggttggtcgtaaagtgatgagccggtggcctgaagataatagtttttatgaagcagtcatatctgattataatgctgaaacgggcctttatgtgctggtttatgacattaatacggcaaatgaaacctgggagtgggttgatcttaaagagatgggacctgaagacataagatggaaagaggatgactctgggatagaccctgtggtgtatctgcgcagccgaggtgccccaagtagtggggtcaggaagccaacaggtcgcggtgggcccatgccaggttctggaagaggaagaggattaccgaagaacatgtctaggaaagattttccacctccacaaaatggtgttggcaagagaagttccgatgacattgatatccttcatactgagagcctaataaaagaggttgaatgtttattattacaatgaactgcagatcttgtgcacttcatttcacttctcttctgctatatctgctcatgtaggtggagaaagtttttagcgttagcaatcctgatccacaggaagtagaaaaggcaaagaaagcactgaaggagcaagaacagtcattgattgacgccatagcaaggcttgctgaggcatcagatggtgaaagtgatgggctcaatcgtgggcgaaggaacttgtatgctggtaaccagcatcaagcaaactatgttgatgacatgcccgttggtgaccaagctgatgccatgtaaacactgcatgaacatgtatacacaacataatataactgtctgttgtacaatccattgcaaatatttgttctggatttaggtctctgtaagctaagtatcgttcgtttcgggaaactaatttttttagaacagtaattcagaatgctgacaagtaaagcttgtagatgtttgtttctttctctagtttttttgttagtgtggtctcatgttctatatgcatgataaaaggaaaaaaatcacctttgtaaagcactaagtttgtcttcgaccatttttgacgcagcaatcattcctcatgaccatg

SEQ ID NO: 19487 - DNA, 3355 bp, Zea Mays
aaatgcatgcaacttttgtttattttctcagacagcttcaagcttggttgctatgtgtgttcatctgagaaacctactgctgccgtagatgcgttggtgtttgatcctcccagtttgcgagaaagctctaacgcaaggcctgctccttgctgcacaggcaattcttctattgtccatgttgagctgtcggtgaagctgagattgctggttgctttgtactcaggctgtcgcattgccctctgtactattggtaagaagggattaaggcagcctggcagcaccagagtggagagatggttggacactgatgatgcgatgtgtacttctgtggcttctgagcaacagattcttgctgtcgggtgcagtagaggtgttgttgaattgtatgatctagcagaaaacacacgccatatacgaaccatttcgttgtatgattgggggtattcagtggaagataccggtcctgttgcctgtatatcttggacgcctgacaattgtgctcttgcagttgggtggaaatttaggggacttactgtatggtctgtgtctggatgtcgattgatgtgtactattcgtcaaactggttcaaattctgcctcatctcctatggtgaaacctagcgctctaaaatttgagcctcttatgggaggaacatcacacattcaatgggatgataatggatataagttatttgctgtcgaagaaagcttgtcagaaagggttcttgctttctcatttgccaaatgttgcccaaacagagggctttcaggcacaacatattcccaccaggttctttatggggaagatcgaatccttttggtgcaaccggatgatgccgatgaactgaagatattgcatcttaatgttccaatttcatacatttcccagaactggccagttctacatgtggtggcaagcaatgatgggatgtacttggcagttgctggctctcacggactagtgctatatgatttgcgaaataaaaggtggcgtttttttggtgatgttacacaagagcaaaagatccaatgcaaaggcctattgtggatgagaaaaattgttattgtgtgcaactatgttgaatcgtcaaacacgtatgagctcctctttttcccaagatatcatcttgattatagttctttactctaccggaaacaactgcttggaaggccaattgtcatggatgttttccaggattatatattagttacttacagtccattcgatgtacatatctaccatgtggtggtctcgggagaattatctcctgctagcaatccagttttaaagctttcaacattgcgagaactttcaatcatgagtccaaaaagcccacctgtttcaatgcgcttcattcctgaacaaaatgacaaaggagcgctgacagaagatactcatggattttctgatcttttgtcccagcaaccatcaagatgtttgatcttgcggaccaatggggagctttctgtgcttgacatggacgatggacatgaacacactctcacaaattcaattgaactcttttgggtcacctgttcgcagtttgaagagaagggtagtcttatcaaggaggtttcatggcttgattacggtcatcggggtatgcaggtgtggtacccatcacatggagcagatcgttttaagcaagaggattttttgcagttggacccggagcttgagtttgatcgtgaggtgtatcctcttggtcttcttccaaatgttggtgtggttgttggtgtttctcagagaatgtccttctcaactgcggagtttccatgctttgagccttcacctcaagcccaaacaatattgcattgtttattacgacatctccttcagagggacaagattgaagaggctttgctcttggcaaatttgtccgcagaaaaacctcatttctctcactgtttagagtggcttctgtttacagtatttgatgcagatatatcaaggccaagtgcttcaaaaaatcaggcttcacaaaaagttgattctcccaagaaatctcttcttgagaaaacttgtgacctactacggaattttcctgaatatatggatgttgtagtcagcgttgctaggaaaactgatggacgacactgggctgatctgttctctgcagctggacgatccacagagatgtttgaggaatgcttccaacagaggtggtacaggactgctgcttgctacatactggtcattgctaagctggagggccctgcagtcagtcagtattgtgcactccgtttgctacaagctacacttgatgagtctttgtatgagcttgcaggggagttggttcgcttcttactaagatctggaagagattttgagaatgccacttcagactctgagaagctatctccaagatttctaggctattttctgttccgttcaccttataagcggcaatcttctgatttgaaaagtaactcaacgaaagaacttagtccacatattgcttctgttatgaacattctagagcgccatgctagctatttgatgtctggcaaggagctttctaaactcgtcgcttttgtcaaggggactcaatttgatcttgtggaatatctacaacgagaaaggcaagggtctgctcgtctggagaattttgcttctgcactcgaactgattggacaaaagctccaaatggatacactgcaaagccgacttgatgcagagttccttctagctcatatgtgttcagtcaagtttaaggaatggatcgtggtgctagctactttgttgcggcgtacagaggttttggtggatctctttcagcatgatttgcgattgtggaaagcatatagcattactctacagtcacatgatgtattcagggaatatcttgaccttcttaatatcttggaggaacagctttcgtctgtctctgatcttacattgcagaatggaccattgtcatgaatgctggacggtgacactgattgaaaaaaacaactgaatacggcgttttagccttgagttaattaacacatacggcgggaccaggaatctgatgtaaatagattattcagggtgtttttctctttgagcaacaccccgaggtgctatggcagttttttgtacagtgatcagctaagcacctattgttgtatcattagtttgttgcagcggagttgagtctgcattcttcgccttactgtaaatatgtgctgcgcccttaacattgtaagccatataccattctgagcagcaagttcttttctctgttccatagaatcgtgtttaaagctagaagcctagaacatgtagatagtcttcacctgatgtttgtagactccgagatattattaaaactgacactatgatttcttaattgcattttttccatggcata

SEQ ID NO: 19488 - DNA, 245 bp, Zea Mays
agattacatgaatgatttgaataagcaatatccttcccaagcccaatatgtaataccttacgacctgatagtgaagctgatgttttgggaggtagaacttcatgctttgcaagttcaacaaccttggtgcctccaacaaagcttgggtgcgaagtatttatataatccatctacaaaaaaaaaaggtgcataaaacatgccgctgctcaaagaaacataagaaaataaacaatacagatattaag

SEQ ID NO: 19489 - DNA, 1080 bp, Zea Mays
cccagatctcgcttccagcgccagaatccaaaagaaaacttacaagggcgcggcaacagagcgagaggcgcgcgcgcagtcccctctacttcccgccgctggccgtttcccttccccccaatccaaaccctagagagagagagagagagtgtgtagtgtgtgtgtgtgagagagagggggattggaggcgaaggcagcgggctagcgctagcggaggaggagagatccgctgaggtggaacgcccgatcggcggagccccatccaccaccactccacaagatgcggggcgggacgctgcagatcaactggcacgaccagcagccggtgctcagcctcgacttccaccccgtctcccgccgcctcgccacagccggagcggaccacgacgtcaagatctgggaggtagcgtcggacggcaagctccccaccgccaccttcaagaccggcctggtccccaacaccaccgcccacagctccgcggtcaacgtcctccggttctccccttcaggggagtatctcgcctccggtgctgatggtggcggcatcaccctctggaaactgcatcccgctgacgacggcgaggcatggaaaattcacaagacgttactattccatcacaaggatgttcttgaccttcagtggtcgcatgacagcacatttcttgtttctgcatcagtcgacaacacttgcataatttgggaagctagtaaaggcacagtgcaacaaaagctagagggacatctgcattatgttcagggtgtggcatgggatcctttgggccagtatattgcttcactgagttctgacagaacctgtaaaatatatgcaaaaaagcctcagggcaaatccaagaacgcggagaggttgaactttgtttgccagcatacactagtgaaggtagaataccagaatcatgatgaatctaagccaccaaccaaatctcatttgtttcatgatgagacactaccatctttcttccgaaggttggcatggtcacctgatggatcttttctagtattgccagcagcaaattctctatcaccataagcctctgaacagattttttcccctatcttcat

SEQ ID NO: 19490 - DNA, 829 bp, Zea Mays
ctctcctcaatttctcttttggcttcacccttagttggtctatgcttcgtccaatctggcacatatcaatttctcagctgatacagactactggctcttatcggacaacacaggagttagcatgacgaacatgtgggagacaggaccagatgagtgggatgggattgagaaattcaacgcggaggatttcttggaagtgggcactccccagcagcaggataaaccagccgatgtcgtggatgacgacccctcctgtataatctgaagcccgccgaatcacggtggcgaaacctttcatagttcagcgcccgctccgatcaacctggagcagtagatggctgtgactgatgtacagatgccagatcagtattaataacttactaactgtctagaccatggcatcatccagaaatgtcgatcataaccgagagttgatggtgcaggcagtccttgtcaggttcaggctcaaacattgcagatgcaggctgaggctgcattagctgtgcctggtagttggtgcatgctgtgtatcttaagggtcacagcactagtagtgtacaactaggaatatgtgtgtcgaatccatttgtaaaatagcagccgttattgtttgtgtggtactgatccagcttttttttagaagaaaacatgtgttgccatcccgagatggctggacaggtgttgctactattcgcgccgttgccgggcaatatcgtgtgctatctgcatcgttatttctgccactacgtgacgttgtctgtaatagaggatttgtactacattgtttatatagtgaagtattgtttatataatgaagttcaaaatagag

SEQ ID NO: 19491 - DNA, 1564 bp, Zea Mays
tccgctgtttcccctgaccagcagaccgctgccgagagcccgagacagtgcccgctgccagccaaccgccgacgcagtccacaagcgatgaagcgcttcttccagccagtgcccaaggacggctccccgtccaagaagcggctagcgggtgctgctgaaccgggcgacggccccacatcagccggtgccgccaccggcgctggcggggatgtagaggggaggcccaccgaggagccgttcaagttcctgacgtggaacgccaacagcctgctcctccggatgaagagcgactggcctgctttctcgcagctcgtcgcccgccttgaccccgacgtcatttgtgtccaggaagtgcggatgccggcagctggttccaaaggggcacctaaaaaccccagtgaactaaaagatgacacaagcttgtcacgggatgaaaagcaggtagttctacgtgctttgtcagcttcacctttcaaagactaccgtgtctggtggtctctttcagattcaaaatatgctggaatttgttcaacacgtggataaacccttaatctggtgtggggacttgaatgtcagtcatgaagaaatcgacgtcagccatcctgatttctttagcagcgctaagctgaatggatacaccccacccaataaagaggactgtggacagccaggattcaccccagcagagagacggcgttttggcaacatattattccaaggaaagctggtagatgcttacaggcacctgcacaaagaaaaggacatagacggtggcttctcttggtccggtcatccaattggcaagtaccgaggaaagagaatgaggatcgactacttccttgtttcggaacagttaaaggacagaatagtttcatgtgaaatgcatggccgtggcattgaattggatggattttatggaagtgaccactgccctgtttcgcttgagctttccgaagctgtagcagaagaagcaccaggacagcccaagccatccatctaaatataccaccatggtggtcattgttgagacatttccggtccttcattaaacctgactgttccatgcattgcctactctaggtagctgaggtttgattgtaggtattattatgatcccagtaggttaccagttcctgtggtcagggctggtatagtttagggatcattgccatttaagcagtgcaatttggacatctcattctgcttgaaatgttgtttgtctaagagcagccatggactacctaatacctcatggggatcgaagagattaatcccttcgtatccaattttaactagcaagggatttaatccacccctaacaagcacaataaaatcttgttcgttttttctaccagaaccaatggaattaaatctcgatggggtcttaattcttttggcctatgatatgatatattaccagagcaatcgtgcccccggtgctagttttaactcgctgcccggatctcgacactgatgaggcaagtaaacggcacaaaaatccacatgcaagcaactgacaaaataagagacaggatactaaaaaaaaatccacatacaacaacaa

SEQ ID NO: 19492 - DNA, 390 bp, Zea Mays
ttcacctccaagtgagcctccactgcaggccccaattgttctggagaatttggaaacaaagaaaattgtccttgttcatggagaagggttcggtgcttggtgttggtacaagaccatctcacacttggaggaagctggtctagatcctgttgccttagatctcacaggctctggcatagaccatactgatacaaacagcatagctacgttagcagattactccaagccattgattgattacctcgacagacttcctgaagatgagaaggtcattttggtcggccatagttgcggaggtgcgagtgtctcgtatgcactggagcagtacccccgaaagatctcaaaggcggtgtttcttactgctacaatggggctcacgttgacctacat

SEQ ID NO: 19493 - DNA, 3494 bp, Zea Mays
tcgtggcccacggacgtgtaggaggggacacgccgccgggcctcactaaccgcaggttcgggagtactccggaacccgccgccgcatccacacgacgccacgactgacgacggagagccccggtctccttccacggctccaccgccaccaccccgcataaaaaaccctacagctcgtattcgcctcatctcgcagcagcagcagaagaacaagggtatggcgaaggatgggggtcccgactggaacggcctgctcaagtggagcctcgcccacggcgacggcaccaacccgccgcgtgctctcagcgaggaagacagaaaatggttcatggatgctatgcaagccaacacggtagatgttgtgaagaggatgaaggagatcactcaggtgatgaaaactccagaagatgtcttgcagtctcagggcgtgacccctgagaacatcgaagatatgttggatgagctacaggagcatgttgaatccattgacatggcaaatgatctacattctattggtgggctggatcctctacttggttacttgaaaaattcaaatgctggcatccgagcaaaggcagcagaagttgttagtacaattgtgcagaataatcccaagagtcagcaacttgtcatggaatccaatgggctagagccactgttgacgaacttcaaatcagatccaagtacaaatgcacgcacaaaagctttaggagccatatcttctctaattcgtcataaccagcctggagtttccgcatttcgattgggaaatggctatgctggattgaaggatgctcttggttccgatgatgccagactccaaagctctcaatctcatacaatacttgctgcacaactacaaggcagacaggagtgttgccacagagcttggtcttccgaagctgatgatgcaccttgtgtccagcgatgattccttagtgcgtgaagctgctctaggcggcctccttgagttggcgcgggacaagacatctggtaacgcgctacctgaccaagaaaagctgaaagacatgctcaagagccgaatagaagggatcagcgcaatggacactgacgatctccacgctgctcgcgaggagcggcagctggtggattcactctggaaggagtgctacaacgaaccttcgtctctcagggagaagggcctcgtcgtgcttccgggagaggatgctccccaacagccgccaccagacgttgcagggaagatgtttgagccaccgcttcgtgcgtgggcggctgcaagacctgctcaggaagatgactctgactctggcagcggaaagaaggctccgccattgctgcttaagttttgacggccttcttatgccgatactagttcttaggctccaccatgggtgttgaaagctgaaagatcagatctgatggatgcctgaccttcttcgaacctcagttgtggttcttgtaatttgcaccgcatttctgttctgagtatgtttttatgagaagactgggaagatgacagacagatactgtatcacgtgatgctcgtaaattaacactacatgcgaattctcttgctcgattgctcattttctgatgcttccatgattgctgatatatcttaatccgatccgatagttataatttcacgggtctagttctagagatgctgaagagcttgcgcctgcttgcaggcatatgttactttcagcttgaaggatggccgtccgattctcgcgttcgatctggacggtgggtgattttgcctactcccgtccgtcgatgattcgtcgcgagccattcagaaggcagcaaatctagctatctcctctgcctcctgctggcggtcctgctgcgccatggcgctacagctgcgggccgccgctctctgtccgcccctgccactcaccgccttccatggccgcctcgttgcaccttggcctccgcctcccttggtcagcatagctgtcgccgccgcctccagcccgggtccctccgcgcccctctcctgccgcggcccggcgcctcgctggcgacgttcgagcgtgagggcgcgcaccggggccggcggcggcgggcagagggagtccccatacgaggtgctcggcgtgtcgccgtcggcggcgcccaacgagatcaagcgcgcgtaccgccgcctcgcgctcaagtaccacccggacgtgaacaaggagcccaatgctcaggagaagtttctgcggatcaagcacgcttacaacactctgatgaactcagagtcacgatccaagtacgcgagcagcagttcggattcgtcctggtcctccagctcccgggagagcaaatcagctgctgcagaagagccgttctatggatttgcggacttccttaaagatttgcaaacagaatttcagaactgggaagctgggttgaattcggatcagaaacctaaaagcctttgggaagagttggcagcaattggcgaggaatttgtagagtttctggagaatgagttgaagattgatgactcgagaccagaggacgtcactggagatgacccatacacccagtttggacagcaggcaaaaagcgctaaggatgacaagacgtcgacgaacagctttgatgatggtctttctgaaatagaggccgctcttgagaatctgaagaaggaactcggactgggctaaaccgttgatgtggcaactagaggtgttgctgctgctactgacttagttccttgttcatacaaaggtattccttgtattgtatgtaacggttggtgataatgattagcagttgtgatctatcacattcgtttctgttttgacttttctagatacaagatctggcatatacctagatggctagcaaaagctaagtgccagaaagccaaaacggcctataatttgggatggagaggattatcaatagctcaagagcttctttctgaattctaattgttcagcgtgttcggaaagaaaaagggacaaatgtttgatcgcctttagaattttgtgggtagaggcgttctgattttgtgtgatgggggggtacaaaagaaaaaagttttgcaccgatagcactgttggggaccttcggcgtccgaaggtcctcaaaaactggatttaacagtatttctgtagtacaatgtgtgaacaggtaccctcaaactaaagtcggcattgcagcagaccggaataatacgaagcttgattcagagccgaaggtgctgagcaggaaagcttcggcgtaacagcaaagagtggaaccgacttaaagatgaaaaggctatccagaccccgatagattactatagagttattatcaaatgtaaagggcatgaatgtaattttgtaagggctgtgtcccttgtctataaataggtgaacagtatccccgtactgttcacgctgacttggcattcgttttttgcgccaagcttgtactgttattcccttccgattgaaggtacacttgtaattcgacaatgtttctgtttatgccctatcataatatatgattgcttatattgtcttt

SEQ ID NO: 19494 - DNA, 797 bp, Zea Mays
ctatacacccttgtcctgtttgccatggcaaaatttacaagacattcttgtaggtcgtagcacaaactgttgagactggagctcaaactgctgcgacattaacacagcaaacagagcaaatgaagagaattggtaatgagctagatactgtccacttctcactgaagaaagctagccaactagtgaaggagattggtcgccaggttgcgactgacaaatgtatcatggcattcctcttcctgatcgttttgggtgtgattgctatcattgttgtcaagatcgtccatccgaataacaaaaacattcgagacattccagggctggccccgcctgctcaaaactatcagattcacaacaggagattgttgtgggcagaagcttccataggcatgtgatggctctgaatgtaggcttcatgtggacgcactgcctgcgaagcagcagctatccatagggcgaaagatacatagtaacaattctttgtgcctgtatatctattttgtcttgttaactccgagccctaggtctgtattcctgcgtctggtgtttgtacaccgctggccgtttggctgtgtatatggtacagagatgagatcttaaaaccaaaccagtaattatgacaaatacttgaaagagctacagtaccgaaatactccagttggtactcgctgcacttcatgggcgaatatataaagggtgccggttgggccgtgtaacacattctgaattccgaagacccatgaaaagaatgtgaacgtttaaggctatctctagaaactctttttatatcatttcct

SEQ ID NO: 19495 - DNA, 259 bp, Zea Mays
acgtatgtacaagaatttgataggtttttctcgtatatgaggaaacacgagaatggagacaccagcacagtttggtttttgctctgcatacttcatttatttgttcttaattatatgttagagcttaaaacagacacatatttacccagctgtgtaattcatgtgattattctttaccaaacgtagcattgttcctgtttgtcatgtagaatccactattttcccatttggcaactcggatatgtaattctattagagg

SEQ ID NO: 19496 - DNA, 1925 bp, Zea Mays
ctcgccgtcgcctcctctttttttccccctcctcgacggctcctcctcacaggctcacagcctcacactcacgcggagagcgctcgcgcgggcgcacacgcggaggggacgttcacaggagggggagggaggagatgccggggagccagaacggggggccgaggcctcggccggtcaaagtcgagaccatccacgatcttgcgcgcgccggcgacctcgccggcgtccagaggaagctgctggagaacccctccctcctcaatgacaaaaatcccgtgaaatagtcaagttcttgcttaaccagcaaggtacagaaacagttgatctggaggcaaagaacatgtatggggagactcctctgcatatggcagtgaagaacagttcttgtggatcaacaaatctactccttgaacatggtgcacacatagaagccaaagccaataatggcatgacaccattgcatttagctgtctggcatgcaattcaagctggagacttcagcacagttagcgtgttactaagctacaaccctgattgctttgtgaaagatgatgaaggcaaaatgcccttaaatcatattccaggaggagctggtagcgagaagctgctgaaactcctcactcatcatatggaagagcaaagaaaacggaaagctctcatgtcatgcctcgaagggaaagcaatgtcagagtttgaagaggcaatgtcacaaattgttggattgcaggagctaaaaatgcaattgcgccgatgggcacgaggaatgttttttgatgagaagcgacgggctatgggcttggggattgctaaaaggagagctccccatatggcatttcttggcaatccaggaactggcaaaactatggttgctcgaattcttggaaagctcctccacatggttggaattctccctactgacaaagtaactgaagttcagcgaactgatcttgttggagaatttgtggggcatactggaccaaagactaggaggaagatacatgatgcagagggaggtattctcttcgtggatgaagcttacaggttgataccaatgcaaaaatccgatgacaaggattatggtttagaagccttggaggagataatgtctgtaatggacagtggcaagatagttgtcgtatttgctgggtactgtgagccaatgaagcgagtcatcgcctcgaatgatggcttctgcaggcgggtcacgaaattcttctatttcgatgatttcagtacgacagaactagcagagatcctacatatgaagatgaagagtccaagtgactgtagcttgctttacgggtttaagctgcacccaagctgcagcattgaagccattggagagctgattgccagggagatcactgaagagcagaggaagcagatgaatggaggccttgtagacacgctgctcatcaatgcccgcgagaacctggattcgcggcttgatttcagctgcaacgatgccgatactatgatcacgatcacgttggaagacctggaggcagggcttcgtcagatttccagacaacgtcacctgcagtgacatgtaaatttaggagaattttttctcgatgatctcatgcttgtctccaagggcgaagttatggctgtatcgtctcatccaacgtttttggctattctgactgtgttgtatctagtcgttgctatatagcagtaaaatgcatgtggtatatacaattatacatcatgccctaacattatttgacatctgtggaatagccagtaccacatacggatttcagtacgtgcataatcaattcagatttgacggttgaagtgattgaatttgaatcctaactaaaccttgacgaccgatttttctttttacgaatccattcctttacatcactccattgtcatctgatgacattcactttcaaaaaaaaaaaaaggagagagaa

SEQ ID NO: 19497 - DNA, 1009 bp, Zea Mays
accgacatgattcgacgccttcttttccaggtaaatggatctgaatttgcgattatctctcttatggcctcagagaatgacttgaggattccagaatctctgccatgccttcatgacaaagtacttgcagcagctgcggaagcagctatgagtttctcaactgatcagagaagaaagcagaatccagcagcagggattattggtggcttcattaaaggaatgaaaggcaaggctgaagaaaatgcaaaaatgagagaaagtttgacattgcgagctccaagcgaacagttggagtcaattttctcgaaagaaccatttgctgaaccttcaatacccgaccttgatgatccgatggaagaactgtcaatcggttctctttctccttccttgtgcatcattttatattgagtgctcccttccctcttgacttgggagtaatgaatgcagatgacatagagattgacgatgaagtagcagtagccctggcacaagcagcatcgtccacatcccaagggaataagagaacagcagtggaggaggagagagcgaagctgtttgaagggtcaaacagtgcggataaaccgagaatgagaacgcagcaggagattctaaccaaatataggtttggcggggacgccgccgccgcagctgctcatgcgaaggataagctgatgcagaggcaggagaaactggagagaattagccaacaaaccgcggagcttcagaatggagcggagaactttgcttccctggcgcaggagctcgcgaaaacaatggagaacaagaagtggtggaagctataaactgggtttgtttgtacgtatgtgtgttgttggatgccacccgtcgttgcgaattgggacacataccagcattaccatttttttgtgtccgtattaatcactttggatattctttttgtgttttggtgatgtacgtgtaaagataaaaaagagagaatgaaaggaaccctcttctcctggctatatgagcgagtctcttattcgtc

SEQ ID NO: 19498 - DNA, 1501 bp, Zea Mays
ccacggccacgccactaggtagccagtaggtggcaatgtcagtcacagtaggtgtggacgaggtgccggacttcgtgttcctggcgcacgtggtggacgtgatgcagtcgctgcacgtgcccttcgtcatgcggaccttcgcctccacgcccttctccgtgcagctcttcctgctgcccatgtggcccttcgccttcctcgtcatgctcgccatgtgggtctggtccaagaccttcgtcatctcctgctacaacctccgcggacggctgcaccagatctgggccgtccccagatacggcttccagtacttcttgccgtttgccaaggacggcatcaacagacagatcgaactggccatcctcagggccgacaagatgggcgtcaaggtcctcagccttgcagccctgaacaagaacgaggcgctcaacggcggcggcacgttgttcgtgaacaagcaccctgacctgcgcgtgcgcgtcgtccacggcaacacgctgacggcggcggtgatcctgaacgagatccccaagggcacggcggaggtgttcctgacgggcgccacgtccaagctcggcagggccatcgcgctgtacctgtgcaagaagagggtccgcgtcatgatgatgacgctgtcgacggagcggttccagaagatccagaaggaggcgccggcggagttccagcagtacctggtgcaggtgaccaagtaccggtccgcgcagcactgcaggacgtggatcgtcggcaagtggctgtcgccgcgggagcagcggtgggcgccgccgggcacgcacttccaccagttcgtcgtgccgcccatcatcggcttccgccgggactgcacctacggcaagctcgccgccatgcggctgcccaaggacgtgcggggcctcggcgcctgcgagtactcgctggagcgcggggtggtgcacgcgtgccacgccggcggggtcgtccacttcctcgagggctacacgcaccacgaggtgggcgccatcgacgtcgaccgcatcgacgtcgtctgggaggccgcgctcaagcacggcctccgccccgcgtgatccgattgctggccccccgccggctcgaacgcctctgttgtaccaaccaggccgaaacgaacgggcctggctttgttactttccctttgttttccaagttcgtcgagtgtgaattggtggttcctggagattcaattttcttttcctgcttcctccacaatatgtatactgtaaactatataatctgtatactatatacaagagacaaaaggatgtaatgagagaaaatacaaggacaaaaaatatcaatatctataacatcaaagcaaattctttcatcatttctatattctctccgtcatagggctgcttattggcatcgagtttttttaggcacaagaataatgttggacgtgttcaacaagttaaaatattggtcactcgtgctgtacatgtaattggtcatttagatgaacgaagaagagacccatgaagtcgtg

SEQ ID NO: 19499 - DNA, 7759 bp, Zea Mays
cctgaccgcccacccctgatcggggcccctcgccggagctctccacctgccagcgccggtgctcgagcgtgcgggcgagagagagagatagacggcgctcactcgttctgggggattttcccttcgagacagggccaaagggtaccggttaccaaacgaaaccgctccgtcctgtccgtcgcccctcggtccctctcccttcggttcgaccaaagtcaccaaacgtatcgcaaacaagctcctcgacccgagttcgagctcaactcggcggagatctccactcttcagcaaggcgcgggatgccggcgatggcaccggaggacgatgaagcactgtacgagatccaccggcacgcgtcgggatcccacgtgatccctcatcaagaagaataccaaggtgctgcgacaagttgtggtagctcagatgctggaggaggaggtgtcctctcctatctctccttgcaaggtgtgagcaaacttaaggaaaagtgggataggtacagggtgctggggaagagtaggcagaggaagaagggggatggcgtcgcactgtttgtctcaccaaatgcagaatatgtgtctgtaactgttgggaatcacatcatcatcttgaggaaagccgatggctatgcatcaccttgtggtgtttacacaaataatgaccgaatagcatttttcacaaatggggcttggctggaggctcaaggcgtttttggtgtggtggatgacctaagcacactttacttgatcaaagaaaatggggagttactagcaaggaggacatgtgatcagttgaagctatcttcttccattattgatctggttttgcaggatggtacaagcttacttaggccaggtttctacatttttacaagtgactgcttggttcatagatttgattacactgaagaacctgaggcatgtttatgcgaagttcccatatcaactaaagatgcaatgtcagctaggactatccagttacctcgaagtttatcgtgcattgattaccatcaacgtcactcgctatttgtcctagttggagattccaatgtttcatttagctccaatagttattctggaacctattttatgtatctattacacttcaacaaaaatctggaacttagtctttcatttaaaagcatgcagttggaaggggtattttgtcccctgaaggatcaaagaacctttgtttcatccccgaaaatcaggatctcgcctcagggaaagtatattgctacgttggatttgactggttttgtaaactttttttcacttgatggtgacttgcgcactgttccacttcaaactcttggaaaggctagacacctaattgatgttaaggacatcagttggtggacagataatgttcttatgttggtaagaaaagatggtagcattagcatgtacagcatcactgaagacaagatagtttccaatgatgacccggttttatctacaccaatattggagaaggcaaaggctactgaaggacatgcttttgttttgcaatctaggagatatggaacaaacactccagttaataagcggatggatagtgactcggaaccttgtctgctgagtggttctggggagcaccaacaaacagaaggggatgaaatgtcctggagtctgatatcattctccaaagttacagtagcagaaatgtactctgttctgataagagagaaacgatacaaggacgctttagattttgcttctagatacaatctagataaggatgaagttcttaaagcatgctggttgcactctgatgccaatactcatgagatagactcgtacttagcaaaaattaaagaccaagtatttgtattatcagaatgtgtaaacaaagttgggcctacagaagcagatttaagggctctactttcttttggactttgtataactgattgttacagattttctgagttagataacagcagtaagggctcaacatgggacagtcgcaccattaggcttcgtttattgcggcacatagacatgttagagacattcttgggcattaatatgggaaggtatgcagcaggagaatatagcaaattccgttcaatgccattggtggaaacagccatagcattagccgaaagtggcaaaattggggctttaaatcttatattcaagcgtcatccatatactgtctcttcagatattttacgtgttttgtctgctatcccagaaacccttgctgttcagacttatagtcagttgctgccagggaaatcccttcccagtgttgtcatattaagagctggtgattgggttgaatgtgaacagatggcttcatatataaacaattgccctgccgagttggacaaggtcgaagagatcaaaacggaaatacttgtaaagcactcaaaaggcttttcatggccttcagttgctgaactttgtgagtggtataagaacagagcaagggacattgactgcttaagtggacagctggaaaactctctggccatgatagagcttgcatgtcagaagggcattgtagagttgcagccattctttgatgatattaaatgcctctaccaggttgtatattctaatgaattgaatgagtttacaatgaatcttttgacatgggaagatctgcctgattatgaaaagttcaaaatcattctcaaaggagtcaaagaagatacagttgttcaacggctagaagaaaatgctatccgttttatgaagaaattatatgaacacaaacaagaatcctaccttgttagttggctgaaagaggtagctgctaaaaatgagcttttgatttgcttagctgtcattgaaaatggttgtggggaatcaccaatatatggtctcttcaaggatcttgctgagatgatagaaacctctgttcactgcatttatatgtgcagtgcaactaaccagtggaataccatgtcatcaatattatcaaagtcactctataaaacaaagagggagaaatcgttagtggctagtgaagaagactgcaatctgaaagatgctaagcatgctcttggttcttctatggtttcttatgaggagatgcaatgtgtctgtgctgatatcttatctggtctgggcaatgctccagaagatttttatcactatgattcagtacctgacaaacctaatgatgtcaaatatcttgatatattggagaagaggctaaaagttgctgaaggccatgtagaagtaggacggctctttgcttattatcaggtcccaaaatcaatgcatttcttccttagtgctcacttagatgagaagaatgtaaggcaaattatacggctgcttttatcgaaatttggcagacgtcaacctgttcgatcagacaatgagtgggctaacatgtggcgtgatttaaaactcttccaagaaaaggcatttccttttcttgattcagaatatatgctggccgaatttatcagagggctattgaaagctggtaaattttcgctagccaggaattatcttggaggaaccagtgcagtttctttatccacagagaaggctgaaaatcttgtgatacaagctgcaagggagtatttcttctcggcttcaactttatctgggaatgaaatttggaaagccagggaatgcctaaatttgttacctaatagcaaaaatgttcaagcagaaactgatataattgatgctcttactgttagacttccttatctaggggtgactatccttcctcttcagttcaggcaggtaaaggatcctatggatatcatccgcatggtgataacatgtcaagcaggtgcataccttcattttgaagagatcattgatgtcgctaaacttctgggattaagaagtgaagaggaagtagcggatgtggaggaggctattgccagagaagctgtggtaaatggtgatcttcaacttgcccttgatatctgtttaaatttaacaaaaaagagtcatggtgcagtgtgggatttatgtgctgcaattgctagaggccctccacttgacaatttggatactggtacccgtgaaaagctattgggtttcgctctcagccattgtgatgacgattctgttggggaattgttgaatgcttggaaggagcttcatgctcagggtacttttgagaaattaatgattacaaccgcaacaaatcctcccaatttcttgattgatggatcttcaatcacaccacttcctgtacaaagtgtgcaagacatacttgacctgagagatgacaatggccatgatagacgtagcgaccttgtgggaattgttaaagacatgctgtcaaaagtttgcttggacttttctaatggagacacacataattgggagtctatgttggaagaaaaccggaaattgttgtgctttggagcactggtattaccatggcttttgaaattgttcagtaatgaagcatgtgatggtgaaataatggatcatctcactaggagatgtcgattttcaacaaaagtaaaagcagcaaccagtatcatatattggttagttataaatggtttggcccccaatgataatataatcatgattcttgcaaagtctataatggagcctcccattgatgaagagtttgatgtacttggctgctcggttcttttgaatctcatggaccctttcaatggagtgaaaataatagaggaagagctaaaaagacgagaatcttatcaagaaattagcagcataatgagtgtaggaatgttatatagttccctcaataattctaagaaagagtgctccactcctgaacagaggagaaacctgttgcttcacaaatttcatgagaagttcacctcagccgataccgatgatttagaccaggttgatatggcaaatacaaccttctggagagaatggaaatcaaagttagaagaggataaacaactggctgatcaagcgcggatgctcaagcagatattacctgatatagacacatctcgattcttgtctggtgatgttaattatatcaaaatagtagtttactcctttgttaattctgtaaagatggagaaaaaacacatactcaaggaagcagtgcggatagctgaggcatatgggttgcaacgaactgaggtgcttttacgatttctcgcctgcagtcttgtgtctgaatactgggataacaatgatattctgaacgaaatttctgaattccgggaggatattgtcagctcagctaagggtgtgatcgatatgatatattcagatgtctatctggagatagatgggtataataaacaacgtctttcttacatttacggcattctttcagcatgtcattcatatctgaagaggaccaatgagatagaattgagatacccagtgcatgtgcatacccataagcttgaaccatttcagtactataaggtacttgaggaagagtgcaagaaagtctgcttcattgatggcttgaactttaaaaacattgctggactggataatctgaactttgagcatttcaatgacgaagtatgcaagaatatccatgcctccaccgtcactgctatagccgatatggtacagtctcttgtgagtatgtatgttgatgtactggccaagggactcatatcacaacaaggtgtttacaagcactatgttctggggttgctggcatcacttgaaggccgcagtgaagcacaatcgaacaacacagattatgaaaagttgcaggcttccctatgcgaatttgagttgaactatgatagttgcagggagtacatccaagctcttccagccacagatatttcatatattgtaagaaggtattgcaccctttgctttccatctaacttagcacgaagccatccacaggaaccttcatggaggaaacctcttgccacgctactagaattttggtctaaagttgttgatgacataccgggggattcaattgatgcttgctcatatggaagaacagactacttaaattcaaataggttatctctgtgcatgagagctttcaggcagctattaataattgatgagatagcactgcaccaaggttgggatgccatttccatgtatgtaaaagattgccttagaaatggaaagatgatggaaacaccatgcttttgtcgagctatgattctatcaggctgcagttttgaatctgtagttgaagtatactttggaggacaaggacagttagggagtgagaatgcagatccaagcaattatttggacctcttagaactttataatgctgctacagaaaagtgtttgtcggatttgagtgaggaatcttgcgaatatcgaatattgcttcataatttgctgtcatctttgagccggtcaacgggaaaacatgctggtgctctagaaatggtcagatctggtgtttgggggaagttaatccgctattcggaagacatgcagctagagagccaattacgagtctatgcactacagctgatgcaatgtatcacaggaagaaaccttaaatctcttccaaatgaaatggtgtgtcaggttgagccatgggaatcatggtatgagcatggagcgggtgctgccatagctgatgagagtatcaactcctctagcagcatcacagggactcttgtcgcacttagatctactcagatggtcgctgcagttctgcctgacgctaatatcactccagaaaacctagcaactcttgactctgcagtatcttgttttttaaaattgtcagaacgtgcttctggtgtgagcgttgctgtttttgaagcagtgctagaagagtgggagcaattgttctcccccaaagaagagcatgttgcacctcatgaatcaccaaaagaaacaagtgactggagtgatggatgggatgatggctgggaggcgctaccggaagagttggagagtccaaagaataaacaagagggtgtgttgttatctgtgcatcccctccacagttgctggatggagattatcagaaaacgtgttgaacttggtgagctgcacaaggtacttgaacttctagaccgagcatctttgaaacacagcgtgttcctagaggaagaagaagcacacagcttggttgaacttgtatctgctctggactgcttcatggcccttaaaactgtgttgctactcccatatgaatctctgagactgcagtgcctgcagatggtggaggtgaaaatgagggaaggaatcgtgtccacctcatcaaatgctgatgatcaggagctccttgccttggttctttcctctggaactatgcagaagatcatcacagaagaggcatactctaaatttttctcttacatatgccatcttgtcgggcaccttgcaaggtcattccagactgatctcctcgtacaatggaacgaagcaacatctaagatcaacagatctttactgttcgctagagttctgtttccatgttttgtatctgaactggtcctcggagggcagtatcttctggctgggttcgtcatctcgagatggatgcacacacatccatctctgggcctgatggatatcaccgagaccagtgtgcgatgcttccttcaaggccaggttgcccaacttgatgaggtgggagggagcgatgctgctctcactgacggtgaagtttgtgtaaggcacacaatctccaccctacagccgaaacttgtttctcttctgcagtctgcattagctctttcgaacaaagagttgtaggcaaagtcctgtgtagttaacttttacactcttgctgtactaccggtgtacctgtaacataaaatgtttttttagataatggtaaaagtgaatggtggaagatttcatattgttat

SEQ ID NO: 19500 - DNA, 1104 bp, Zea Mays
cttcatttaatctgttcagtcatcgcagaaatacttctaaactcgtttttggaaggggtggagaagagatggatttcttacagcaacagggaatcaaagttgaaattatcccaggaattacctctgcttcaggaattgcagcagaactaggcattccgctaacccatcgaggtgttgctaccagttaatgaagcacggcctgccaccagatacccctgctgttgcagtagagcgcgggactacacctcaacaacgaatggtgtttgcgttgttaaaggatcttgtggatgaagtcaagtcagctgatcttgtttctccaactctaataattatcgggaaagtggtatccttgtcaccattttgggttgagtcatctgaacatgatgccctgaaaattgagagctcgtatgcaagtgaagccagatgataatacgttttcatgattttagtgattggacaatacatacttgagtaacgcaatatcccagatatgagcagttccagttgggatccatttaggacatgcgagcacaggttcgacctggtgtacacaacatttcaggaagcatggattctgaatgacggatgatagcttaagcccataacagcctttggggtttgggcagaagcgcacttgggagttgatgagggcatgtctggaggcttcagcttcagtaaatttacggctttcaattcggtgtcttcttcgtcaaagaagactcggtagatgtatggttttcaattcaatagcacctgcaaactcctttctgactggaggtccattcggagtgcagggattttacagaaattagacaaaaaaagttctgttttttggggggaattagaaaaatctctgcttcccaagcgtagataactgtaagatttttgttgtcatctttaaaataattgtattgtttttatgtgttatattcatctttaaaaactcttggtaaaacagagcctgaagaatgaacctttaagctgaattagtgtttggtgtttggttctagagtctatgaacggcgcaactctattccagattctggggatagaatgacttcataactatttttttttgtttcatagtgaggcataacggaacgg

SEQ ID NO: 19501 - DNA, 1158 bp, Zea Mays
atgaatagtgctgggcgtcaggatcgccacaacctcgggatgcatccgccctatatgattaggtgttgcctaggcatgaaatggcgtcaggaagacgcctatagaactgcagcggacgccagacatgaatctgcatggggacaggagtcaatcagtatgcaccgaattgaccgcaagaaatcgaccgcttggagctcacgcaacttcaaggagagaggaggagggaaaacgagaaggtggagggcagaactggagctcttggtggcaggcagcaaaggcagcagccctgattcgccgcttgggcgctcctctattgaagtacacctcctcaagtccatttcactgccggtcatccacacctgtgacccgctaccgtcagccacccgcactgcagttgtcctcgtgcttcaaatcgccgtcgccatccacaagtacatacgatacgcacctgcctccttttgtgatatacacacctgtccattcgcttcaggtctatctgcacctatacgcccctgcctcctttcgtgttttggctcacatgaatctctcagctgcctgccgcttttcatatttgtttgctcagcctttgctcatggatggacgggtacatgtactctgctctcaatactgtgtgctgcttttacattttaatgttggactgtcacgtactcacgtatggagtagactaatgcctgattgtgcttgggttattattttctttgacaattacatagctcaaagcataaagatagattagtatgatatctttctttgattagtagtactcccttagcagtactagtatgtgctggcctaaaaaaattggaaataaataaggtatgtatgtgctgcactaggatctaaaatatgcatatggtgttgcctaggcgtttgccataaacgtctaggtgttgtgagggggagggggggggcactgcctcgccacaacgccttaaaaaccatgtatgagatgcaactggagaatagctacacgacttttgaagctaaaagacagtgaaataacaaaataaaaaaacgttcataaaagcagttaaatcaacataccaggaagaaaggaaaggaaacccaggaacaagagaccatatgcctgagaactatcaccctccatgtgacctgtgaatatgaagtaagaaagaa

SEQ ID NO: 19502 - DNA, 2442 bp, Zea Mays
cccttgtgcagatgcgcagaggttgcgtcccctaattcgtttgtcaccaaactttgcacccgcctcgccgtacccgtccgaaaccctagtctacctcggcggcggcgggccctccggcgatggaggtggaggaaccgctcccaacgtccaagaacccccgccgtgctcggcgccgggacctcaacgcactggatcccacattggaggagtccgacggggaggatattggtgttccggaagttggtatggtgttcaataatcacacagaagtcaaccgattctaccgccggtatgcccgccgtgttggctttggtgtctcagtaaggaggtcttcgttctcacgagaagggacctgcttatatctggagcttatgtgctgcaaaggagggaggccacgttatgagccgaagtttcggaaaagggcttcatcgaccactaactgcccagccaaagtacgagtgaagttgtggggagataaattgttgcatatagagttggcgatccttgatcataatcacccagtgagccctgcaatggcaaggtttttgaactcttataagcagctctctggccctgcaaagaggcggttgcgtatgggtggccctgggactatgcctgttgaagagtcaagcaagatgcccatggataagctgggggagcttgagcagcttctgtttggtgagagcaagcacaacagctttgtggagaggggtcgtttgaagctccaacctggagattcggaggcccttcggcttttcttcactcggatgcaggccaaaaatgccaacttttttaatgtcattgacctggacgatgaaggctgtaccaggaatgttttctgggcagatgcacggtctagagccatgtgtgagtactatagtgatgtcatcacacttgatacatcatatgtggctagtaaatatgatatgcctcttgcaacatttattggggtgaatcatcatggacaatctgtcttgatggggtgtgccctgctttctgatgaaacagcagaaacctattcatggctacttaagtcttggatagcatgtatgtacggcaatcttccaaaggctattgtcactgactattgtaggggcatccaaagtgctgtagctgagattattccgggagtccgtcatagaatgtgtttgtttcagataatgaggaaggccgcagaacgtttaggtgggctgtcagagtacagagctatcaacaaggcgatgcataaggctgtatatgattctttaaccattgatgagtttgaagaagaatggaatactttaattacatatagtgggcttcagagcaatgactggttaagatcactttatgaatgtcgatcttcatgggttcctgtttttattaaagatacattttgggcaggaatgtctactacacaaagaaatgaaacaatcactcctttttttgatggatatgttgatttgaaaactaccttgaaacaatttcttgtcaagtatgagatggctttgcagagtaaatatgagaaggaggcccaagcagattttgagacgtttcataagcaacgcccaccggtatcaaaattctatatggaagagcagctctcaaaagtatacacacataatatgttcaagaagttccaagatgagattgaagccataatgtactgccatgtatctttaattagtgttgatgggcctgtctctacattcaatgtcaaggagtgcattttctttgaagatggtaaaaggactatgagtaaaatttttgcagtgacatacaaagtggacgaaaagaatattagctgtatatgtggaggtttccaattcagtggcatactatgtaggcatagtctctcaatgctcaagtttcaactggttcgtgaaatcccacaacattatattcttgataggtggaagaaggattttcgacagttgcatgtgatgagacgccctccaagcgatcttgttcctaacaatcgcatggatcgatatgactatttatcaataagatgtttgcaacttgttgactctgcagtcctatcagataagtatcgccttgctttgaggttggtaagggagacagagaaatttctgctaaatagcaacacacatgatgatacacaaccaaggatcaagtctcgtgttcctaaagtaaataaaccaaatattgtgactggccaaaccatggtgggtgcagctactggaaatggaaatgatggtctcaaaggaccagaggctacagcagtcacgcaagtaccacaatcccaaaagggaggagcagaaaaaggaatagttcctactggctacattggagtaccagctaatctccaacaatttgtaggcaatcaaacagcatttcggccaagcattgtgtacatggtaccgccttccccgtgcgtgctgcatcagtgacgggcccagcctcacgtttctccgctcccatccacgcgccccatgaaat

SEQ ID NO: 19503 - DNA, 2336 bp, Zea Mays
gccaagctagcctgcccctagtccccttacccctgcggccctgcccctgcccccgctcccgattccgccgccgcatccgacccaacccgctgcgatcccctccgccgtggcgtcggcgactccctctcccgcgacgccctttcatcgctgcagttgatacgccacccgagcggttccttccctcctctcttcctccccttgtcgctctccgcatcgccgcaggccgtagggcgccaccgcgtcagaaggcgcgatccatggaccggtcgatcaacttccgcggcatcgccgggagcgccggcaacatcatgcagggaatggggaaattcgttttcggcaacgagggactcgactcaaaggaagatagctatgttgagagataccttgaccggataagcaatggcaccatacctgatgaccggagatctgccatgactgagctgcagtctctcgtggccgaaagtcgcttagcacagatgtcgtttggagcgatgggttttcctatcctcctcaatatttttaaagaagaccgcgaggatgtagagcttgtgagaggtgcactggagacctttgtgagcgcattgactcctattgagatgtcacaagggccaaagactgaggttcaaccagcatcagtgaattctgatctgctgtctcgagaaacggagaatatttctcttcttctgagcttattgtcagaggaagacttttatgtgagatactacacaatccaacttctaacagctctacttacaaactcgctgaaaaggttacaggaagcaattctattgattccccgtggtataacagttctaatggacatgcttatggatcgtgaggtcataaggaatgaagcactgttacttcttacttatttgactcgggatgcagaggaaattcaaaaaattgttgtatttgagggtgtgtttgagaagatatttagcattatcagagaggagggctattctgacggaggtgtagttgttcagcatctcactcctagtcttaattctacttcctttgatgactggtgggaggaaatgcttttgaaagagacaatgggctttgacccattgatatcaatactaaagattaggagaggcagtgcatttaattttacccaacagaagacagtaaatctcctcgctgctttaaatactgtggaattgcttttgatggtgggcccatccggtgaagcaggtaaagatgctaacaagaatgcaaatcaaactgcattggctcagaaaaacattctggaccatcttcttttgttgggtgttgagagtcagtgggcccctgtcgctctccgctgtatgagaaatcctaatggccaggcattattagcatcaactattgctccacatccaaaccaaggagatattcatgaacctgctagtgacatgccttttggaagtgtacttctgcaagctctggtttctagtgatgtcaatggagatatggaggcatgctgcagagcatctagcgttctttctcacattatcaaggacaacttgcaaagcaaggatcgtgtattgcaaattcagcttgagacatctacagcatccttggggcgtactgagccggtattgcatcgtattgttacatgtttgtccatcgcagcttcaatggagggagaaaatgaccaaaacaaccaactagaggaaccgtacattcaaccttttattcttcggctactcatcatatggcttgttgattgttcaaatgctgtcaactgccttttggaatcagcggtgcatctgaacttcataatagagcttgcttcgaataaacgttacgccgcttgtgtccgtggattggctgctgttgttctaggtgcttgcatcctgtacaatgctagccgtgagaagggtcgtgatgcctttgccgtggcagatgctataagtcaaaagattggcctcacaacatacttcttgaggtttgatgaactgaggaaaagcttggcacatccgttgtcagagcagcatcaccgcaaggagctttcccgatcaagtgcgaatagcatgtcagatttccaagagattgaagaggatgaaacaaataagggcgatcaacaccctgtgctttcagaaatatttgattcacagtttgttaatttacttactaagcttgaggctgatattagagaaaacataatggatatatttagtcggacaaaaactgcaacagcagtccttcctactgaattggagcagaagaacggggaggtcgatgaagagtatatcaagcgactaaagtcatttgtagaaaaacagtgcaatgagatgcagtgtttttcagacactgctgtacctgaaagtataagaagctgacactgg

SEQ ID NO: 19504 - DNA, 142 bp, Zea Mays
agagtatttattacatagcggaagacataatacaaaataaaagaataaacataaaacgaactaaggatcgtcggcgccaatgtcaactgagcaacgccacctagatcagatcatactcctcgctttgtggctcctcctgaac

SEQ ID NO: 19505 - DNA, 698 bp, Zea Mays
attgggccataagcaggggcgtcagtgctcgctgccctatatcaggttagctgttttggtggggatgaattgtcagatactggtgactattggaggctagaaattgaaggaagtggaaaagtatggaaaagagaccaaaaggtacgacttagacatgttgacactggaggttatctgcatagtcacagcaagaagtacaaccgccttggtggtgggcagcaagaggtctgcggtgtccgagagaagcgagctgagaacatttggttggcagcagagggtgtttatctcccggttaacggaagcaagtgaaaaagcactttcagtatttaccagttttaatgttaattagcataggatcagatattttactcgctttcattcgttcttgtttttcttaagataaatgaacatgggacatgacccctagtgatatgaaattggaatgttgggcatcgaaggtgtcgtacatgcttgtaattggatatttgtgatacatgtgtgaccgtgtagagactcagagatgcaagtgacactttgttcacaagtagagatgctgatcatcttctagatgtgacgcagaaaagacagtcgtggcaaatcttgagttttcgccgcacccagctacattgtgatattgaaatttgaaccgttctgactggcggtctatggccccaaataatgcctcggttgcataggga

SEQ ID NO: 19506 - DNA, 1950 bp, Zea Mays
cgacagatcctaaaccctaaaccctaacaataacatggctaatcaactcaagaaacttatagaagatatggctgagcaaagtcttcgatgtattgcttttgcttatcgaaatcttgatatgaaggatgttccaagtgaggagcaaagaatcaactggcaattgccagataatgaattgactcttattggaatcatagggatgaaggatccttgtcgccctgaagtaagagacgctgtcgaactgtgcaaaaaggctggtgttaaggtacgaatggtaactggagataatctgaagacagctaaagcaatagctcttgagtgtggaatactcgatgactcagaggcatctgcacaagctataatagagggaagagttttccgtgcttacgatgatactgaaagggagaatgttgctgacaagatttctgtgatggcacgatcctctcctaatgacaaacttctcctagtaaaagctcttaagaaaataggccatgttgtagctgttactggtgatggaacgaatgatgctcctgcattgcatgaggcagatattggtctttctatgggcatccaaggaacagaagtagccaaagagagctcagacataataattctggatgacaatttttcttctgttgtgaaggtggttcgctggggtcgctctgtttatgcaaatatccaaaagtttattcagttccagcttaccgtaaatgttgcagctcttgtcatcaatgttgttgctgctgtttcctcaggaaatgttcctctaaatgctgttcagcttctctgggttaatctcatcatggacacactcggtgctcttgctttggctactgaaccaccaacagatcaacttatgaggcggccaccagttggacggagagaacctcttgtgactaatatcatgtggagaaacttgtttattcaggctgtctttcaagttgctgttcttctgactctcaactttaggggtcgggatcttttgcatttgactcatgacacactaggacactctagtaaagtgaaaaatacacttatattcaacacatttgtattgtgccaggtgtttaatgaggtcaattctcgtaaaccagaagaactgaacatcttttccggagtttcaagaaatcatcttttcttggcagtagtgagcataactgttgtgatgcaggtgataattattgagttcctcgggaaatttacatcaacagtgagactcaactggaagctttggcttgtttctgtagttattgcttttctaagttggcccttggcttttgttggaaaattcattccagttccgaggactgaattgaaggatctcattgtaaggtgttggcctaaacgtggcgagagtgcagcacaacagactcaggatgacagaatggaagtaccagtgtgaagctgttcttgagcaacttctcgaaattatcaggtgttagtgttggtgcacatagatggtgttggctaattttgggtgctgatttttctaaccatcctaccttgttgcctggctatgaattctatggctgtagtcagcaatcggggaggtaaacctctgctgactcgtgatctagaatttgaacactgtaaacaaaatatgtttattgtagcctaacgaaggtcaggacctccagtggtttattgcacaagttgtgcagtcggtcccagaatcatttggggaaggcgctataaacagtttttcttggcaggagtggagtgtagctccttttcgctaatatcatttttacttttagatgcaatcaagaacattttgtcaaacactctaatagtaattggctgattttgttagagttgcctttgctatgccataattgtatttcagaaattgactggtggtatgtattgcgagtgtaaatccactattattggcggtatgtgataacaaaaatatttatggtgccctaagataagcaaattctgatggtg

SEQ ID NO: 19507 - DNA, 1058 bp, Zea Mays
atctaagtgtttgaagcacccatatcgggatactggaattttagttctaccaaccacagctggatatcctctgaagagaaactctaaagaaagactatcatctggatttgaggatagaatgtacaaatttgtaggcgttgctgcactttctggatgttgtgaggtcactattcccatggaaaatctggatcatcatgtatctctttcatttgtagcagcacatggatcagacaagtttctactccgtaatatcttggatacatattctctcatccaggaccaagtagttttggcatccaagttggaaactgcaccagtaaccaatgttgatgttgatgtcaatgcatcagagcttctaaaagaaaagggaaatagcgctttcaaaagaagacagtggatcaaggcaattgagttttactcagaggccatcagtttgagtgacacaaatgcaacatattactgcaacagagcagcagcttatctggaactgggccgttttaagcaggccgaagcagattgtgaccgggccttactgttggatagaaagaatgttaaagcatatctacggcgtggttttgcaagggaagtaactttgaattacaaagaagcacttcaagatttcaggcatgctttggcattggagccacagaataaaacagctcttgcagcggaaaggaggctgcagaaactcctgaagtgatgtggggagcagcagcacatccgacttgtaaattattttgaagacttgcctggttgaaggcaattttgatcggcagcatgtgaaaggaagatgcgatctgctggataagagtcattaaactattttttgtttgccatcattcgaaaatttgtatctcacgacgattgtcagcaagttttgatatagcttcttgctatgaccgtctattaagggaaaatcttgtatatgcattgtatactacttcgatctgaaggccgagaacgcgagaacccatgcgagcgcttggctctgctggagtgtatgattgtgtagtgcaggatctaatttgggaggcgttgagacgccccttattctccta

SEQ ID NO: 19508 - DNA, 1049 bp, Zea Mays
ttgagcaaagctgacgaagtttcctggtttagaaacttcttctctgctggacatgctaataaatgcagagtgtgcacttcttctgtggggattctacaggattttatctggtgatcctggtattgttgcttgtgattcttcatatttggaagaagctggctgcaaggattttgtggaagctatatactcgagtgagaaactcccaatgctctcaagggtcaggcagtgtacctggtgcaaagcaaacattaggggctatgaccatcattgtcctgcatttggtacttgcataggacagaaaaatcatcgtctatttatggcccttttgacaggatttgttgttgctgaatcaacatatacgatgtgctcaacaaaatatattaccagatgcatcagttcagggactataagatcggagaatcctgtatctttaaacatagtaatcagtacaacgctcttctctatcctccaggtcctctggcagattgtattcttgatgtggcacatatattgcatctgcttcaacatcaagacagatgagtggattaactggaagaaatatcctgaattccagatgaaggaacaacctcgatcagattctgaagtcaaatttgtgaacccatatgacaagggcatgctgtgtaacataagagaatttctaaagccggaatgatagatagccaattttgagtacgaagacctggaactagaaagatgggaagtctgaagtgcgttataactggatggaagcttgtttccttgttggctatagattttcaggaatctattctgatgttgtagccgtttagttgagattccagatttatgacagcgaatctggttcagtaaactgaaccaaacacactctgaggatcattgaactccctgtagtttaatgtgcaagtaacattcttttgtaaggttactttcacttatggaattcatatcgtggtcctgcatttttcaccgtttggtctgacgttctgtgggaaaagggtcgcacctgtagggatttgaaataatttgaagggaattgccgtgcttttgtc

SEQ ID NO: 19509 - DNA, 140 bp, Zea Mays
caagaaattgctagaaaggagcttgcatctatgatggttttgcatgaatacccattatgcatggttgatcatacaggatttagaagatttgttagcgcacttcaacctttatttaaaatggtgacaaggaacgctattag

SEQ ID NO: 19510 - DNA, 422 bp, Zea Mays
gcccagcccagcccaccagaagaggacaaaccagattcgattcctcctcctgtcctccatctccccaattcgcacggccatcggaccatggattccggcgtgcctgcctctgcgcctgcccctcccaaacacaagacatgccggaagtgcaaggcgagctatgacccctcggccaacacgcgcctctcctgcaggttccacccttccttcttcgtctgccgccgccacgacgaccagaagaggtactacgagctccgcgacggcgatcctccctacgccgccaagttctacgactgctgcggcgccgaggaccccgacgctccgggctgcaccactgacttgcaccgttcctacgacgacgcccaagactagcaaacctttgctgcttccacagccttcgccatctactcggtggccaactc

SEQ ID NO: 19511 - DNA, 296 bp, Zea Mays
ctcagctttaacctttactgttgatcagccctacacatcacatgaactcccacctttggtgagttcatgccacattattccccacaacttgttgagcgatgaacatatgtgagctgacccttgatgtctcacaccccccacaggttaaggacaggtaccacaggataaggtgcatggaggatgccgcgatgtgttcgtgtgaggtctagggtgtcgtctcccagttgactttctagcgccaaggatggacttttagttcgatctatatttatcttttattttgtaagacttccgct

SEQ ID NO: 19512 - DNA, 791 bp, Zea Mays
cgtgagatgaccgcgcgtctcacctcacacatgacacatgtaattgcttgaaaatctatggctcacacatgacacatgtaattgcttgaaaatctatggtttagaaagagggaatcagggaagtgaactagcggtccacgatactccgacgcccactttgctacctcggaaccctagccgccgcccatggatatcgccggagaccggcgccggtagcgatacgcaaaaggagtggccgagatcgcacggcaagaagccaggctgaagatggaaaaggagaatttagagaaggaaaaaagcgtcctcatgggaacagcatcgagccaagacaaccaagatggagcccttgagatcactgtcagtggtgagaagtacaggtgcctccgcttctccaaggcgaagaaatgagaaatggactggcactgaactggaccaacacatgctctgtagtcagctaaatctagccacctagtcttgcaagacccttattttgattcaaattgcattctcttttcttgtacaggaaatcctggaatgccgttaatagaatagcggatacttatgccaggactgtcttgtttataaaaaaaccgggctgctagagcagctgcaatggggagttaatgatgactgaaggttgttgacagttgtgatgtcctgttcttgctgatatgtttacagatcagctcaatgctggctctaaaatatgagttcagagttggtataaatggacaggtgctctgcaatggcctggatggtctatcagattttgccgtcgttcgagctgattg

SEQ ID NO: 19513 - DNA, 1400 bp, Zea Mays
atttaacatccgaatccctgccccttcgcccttcccctccggccgcagccccttccctgccgctccggcctcctccgtcgggaccgccgacgacgcgccgcgcggaagcctgcgggtgagcgtccagatccacccgcccccttcggcattccccgccgctccagcctcctccgccgggaccgccgccgacgcgccacggggaaggcctgcggggatattgggtaagcagttgtgatcctgttctcttgctcggatgccgggttactatgacatcgatgacatcctcatggaggatgagcctatttcagttgttttccaagtaactgcaaatggtgttggcctgctagatcctggtgctgaaagtaactgtgtagagaagggcgccaaggtggacctcccattttggcttgcgcatgggctgctgtctctggaacaagctgtgtcaataaacccacctccatgcttcacacagaagtagtttttttcagtgtttgttattgcattacaccatacacagaaattcttggatcaacagcaaagcatgggagagcaaggagtattcttatttggaaaaacatatatggaattccctatcaacaacttaataaaaggatctgatctttttgacaccattgtggcctactgtagcttttcatagtaaatagtagcattttgcagatctttctcttataacttgatgatagaacttattaaagacatgaatctattcaaacggttctccagaatttgacttttgctgcatggcttgggttttggttctgactatgaactaaagcgtgaaatacagattctgcagtattattctcctaacaaatctgtattctgttatctccatatcatatatactgcagaacttggaaggagatccaagctgatgcggcctgtgtggatttgagggttcgttgcccgtacttttatgagctaggatgcaagattgttcctttggtgagtgacaagagcattggcctgttcttgcgatatgcattcaccagtaggtacaaagaggttctaaagaatcgatgactggtttcaagaaatggcgagcaggtgggatgagactgcaaaaggcttccattcttggccggaagaggaagacaaagctgcctgaatgagttttaaggtgatgtgcgctgctttgatttgctagcaccgtgagcaaagagaaaagtgaatggcagattaaatctggatgtactatgatctgctgtacattgtgcacttgtgtacagcagctctgatcagtccgtcctttgtaaggaaaatgaacaccgtcttaaatcatgatatcctgtttggagcaggtgtcatgattttcagcagggtatcttgaatgagtttgaatcatgatatcctgtcttaaatttcacatgttctcaaaa

SEQ ID NO: 19514 - DNA, 1454 bp, Zea Mays
tcagatacgccacaggctgcgcgatggtgctgtgggtcttcggctacggctccctcatctggaaccccggcttcgacttcgacgacaaaatcctcggcttcatcaagggctacaaccgcacctttaatctcgcttgcattgaccacagaggcacaccggagcatccggcgaggacctgcacgcttgaaaccgacgacgaggccatatgctggggaattgcatattgtgtcaagggtggtccagaaaaagagctaaaagcaatgtagtacttggagagaagagagtgtgagtacgaccagaagatatccattgatttctacaaggaaggagatcccttgaaaccagctgtgacgggcgtcttagtgttcatttccactccagatccaattggcaacaagtactatcttggccctgctcctttgcaggatatggcaaggcaaattgctacagccaatggccctactggctataatagggattacctgttctcaatggagaaggcattagccatcattagccacgaagatgattcgatcctagagcttgcaaacgaggtgaggaaggtgctcaacagaacaaaggagaccaagatcactgaaagattatgttcccctgaatataaatcactgagagtttattgttcctggcgatgcagggtgcgtgaactcttctactacctcaagggtgagcaggtggactatggcgaggagcacagcaaggcttgtggccacaacaggtttgggagaatatatcacacagggcactatcctgtttgttacgagcacaacccagtgcattttgtggggcactctgttggcacacaggttgtgagggtgctgcatcagatgcttgccgacaagctaattgcacttgatatgggtgcattaattgctggtgccaaatatcatggagagtttgaggacagacccaaggctgttctcaaagaagttacatattctgatgggcagaccattcttttcattgatgagattcacaaattgcaaatgccatggctgcaaaaagcaaagttgctattgcgggagctgaaaactgtgaaggcagatttatcttttgcaaaggaacgctatgctcagcttgaagaagagaataaaatgttgcgtgagagttatgacatgggtgataatccagaagctaatgatcagctgaaaatgatccacatgatgggaagagaaagtgtgtagctctctggcctattttccgtatttctcatcaaaggagccacatcatatatggtctttactacagaaggaaggagatatcgcaggagctttatgagttcttggacccgggttatgcatactgtaagctgatcgcaaaatggaaaagtcaggttacgagcgcctttgctgcctaaggtgcatacaaacgtgaccaaaggaatcaccttgtgtgctctcagtgggcttgagagtagcatcatccttcaaacatga

SEQ ID NO: 19515 - DNA, 2689 bp, Zea Mays
acgctagctctgtatgcaaacatgcctgactcgcccgttcgcctatctcgcccccccccccccccccccccagcatcggagaacggagggaaccagggagctccggccgcctagaaccggagctcccaaatagatcgatccatcggtcgttgagcggacacggcaatggaagcccacgcctcgcggggccgccgcaccctggaggagatccggcagaagagagccgccgagaggatgcagcacgccctcccgatcgcggcgtctcacgtcgactctcacgggaaccaaagagccggagctgagcttcttgctcgagttcaagaacttgaaaatgggaacacggaattggtgagggaaaacaaaatgctcttgtccaagattgatgagaagggagttgagaaggatgcccttgtaaaccgtttgaatgatctcgagcggaatgtagttccctctttgcaaaaaaacttgaatgacatttctttggagaaagatgctgctgtagttgctaaggaggatgctctagctcaactcaggagcatgaagaaacggctcaaggaagcagaagaagaacagtataaggcagaagaagactcagcctccttgagagcacagctaaacaccctgcagcagcaagtaatgggacactcttacagtggatatacaatgggaatatcgactgaggaatctgttgccatggaaaaggagatacaagatttacaggcacagctaaagcaagagtcactgctaagacaacaggagcaacaaaaattagctgaagagtcgcagctgaggcaacaagagcaagaaaaactagccaaagaacaaatccatattgcttctctggaggctgaaaagcaacagctggaagaccaaattactatgttgacaaagaaagctacaggtatggaggatacatatacttatgctaatctgtcctttataatgtcaggaaaaacaacagtccatgctagtaaacatgtaagttcactctacttactagcatgcgttttcttccatatttatattctgcagtgtctttgattgcttcactgtacatgctatagtagcattactgccacatgctaggtagttcttattttgtgacatccaaaattaagcatgcacaacactctagatataatatttgctgagaactgcaacaactttgtcttcaatggtgcaaatccagtatctcaatggtgctgcgaagtcacaattcacaaatgaatgcatccttcgctatactgctggagtagaaggcctccaggagttccttgccagttccattaggctagtgcagtagtgctcttgacttatggtcatcttgggtgtgtattttggggttttctataatcccttttgcactctcttctttcttaatcgaatgatatgcaattttcttgcatgttcgagaaaaaaaatatatttgcgaggattgtagccttgaattaaatcttctctttctgtgcagaggacgcttctgagtttgctgcacacaaggcattttcaatgcaagatagggaaaaacttgaaaaccagttgcatgacatggctttgatgattgagaggctagaggggagtcgtcaaaaactgctaatggagattgattctcaatcgtcagaaatagagaaactgtttgaggagaattcggccttatctacttcttatcaagaagccatagctattacagtacaatgggaaaaccaggttagagattgtctgaagcaaaatgaagagctccgttctcacttggagaaactaagacttgaacaagctagcctgttggaagtaagcaatatcactaccaaatcagatggacaaattgaaaacagtatctcaaacctaccagaaatggtcaccgagaatatttctctgaagggtcagcttataaaagaacagagcagatctgagagtttgttggcagagataatgaaactttcagctgagcttaggaaagcagtccaagcacagaataaccttgtacgcttgtacaggcctgtattaagagacattgagagcaatctgatgaaaatgaaacaagaaacttatgcgacgatccaatgatacatggtgtcaaactcaatccacgatactgtggaatggccgcatagtcacaagctccaccgtaggcctggttcggttgcatctgaattggagacgcaaccaacaagcccttgctcaagatgctggtgaatgtattggtctcatgccattttcaagatgctggtggaaagcagttctttcggtggctaccattcataagtagagttctgtcgagatcgttcaacctgtatcatactcttgtatacccgattcccaccggttcatcttataaactgggggcaaatggagaaaaagattggttagggcttgtttggtgaaaaagattggttagggcttgtttggttacaacttacaagggaggtggaggggactggagggaaataaactaatttttcccttaatccccacatttcccttctaaccaaaacaaattattatccctgctctcagtccacaaattgggcgcaacaactttttaaatcatgtcatttgcgtccgcatgttcgtttggccgttggatgggtccgcatgtagggtgtatttggtttggtgaatgaggtggtctatttctctcttctcacttttttatttggtttgtgaaatataatagttaatctatcattat

SEQ ID NO: 19516 - DNA, 2182 bp, Zea Mays
actcagaacttcaaaagtgtgaagcaaacagtgaagcgattggaagaggttgcggtttcatcacgcagggatgagagagttcaagtgctaaggcgctggctcggagccctacaggaggttgaggctgaagttggaggttcgggttttgttttatgatgctgatattggagggcctcctatgaacttccgagatatattcctttatagccacgcacttgagggtattacgttgtccatgattcttgaagctcctaaagaagaagaggtttcccttcttctagaaattttcggaatatgtcttacagggggcaaagaagttaataatgctatagtgagcagtatacaggacctggcaaagtcattctcaaattaccatgatgaggtcctggtgaaacgtgaagagttacttcagttcacacaaagtgccatttcaggtctaaagaggaatgctgacattgtgaggatagattctgaagctctagatttgtggaagaaactacatgagaaggaggcatcacgagctcaatcaattggcgatcctgataaagttacagaaaagacttcaactattgagtctttcaaagaagcactcaacgaagtccgattttgctctagaatggaggaacttctattgaagaagaaaacaattaatactggggattccttagagatccactcccaaaaggttgagaaattaaaggtattggcgacttcccttgctaattcatcctccaaggcagagaagcgtattttggatcacagacgccagaaagaagaggctcttaactttcgtgctaaaaaggagaacgaagtgattgctgttgaaaaggatttgactgctgagatttctgaattggagaagcaaaaggatgaacttgaggctcagttaaagaaggtcaacatttcactgaatgctgctatttgtcgactaaagcagacaagagaagagagggaccagtttcatgaagcaaacaatcagatgatatttactttacaagcaaaggagaatgacctgtcaaaatctattgactcatgtaacatggaggccagtgtagtcaagacttgggtaaatttcctcgaggatacatggcaacttcagttgtcatacaatgaacagaaggaaactaaaacgaatgacgagctggagagatgcacaagcagttttctgaagttgaccaagcatcatctttcctatttcaaggaagttcttagcccgtcaattgagcggatacgcacatacgtggataatttggcagtcttaaactctagggaggagtcaatagaacatgaaggggatgatgagatttctgtgcagacaagtccacaaaagtcccttgaggaggaatatttggaaactgaaaagaagatcgtgattgccttcagcattgtagatcgcatgaagaagatgttttattctgagcaagcggctaattctaggcaagatgatgcagaggtcaggaccttattttctgagattgagaaactgaaggaagtgtttgagtcggtagaaaggccgacactagacattgaagtccgcaaggcaaaggatccaatgaaggacaagtctggatcgaatcgttcagccaaagacaaatctgaatcgagccattcacctgttcaggtgccctcttcacctaaagatgtgcccgtggagtctccgaaatctccagtgaaacctgagcagacgatggacccagattcagagtttgcaaagttagagctagaattcggaaaagttaacagagaccatgaggagataggcggttgggatttcgacgagcttgaagaggagctgcgagctgacctatctaaatcaaccaatccaaaataaccacgctcaacccgacatctctgaacgcgcattccacctaactttccttgtgctggcttcttctgaaaatttgtagactttgaattgttgaatgtacatagtattgttgtttcattgtgtccatggacgttctatagattatactcactacatgggaggtggagattgttacactgtagactgacatttcattagcttatttgtttggtcttgtcatgtgcattcatacatgaatgaatgaatgataaacattatgtagcattccacattttggacattggaacatatattaactataacgataaaatgctcttggtcttggatgtccctgccaggttttaattaagcaga

SEQ ID NO: 19517 - DNA, 786 bp, Zea Mays
ttttgcttataaatgatagcttgttcgagctaatgagctagctcggggtgatcgagttggctcattaacaattcagtttcgttaacaagcctggagggaaaaaggacacatcacccaaaggcacagggaatcgcaccatcgtgggacccgtacagcgcaccgcccagccgccggatctgcgccggcgacgcgcccggacgtcggatctacgccgccgcaggaggggggaggcggcgctgtggccgttctctgcccgtgagcgcccggatccgtcccgccgcaaggattatggatccgaaagagaagccaaatgtatcgagcagtccaccaacaccacggctggactgcataaaatgctttgatatgctctggttctgttactcaccattccaccagatgcagaattattaccggtatggggagttcgacacctgcttcggcaagtggggcgatcttatgggctgcctcgctctcaagacaaagcggaaggcagaggtggaggagatcctcatcgcgcgggagaaggccaaaccacatatctggacctaccggacggtcgatgaggcatcggagaattggtggcggatgtacaagcatgctgtgatgatgtcaccactgccaggttctgctcagcttcctcgggtccctaagccgacgagtgagtgtgctgcgtgccccagcccagatgggtcgagcgcgtgggcgagcgcggaggggggagaggcgaggcggccggagccgagcgtgagagaggtggaagtcccgcggccttcgtgttcgtcccgc

SEQ ID NO: 19518 - DNA, 2656 bp, Zea Mays
cgcaatctccttcgccgatcgcttcaccgccagcgccagcgcagcattgttcgtagagattcatcctcccagcttcgttaattactatcaatgatgttgctgcatatttctttggcatcttctttgggaaaacaccgctgatcaagctctctccaaagaaaacgtgggaaggctttatagggcctccctgttggggcacgagatcgcccacccgtcgtctacaccagattatttctatcataccatcagatagtggatggacaaccaagtatgatcttatacgagtggagattggcaacaaagatataaagcttgaatacttagtggaggcatttacaacttcaaatgagtaacattccttgatctgaaatgtgtacaataatcctgatgaactactaaaacacttgccttaatctgaaatgagtacaataaaacatatataaggaaactcaaataagtaaagtcttgcttgtccctcacaccataacatgactgatgaactactaaaacacctgcgaggtctgtcagcgtagcctcctcgacaccttctgcttctgctaactccggtgcaaggtacgccgctgccatcccaatccctacccccaggcaagctttgttgattgctttctggttgttgatttctgagctagctatttagaagtcaaaaattgggtgaaatctgattaaccaaactacctggttagaaatcaaattggatgaaatctaattaattttgatatgtgtctcctgagttcaaggatgtcttctacaataattcagccaagaacaagaagcgctaattggaatccaaattgtttgatgtggtgatatgatctggaacttggaccatctttatgctttatggggctaagaagcataagacctgtccgaggcaattgtatctcaacataatcagtttgatgggctccaggagttatatcatcagaaatgtttttttagtatttctatgtaccagcaaaatattgactgaatatttctaaccaggtagatccttgctatacttgacaaactaaaggaggaaagggagcaacaagaaggaaaatatggggaggaagatgtggatggttcatgtatatcagaagaagaagatggtgactgggatgtagatgagccagatgaggaggacatcatttacgtaaaatagcccattgtcttctaggaacttggtcatcattcatccagaacacagcaggttgcgttctgcatacataatattgcctatcaaggtagatttgccagagcagacttcgatcttcttaatctacctgacagtttcttaccatcatttgattttattgatggacatgttaagcctgttctagggagaaagattaactggatgaagacagggatcgttgagagtgatctggttctaacagttagtccacattatgttaaggaactcacttatggcccagataaaggtgttgagttggatggtgtccttcgcacaaagcctcttgaaattggaattgtaaatggcatggatgtttatgaatgggatccttcaacagataagtacaccagcgtgaaatatgatgcaacaacggtaactgaagcaaaggctctcaataaagagaggttgcaagctgaagttggattgcctgtggactcgagcatccctgttatagtttttgtcgggcgtcttgaagaacagaaagggtctgacatactcattgcagccattccagagttcgtgggcgagaatgttcagataatcgttcttggcacgggaaagaagaaaatggaggaggaattaatgcagctggaagtgaaatatccaaacattgctagaggcatagcgaaattcaatgttccattggcacatatgatgtttgctgggtctgacttcattattgtcccaaattcccatctgttcatcacctggaggacttgttgacacggttgaggaggggtgtcaccggattccacatgggttctttcaatgtcgagtgtgaaactgtagacctagctgacgtgacggcagtagcgtcaaccatcacacgggcctagaacagtacggcaccccggcgttccaagaaatggttcagaactgcatggcgcaaaacctatcctggaaggggcctgcgaagaagtgggaggaggtgcttctgggccttggagtcgaggggagtcaagctggcatcgacgacgcagaggagatcgctccacttgccaaggaaaacgtagctactccatgacgcttggtgcctcggaaacacgcgttggtgataggaagcatcttctaggatcctcctggccttgtggctggagtgagttgttcagtcagacacagtttcgcctctacaacatcttcctcctcctggtggtggtccgaactccgaagcaaattccagtgataaaggatgaactaagaggtccatgtttctattgctagaccttttgcctcctaaatagacgatgtactgcgcttgtaacaagaacctcactttcgtgtcaagtaatatcaacaggtttcataatggtagtgaactgcactggaaaaacctgtaaacaatgcaaacaggattcaaaactaaaacaaatctgctattaaaagctgttattcaaaattgaaaaaaacaaaacctgttaattcagtattataactcagcaaacataaataaaaaaaaca

SEQ ID NO: 19519 - DNA, 2305 bp, Zea Mays
gttgcagacagctacagccgtatgtccgtgtgacattctgctcagtcggccaatcctcaccaaattctccatcaaatccaaccaacccctcaccgcctatgccgccgcgggccgcctagggttccggcggccgccgctccctcgccggcgcgatggggaacacctgcatcggtcccagcgccccctcggaccgccacagcttcttcaacaccgtctccctggccgtgctctggcgacccccggccgccgctgaccgcgccgagccttccccgaccgctgaacccagctcatccactccctgctctcccccctccagggcccctaaccctgtcaccatctccgactccgagcacccgccacactccacctccaccgccttaggccccgccgcgccgcccaatcctaacggcaagcccaagcccaagcccaaggtgaagcgcgtgcagagcgccggcctcctcgccggctccgtgctgaagcgcgactccgagcggctcaaggacgtctacaccctgggcaagaagctcgggcaggggcagttcggcaccacctaccagtgcgtcgagaaggcaaccgggaagcacttcgcctgcaagtcaatcgccaagcggaagctcgtcaccgatgaggacgtcgaggacgtgcgccgcgagatccagatcatgcaccacctggccggccaccccaacgtcgtatccatcgtgggagcctacgaggacgctgtagccgtgcacctcgtcatggagctgtgcgctggaggggagctgttcgataggatcatacagcgggggcactactctgagaaagccgccgcacagttggcccgggaggatgcacccttaaaggctattgatttcgggctctccatcttcttcaaaccaggtgaaatattttctgatgtcgttggaagtccttactatgttgcccctgaggttctgaaaaaacgctatggctgtgaggttgatgtgtggagtgccggtgtaataatttatatcttattgagtggggttcctccgttttgggctgaatctgaacaagggatatttaaacaagttctaaaaggtggtcttgatttttcatccgatccctggcccagcatttcggagagtgcaaaggatttggttaggaagatgctaaatcgtgatcccagaaagagattgactgcacatgatgctctatgtcatccttgggtttgtgtagatggagttgctcctgacaaacctctggattctgctgtcttaaccagattgaaacagttttctgcaatgaataaactaaagaagatggcccttagggtcattgctgaaaatttgtctgaagatgaaattgcaggattgaaagagatgttcaaaatgctggacactgacaatagtgggcagatcacgttggaggaactaaaaattggtttgaagagagttggtgctaacttaaaggactcagaaattacaacactaatggaagcggcagatattgataacagtggttccatcgactatggagagttcctagctgcaactttacatctgaacaaagtcgagcgagaagacaacctcttcgcagcattctcatactttgataaagacggcagcggttatattactcatgatgagctacaaaaagcatgtgaggaattcggtatagaagatgcacacctagaagatatcatccatgacgttgatcaggacaatgatggtcggatcgactacaacgagtttgtaacaatgatgcagaagggaaataacccactagggaaaaaggggcactgccagatgagctttggtcttagagaagcattgaagcttggctaagtggcatgatcaatcctgtgtgaagtgccattcggcttcatatgccaactttagctgatgaaactaagtccgtgaatttgggacgccggtaccaaaggtggagcaagtgcgcgatacgattagctttgggataccaactaagcagtgagcatgcaggaacacattggtgatctttcgtcgttaaccccccatgtacatggcttttttgaggtgggataggaatggcggttgtgtttcccatggccattctttgcacgttatgaagctcagctgcaggatgctcttatatagagagaaatgttagtcacatcacatcgcgtgtccatactgtatagcgaaacttaacatgttgtaatatcggtcggacaatgtgtgcgtgttgtatgttatctttcttagatagaggcacaggcttagcgttgtcatatatgtattgcaagaatatgcaggctgtatattaaccaaatgatttttttgtgtacatttcaaaaaaaaaa

SEQ ID NO: 19520 - DNA, 2414 bp, Zea Mays
cttccggaagcgcaaatgataccctccactcctccagcagcgaggcccatccgcccatgccgaacctcccggaagcgcaaatggcactccagcaccagcgaacgagtctgggtctatgtcgaactttctagaagcgcggcgccaaataaataccccactacctcaatcctcgctgcccctctcgattcggaaaacctccaaggctccaaccctagccgcgatccgacaacgcctccatccctagccgactgctgcaagcttcagagctcaagagtcagggcgccatggcgacagagacggagaccttcgcctttcaggctgagatcaaccagctgctctcactcatcatcaacaccttctattccaacaaggagatcttcctccgggagctcatttccaactcttccgatgcgttggacaaaatcaggttcgagagcctcactgacaagagcaagctcgatgcgcagccggagctgttcatccacattgtaccagacaaggcttcgaacacgctctccatcatcgacagcggcatcggcatgaccaagtccgaccttgtcaacaacctcggtaccatcgccagttcggtgtcggtttctactctgcctacctcgtcgccgagagggtcgtcgtgaccaccaagcataacgatgacgagcagtacgtgtgggaatcccaggcgggcgggtcgttcactgttactcgtgacacgtctggggagcagcttggcaggggtactaagattacacttttcctcaaggaagatcagttagaataccttgaggagcgtcgcctcaaggatttggtcaagaagcactctgagttcatcagctaccccatctccctgtggaccgaaaagacaacggagaaggagatttctgatgatgaagatgaggaagagaagaaagacgctgaggagggaaaggttgaggatgttgacgaggagaaggaagagaaagaaaaaaagaaaaagaagatcaaggaggtttctcacgagtggtcattgatcaacaagcagaagcccatctggatgaggaagccagaagagatcacaaaggaagaatatgctgccttctacaaaagcttgacaaatgactgggaggagcatctggctgtgaagcacttctctgtggagggtcagctggagttcaaggctgttctctttgttcctaagagggccccatttgatctcttcgacacaaggaagaagcaaaacaacatcaagctctatgtgcgcagggtgtttatcatggacaactgtgaggaactgatccctgagtggctgagttttgttaagggtattgttgactctgaggaccttcccctcaatatctcccgtgagactcttcagcagaacaagatcctgaaggtgatccggaagaaccttgtgaagaagtgtgttgagctcttctttgagattgctgaaaacaaggaggactacaacaagttttatgaggctttctccaagaacctcaagcttggcatccatgaggactcgcagaacaggggcaagattgctgagcttctgagataccactccacgaagagcggtgatgagctgaccagcctcaaggattatgtgacgaggatgaaggagggacagaacgacatctactatatcactggtgagagcaagaaggcagtggagaactcccctttcctggagaagctgaagaagaggggctacgaggtcctgtacatggttgatgccattgatgagtatgctgttggtcagctcaaggatttgagggtctgtgcaagatcatcaaggaggttctgggcgacaaggttgagaaggttgtggtgtctgaccgtgttcaaaaagactatggaaatcaacccggagaacccaatcatggatgagctccgtaagcgcgccgaggctgacaagaatgacaagtcagtcaaggatcttgtgatgttgctgttcgagacagctctcctgacctccggcttcagcctggatgaccccaacacctttggcacccggatccatcgcatgctaaagctcggtctgagcatcgatgaggacaagtctgctgaggccgaagctgagatgcctccgctggaggatgacgccggcgaaagcaagatggaggaggtcgactaagcttcggatcactgtcgtttatccctaattacatatgataagctaaatcttgactactgtttgaggttttccgcacgttaacggttctcctgccggccaggcaatgagtttgctgtagctatatggtactctgttttacagtttgttcttgttatctgtaatcctactagtatagtacatgttctacatgtcgttttgcctgagttccggtgtttggtttcattagtccgtgtcacatcatcgtaatgtttgaatgtcaatttgagtatttaatagtctaaagaataaacaactacacaaaaaa

SEQ ID NO: 19521 - DNA, 593 bp, Zea Mays
caaaaaaggcctattatgttatgttgacgtgaccctcatgacatctctgcttcggccgagttccatgttcgtggaggacctggtgctccagcaaccctacaccaaggaaaggtacggctcggcgcgcaaggtctacgtcgtgtgcacggaggaccacgccatcgcggaggggttccagcgctggatggtggagaacagccccgtggacgaggtcagggagatcgtggcggaccacctcgtgatgctctccaggcccagcgacctggtgcgctgcctcgctgacatcgccgacaagtacgcttgacgacgctacgctcttcagcgcaattcgcccgcgtgctgttctcattttgccgcatttcagtttaatatttccccgctgtttccgaatcgagattggccagaattctcgacgcacggtgtgaaatcgtgtataataataataataatgctattgatgttttctaatatatagcaggtattttgtaacacttggttttaaggataaaactgaatccattagtacgtgtgctcaaaatgcttactcatacgtacataaagcatacttggacttccggcattaagcaaatctg

SEQ ID NO: 19522 - DNA, 4050 bp, Zea Mays
ctcgccgagagcccgaaacagtccaatcccaacacggcgacgacgccagcggaaatcgcatcgccctcttcctctttccctcgctgtgcaatctcccccaaactcccctctcgaaccctcgctctcgtcgccagagcaagcaaagcgcagttgctgaaacccgtgcgctgttgatggatgatgaccgttcccatggatagtgctagcgcagccccgtcctctgcgcgggactttgctgagcgtctccttactaggaataatgaacttgaagatcagcttcgcaagtccgcacaatccaaagtcccatcagatcccagcatatggcttcagatgcgtgacaactttgagaagattattctcatagatcatgacctatctgaacagaaagaggtagagtatctcctatggaagttgcattacaaaagaattgaggacttcaggaggagcattagtgctgcaagctcagctgcatctcagagtgggaagagcaacgctaatccagatcgagtcaagagaattaaattaaccttcaaaagcttcctttcagaagcaactggcttctatcacgacttgatgttaaagatcaaatcaaatttgggccttccactcagttactttccagagggcatcgacaatgcaaacaactctgcgcgagatgacaagacaacagtgcagttgaagaaaggtttgatttcatgccatcgctgcctgatatatttgggagatcttgctcgttacaagagctcgcaaggtgatggtgattctgctagccgtgaatacgcagcggcatctagttactacatggaggctgcttctatctatccttccagtggcaaccctcatcatcagcttgctatactagcatcttactcaggcaacgaggtggtagctgtttataggtacttccgaagcttagctgcagatactccttttaccactgcacgtgacaacttgattattctttttgaaaagaatcgccaaagctatagacagctgccagacaacaacaaagttcccagcgctaaggcattacccccacggctatctgggaggggacaaggacggggagaagtaaagtttcagccaaaagatgttaacgcagaagcagctgaaagggaacaggagtgcaatgttcgtgatacattgaaggccttctatatacgatttgtcaggctcactggaattcttttcacgaggaccagtttggaaacatttggggagctgttttcttcagttagcaatgatttgcagattcttctttcttccggtcttgaggaggaccttaatttcggttctgatgctgcagaaaatgcattagctgctgttaggcttactatcatccttatattcacagtgcacaatgtaaataaagaacctgatagccagtcatattctgaacttgtgcaacgcagagtactgctccaaagtgcgtttacggctgcttttgattttgttggacgaattctcagaaggtgttcagaacttggtgatatcacatcaagcttctatctgccagccattctggtctacatcgaatggctggcgtcccatccagagttggctattgactcagagatggaggaacagcatgcaaatgccagatctttcttctggaaccaatgtatctcatttatgaataagttgatccttaccaaccttgcttctatggaggacaatgacgatgaggcttgcttttctaatatgagcatttatgaggagggtgaaactgggaacaggcttgccatttgggaagatcttgaattgagaggttttttgcccttggttcctgcacataccattttggatttctcaagcaaacacacatttggaaatgttggaagcaccaaggagaagaaagcacgggttcaacgaatttttgctgcaggaaagtcactgctgaactttgttcagattgatcagttgaggatatattttgatccatctttgaaaaagtttgtcttggccaagaactctcctgtttctagaactaacacccctcttcatgaatctcctgatgcacttaaaacaaatgggactgaaatggatcacaaggctgctagaagatttgattcagtttcttctaatgtgggctcactgcagtctaaagtgcagttttgtcctgatggtgatgatgaagaagaaattgttttcaagccaacagcttatgagaagttttcaaaagtttcttcagatctgtcagttaatggatacgtccatcctgtaccagtgtctgctgctggtgggccaaccaatgctagtttagtgcctgttcagaacactgcatcaatgtctgcaactcgtttaccatccaatccacatgcaactggtttgccatccaatggtgggtcacttccaagtactgcatctctatcagctgctggtaattacaacactgatcagtcgcttcccaggtcgtctgttggttggactgattgggctgtcaatagtgagcaaaatgttactcctagcattgctccaagatttgaactcatgcagtctgttgaggagcctgtttccagctggacaagcagtggggcacagcatgttggtcctcagcacaagcacacaggtttaactttcccagatgttgtctctgaaccatgtgtatctgcatcaatggttcaatgttttagtagctccgattattcgaaatttctcagagaacaagaaatattcttaatgaatggactgaagactgtcaacataactggaaatggctatctagagcagagattgcagcctggattgagtggtttacagtctatgggttattcatctcagatacctattcaacctggtggtaccactgcaaacctgatgcataatcatgtcaaaattactggagagactgtcccctctacacttgattcagttgtaccttcaatagcaccatcaggtggcatgccaatcaaacttacagaagcaccactaactgcttcgaagaagaaccctgttagtcgtccatcaaagcctgttggaccacctccaggatttaatcatgtaaccccaaagcgtcaagatgattctattccggttgaaaaactgcagaacccacaggtcgatgattacagctggctagatagctatcagcaatcgattgatcatgttcacagcttaagaactatttatcctggtgtcagtgatactagcactgcatttgccactccattctctttccctgggaggatacacacacaagggaccaatgaaaagacttggcaagatttccacctttttgagccttcaaaacagaacatgttccaaacttaccaccaaagaaatctgcaaagtggtcaaatggatgaacaagagccagcaaattctatctggtctagcagttaccatgtgtgatttggtaacttttaccaggatgattgctggagtttctggggacagactattggattaagtggcacgacctgatctattgagcttagcccatacctgcagcacttagtgttaaatttcttttgagaatggtagtctttcaagcatgacaatggctgctgttaagtttgggagtgccgccatcttttgggccaaagatggggtagaggatgattgatctgtcggcagtctgatggcgatgaattaatacgaggtcttcaatgctgacagaaagggttaatgaaacaaacttgaatccagtgattataggcactccgcacggaccacatattgctaccacaagaagcggacggttgctgccgcaactaaaacatgccgtgtggatgtcagttttcagttggcctatgccatccagagagtaaaaagtgaggatcaacgagcatgttgccgagtagtttctcaagtataaattactgcgtctacttgctccttcgctttgggaacaatgtatcaggttgtaagttgcaattaaatgtttggaacagtttgtcatggtaattgtgtggctcctatatggctatattgttctctgtaattgtatggaccaaccctaagtgttacatacaaacatctttgatttgactcaatatcttgttcttcatccgtttttaaattataagaaattataagttctgttttctt

SEQ ID NO: 19523 - DNA, 451 bp, Zea Mays
ctgaagcacctttaaataccaagtactctttatgtgcttgcaggtacattttgaaggtgacaattggcagaaactatgttggcaatattgtggaatatcgggatttctgtgtgagaaactactcacctgtccctacaatcaataacagcattaagatggaagtaggaattgaggattgcttacatattgagtttgaatacagcaaaagcaagtaccatctcaatgatgtgattattgggaagatatatttccttcttgtcagaataaagataaaaaatatggaactggaaattaggcgtagggaatcaacaggatcaggctctaacacatatgttgaaactgagactcttgcaaagtttgagttgatggatggtgctcctgtgagagtttgaagcctgaatctggtgctggtgttgcttacctgccttttcacattggaaccatttggttg

SEQ ID NO: 19524 - DNA, 3921 bp, Zea Mays
agtttatgaaaggatgtgcagaatttcacaatgatactgaaggtcaaaatttagttctttcggcaaagcactcacttataaattgtgcaaatgacattccttcagagatatcacagatgcatcctggtgttgtagttcatgttacatctgcaacattattgaagctggttgttttgtccgtttcctcggacatttgactggtttctctcccaaggacaaagcagttgataggtggatagaaaagctttctgatgcgttctatgttggccagtcagttcggagtcatatactcagcgtaaatgcagaaactgctagagtaaaactcgcacttcaacagtcaatgtgctcctcaatggattcttcatttattcagggatactttcttctggatcagaagattgcagcattgaagtactcaagcaatgactgggctcgccattttggcattggtagcttagttgaggcggaggtgggagctatagaagaatatggtattatccttaacttcaaagaccatctggatactgttggtttaatcgagcaccatcaacttggtggcagtagtgtggaagtgggatcttctgtgaagggtcttgttttggatttatctgatggagttgttaacttgtccgtcaaaccagagctaattgacagtgtcagaattgttggaaaaaagaagaaacgccaaagggccgtagttgcagacttggagcttcatgaggaagtgaatgcagtcgtggaaataatcaaagacagctatatggtcctttccatccctgagtacaattatgcaattgggttttcaccactgatggattataactcacaactgcttccccaccaccactatgataatggacaacgcattactgtggttgttggaaatatcccaagttctgactcttctggaagacttatcttactaccaaaagcttcagcacagtattcttccctctctgattctaaaagggctaagaagaaatcaggctacaaaattgggtcacttgttgaagcagagattattgatatcaaaccgcttgagcttctactgaaatttggtggcaatcttcatggaagaatccatattactgagattcttgaagaggattctgctgagcatccctttagtgaactcagaatagggcaaaagcttactgccagaattgtttcagaggctgaaccttctggaaagagtggcaaaaaattcaaatgggaattgtctattaggccatgtatagtcaatggagagtttgctcaaaaagaacaaaatcacaccacaaatgggattgtacgtgcttatgttgtcaaggtggataaggaatgggtctggttaactgtatcaagaaatgttatggctcatttatttttacttgatagttcttccgagcccagcgaactgaaagaattccagcagcgctttagtgttggccaagcagtgaaaggtcgtgttatcagtgtgaaccaggagaaaaggttacttcggttgaaggcacttgataaccaatgcacacaaccgaatatagatgaaacacaagaaccaaagtcctctgtgtttggacaaacaaaacaaggagatatcattggtggacgtgttcaaaaaattctacctggtgttggtgggctcgtcgttcagattggacctcatctccatgggagggttcattatactgaaattgttgactcttgggtgtctgaacccttgtctggattccatgagggccagtttgtgaagtgcaaggtcctgtctgtgagccgctcatcagaaggatcacttcgagttgatctatcactccgttcatcaaacctgatcagagactctaacaactcaagactagatgatctggaaacctgtacctcccggattgagaagatcaaggatctgctccctggaactgagattaagggctatgtgaagaacgtgaattccaaaggatgttttattatgctttctcgaatggttgatgctaggattactctatcaaatttatcagatgaatatgttgaaaatccacagaaggatttccccgttggaatgcttgtacacggaaggatcctgtctacagacccatcatcagggagagttgaggcatcacttaggaagaccactggttcaaaattggaaaagctggatgatattagttatagtgacttgcatgttggggatatcgttgatggccaagttaagcgggtggaatcctttggattattcgttacaattcggagaagtgaattggttggtctgtgccatgtatcagaactttctgatgaacctgtcgttgatattaactcttgctataaagctggtgatatggttaaagccaaaattctgaagattgatgagacgcggcatcgagtatcacttggaatgaagaagtcatactttgattctgatctgactgctgacacaaatgatgatgaaagtgctcttatggacatcagcgttgcccctcagatggttgaatatcataacagaaatttagttcaccgcaaagcagaaccaagggcttctgttctgcctcttcaggtttccttggatgaatcggaaggttccgacctagaggataatattagtaatacatgtcttgaaattgctaatggaactgaagcaaatgctaaaaagagtgataaacagttaaagaaggaagcaagaaaacaaagggaactagaaatcagtgctatggaggaaagggctttgcaggaagatataccacaaactccagatgattttgagaagttagttaggagctccccaaatagtagttttatctggataaagtatatggcaactttgttagatcttgcagatgttgagaaagcacgtgcagtagctgagagggctttaaaaacaataatccccagagaagaagaagagaaactaaatgtttgggtagcatatttcaatctggaaaatgaatacggtagtccaagggaggatgctgtgaaaaaggtattccaaagagccttgcaatattgtgatcccaaaaagctgcacttggctcttcttgcgatgtacgagaggaccgaacagtatgagcttgcagatgaacttctagacagaatgaccaaaaggttcaaaacttcctgcaagatatggttatgccgcattcagtttgctctcaagcaaggcaaggatgttgagtacatcaaagccattgtaaaccgtgcacttctaagtttgccacacagaaagcgcataaaattcctctcacaaactgctattctagaattcaaatgtggggtgcctgaagaaggaagatccagatttgaactaatattgcgggagtacccaaaaagaacagacctttggagtgtttatctagaccaagaaatccgccttggtgacgtagaagttatacgggcattgtttgagagggtgacttgtctgaccctacctccaaaaaagatgcagttcttgttcaagaagtatcttaatttcgagaagtcactgggtaaagacaacgaaagaattcagcttgtgcaacagaaggcaatcgaatatgttcagagttcactgccgtcacaagacaactcttgaactacatggagacttaataagcccacaaacaatcattaggaaataccagtcgtactgtagatgtgatctctttgatgactccttgaacattattgtgaaaaggtcaatgtaaaatgtgggctgttcaaaattttgtttgaaacctttatataagttatgagtctagtatgtcatgtttcacccaattttttggaaggaactattctaagccggatctggttcgaatattgaccttttctatctgtggtattgactgatgaggcacaattgaatgggtaactgtctgtgctactctgtcacacccgggtttcggacaccaagacacgggcgcgaacataatcacctggtgttgctgggatcaggtcttacacatatgatgaatcatg

SEQ ID NO: 19525 - DNA, 2217 bp, Zea Mays
ctcaaattgacgaagctcctggtgtatcccaaatccttagatccctgaagcattacaggctggattccctaatgtgattgaagcagcacatcatcctgttgttacactctcctggtctataataaatttttccaggcagtgtttagatccaggaattagggcaaaatacttcagtccacgactaatggagacactgacatgccagaagctacttgctacagtcgttcgccggaaacacacatgcacttatcttgttcaactggattcatggcgtgatcttacaagagcttttgcaagtggacggtctttgctttcattgagtggacgtttacaaaggtctctagcagaaacacttgcctctgcagcttcctgcatcaaagatcctgaagcatctgcacagtacctgagggatctcatgggaccagtggcagggtgcctggtagaaaatgctagcaggagtgatctaaaatctgtggcacagcaagcagatgttatttacatggtctgttgcctattggaacgactaagaggcgctgctagagctactcaaccccgaactcaaaaagttctatttgagatggctcatactgtgatgaacccacttttgactcttctggaggtctacaaaaatcattccacagtcgtatacatgatactcaagtttgtggtggactttgttgatggtcaagctgtattcctggatgctaaagagacatcagctttggtgagcttttgcttgcaactactccagatatactcctctcataacattgggaaggtaatgctctctctttcttcaagtctgcgtaatgagtcacaagcagaaaaatataaggatctgcgagctttgcttcgtcttctgacaaatatatgttcgaaggatttggttggctttctgtctgattgtggcggtgaaggttcacctgatatcgcagaggttatctacattggtcttgatattgtgacccccttgatatctttggatcttctgaaataccctaaacttagtcgtgattattttgtgcttatatcgcacttgttggaactgtacccggaaaaggttgctcacttaaatagtgatgcttttacaaggattattggaagtcttgacttcgggctccgtaatcaggatagcgatgttgttgagaggtgcctggcagcagtaaatgctcttgcttcatacaatttcaaagaaagattaggagggagaggaagactgaactcgcagctcatggaatctgaaggatctaatggcaaactgcaggaaagcatatcaagtcacttcttgagacttctgttgcaaatacttctttttgaagatttcagatcggagttagcaggttatgctgccgatgctttgcttcctttattgttctgtgaacaggagctatatcagaggttggtccatgagttgttggataaacagcagaatccgaccgtaaaatcaaggctggcaactgcgttccataaccttacaagttcaaacaatctctcaagctcactcgaccggccaaacaggcagagattcaggaaaaacctccttagcttcatggcggatgtatcgggcttcatgcagatcaagtagatgcgatggcagggaacaggtgatgtttgaccggtcaattaaaccccgaggaagcactgcaccactgtggtaggggtgcatgtgggcaccacatgtctgtggattgatgagagcgaagactgccacgacaagtctagtagatcttgaagagctagtgtcaccagaaaagacagggagatgagctagtcttagggttggcattcatagcgcatttgctggacaagatggaggcgtccctggccacgagatcgtcgtgtaaatgcgtttgttagacgcacagaaacggtggggattttgtggtggcgactcgttttgttcaattcccacaggcagaaggtagagatgttaagttgatgtaaataccgtttgatttaaacatgccttattcgtaggagaaagcgacacggcttgctgtaacttagggtttattactctttctcgtggcataggatccccaaagaagtctttgctggggtatttgcagccaaacgatgaccagtatgattgcgagaggttttcaatcttttgtaccaaatttggcctgcagttatgatgacactgagtgccgatacaggcatgaggcattccaaaattggcgggcaccacatgtgtctgtctgctgtctcagtggg

SEQ ID NO: 19526 - DNA, 559 bp, Zea Mays
gcaacgcacgggcactgacctaccaccttcctccgctcgccgtgcttctgcttcctccgccaccaccgccggcatggctgcgcgctgcccctacttcgccgtcgaggagtcctcccgcggcatccgctcgggggagtccccggccgcggcgctccgccggatcctcgcgacgcctggtgcgcaccaggcgccctgctgctacgacgcgctcggcgcgcgcctcgtcgagcgcgcggggtttccgatcgggttcatgggcggtttctgtgtttctgccgcgcgacttggcttgcctgatgttggcctcatttcctatggagaaatggtagatcaagggcgtctcatcaatgaagctgtttcaatcccagtgattggtgatggagacaatggttacggaaactctatgaatatcaagagaaccataaaaggatatatcaatgctggttttgctggaattatgcttgaggatcaggtggcaaagaagactgcaaagcgagctgtgagtgaggcaaagggtcgagcctatgatgatctttaccgaagactaagtacaaaggaa

SEQ ID NO: 19527 - DNA, 243 bp, Zea Mays
tatccaagttaccatccaaaaatccatgccccattcttcgctcaataataaaaaagaaacaaaaacgccgatggtaacccaaccccataacctagacattttagcatcagtaaaaataaattacaatcctaatacatgttgaaaaaaagtaattgtatcgtacgaacaaactatggcaccattttagctcacccgataatacactgagaaaataagcataacaagcacgatcgatcttacagg

SEQ ID NO: 19528 - DNA, 203 bp, Zea Mays
aagctccttaatgcgattctgatcagcttggtgttgcgtctgaagttctgttacctgatgctttagtccaataacctgctctgcttgaacctttatttcctccagtcgttcttgtgcctgggtacaagccctattcttggccgtttccatcatcttaaatgctgcataactcccagtgtacaactgctgccacttttgacgac

SEQ ID NO: 19529 - DNA, 2365 bp, Zea Mays
gccccacaccgcttcactcgtttccttccgatccatacacaccgcgcacgtacgcgtactccatcgtcccggtgcaggcgggttcacgtcacgacctcgggcgagacgagatggcgacgccgaacgggcttgctcggatcgagacgaacggggcgaccaagcccgacaacggcgtgtgccacgacgacagctcggcgccggtgcgcgcgcagaccatcgacgagctgcactcgctgcagcggaagcggtcggcgccaaccacgcccatcaaggacggcgccgcctcgaccttcgccgccgcgctctccgaggaggagcgccacaggcagcagctgcagtccatcagcgcgtcgttggcgtctctgacacgtgaaaccgggccgaaagtggtcaagggcgacccggcccggaggggcgaggcccccgcgacgggtgcaccgccgacgccgcaggcgcaccaccagcaccaccaccccgccgcccccaccatcgccgtcagcgacagctccctcaagttcacccatgtcctctacaacctctcgcctgctggccatcaagtacgagaaggggtcgttcatcacgtccaccggcgcgctggcgacgctgtccggcgccaagaccgggcggtcgcccagggacaagcgcgtcgtcaaggacgaggtcgcggcgcgggacctgtggtggggcaagggctcgcccaacatcgagatggacgagcacacgttcctgaccaacagggagagggccgtggactacctcaactccctggacaaggtgttcgtgaacgaccagtttctcaactgggaccccgagaaccggatcaaggtccgcatcatctccgccagggcgtaccactccctcttcatgcacaacatgtgcatccggcccacggacgaggagctggagagcttcggcacgccggacttcaccatctacaacgccggccagttcccctgtaaccgctacacgcactacatgacgtcgtccaccagcgtagacatcaacctcgccaggagggagatggtgatcctgggcacgcagtacgccggcgagatgaagaaggggctgttcggcgtcatgcactacctcatgcccaagcgcggcatcctctcgctgcactccggctgcaatatgggcaaggacggcgacgtcgccctcttctttggcctctcaggtaccgggaagacgacgctgtcgacggatcacaacaggcttctgatcggcgacgacgagcactgctggagcgagaatggcgtgtccaacatcgagggcggctgctatgccaagtgcatagacctatcgcaggagaaagagcctgatatctggaacgccatcaagttcggagccgtgctggagaacgttgtcttcgatgagcatactcgtgaagttgactacaccgacaaatctgtcaccgagaacactcgggctgcctacccgatcgagtacatccccaacgccaagataccatgcgtcggtccacaccccaagaacgtgatcctgctggcgtgcgacgccttcggcgtgctcccgccggtgagcaagctggacctggcgcagaccatgtaccacttcatcagcggatacaccgccctggtcgccggcacggaggacggcatcaaggagccacaggccaccttctccgcctgcttcggcgcggccttcatcatgctccacccgaccaagtacgccgccatgctcgccgagaagatgcagaagtacggcgccacagggtggctcgtcaacaccggctggtctggcggcaggtacggtgtgggcaagaggatccggcttccctacaccaggaagatcatcgacgccatccactccggcgagcttctcaccgccaactaccagaagaccgaggtctttggcctggagatcccgactgagatcaagggcgtgccgtcggaaatcctcgacccaatcaacacctggacggacaaggccgcgtacaaggagacgctcctgaggcttgccgggctcttcaagaagaacttcgaggtgttcgccagctacaagatcggggacgacagcaacctgaccgacgagatcctcgccgcaggccccaacttctgaactaaagcagtgggtccggatgaataaaacggtggtatgcgtgtgaagaagaagatgatgacgacgaaaatagtgtgttggatcgatgggccagcacagtgtagactagcttttgtatattatctcgggttggaaatctggtgttgttacctaaaatgttggtctgttctatcggcttgttgaaaacagtttgcgcgtgcttgcatcttggcccccctgtattctctgtggtttcagaatttgaacacgaaacagcttggtctcgggatcatgttggtttcatatgtca

SEQ ID NO: 19530 - DNA, 1315 bp, Zea Mays
ttttcttcccgaggcaatttcgagctggcaataatagttctaaccttgaacaaggagccaagtcttggagtcaatattttatgctgccatgcacatttcatataagtactgtcataaccgaactaaaacagtttctgagaggaagcatcgcgattgccatggaagctgggagaatggatcagccatttatggctgctatcaatagccagcctttcgtggaggatattgagccagtgaagaaagccagtggggacatgcctgcgacaacaggaagcggatgcttcgaatgcaacatctgccttgattttgcatcagaaccagtggttactttctgtggtcatctctactgctggccttgtatctacgagtggctgcgccctggggtggagtcagctgccagcgacaacagcagttcggcaaggcggcaatgtcctgtatgcaaggcaacactctcaacggacacccttgtgccactatacggccgtggaggcaactcaaagaagtcacttgatggcatggccatcccgcgccgccccatggtacaccgggagactgttgaggagcaacagaatgcacagagcaatgtcaatgaccagcactaccaccagagcatggaagacaactctcagcgccagccattgctgcaagcgcaccaccatcccattcccactgggtttgacttcatctaccctccagcaccagtagggcgtggcttgatccactcaactgccggaggggtgctcggagggatggcagagattgtgcttcccttggcgctccgtggccagatgccagcgagcttgtactacacgaatccataccatgctgcgacgcagaacgtgaaccccaggctgaggcggcatcagatggaaatcgagaggtccctgcaccagatctggttcttcctctgtgtgtttgtggtgctgtgcctgctcttgttctgagacaagactattctatacacctctttgtagatattgaaagtgggagggggatactaatggatgatgcgtatagtaaacagggtaatggtctgtgtcgacaggcatgtgcttaagcatgctgatgtagagttgtaatatgatgagacacggaggtgaaatgcatatttcattcttctctatcactgtcggcctgttaggttgcctacctgacatcttcatgttaggtttagcatcatctgttgtgtattggttggtgtcactgccaagggccttttgatttgtatataaatagaaaatgatggtttgtctaccaatttctgctctgtatcctctttaatccctgttccaagattgacacagcaattttgtcc

SEQ ID NO: 19531 - DNA, 2159 bp, Zea Mays
tgaaattgaataaaaagggatggcagccaaaagggattatcctcttcaacctcctgggtaactaaaaattccccggcatctcgtgctgtcttctctctctcctttccccttccccggctccccgcggcccgcaccgctgtgttgtgctggttggttccgtcgcgtcgcttgcttagatcagatctctccttctctccccggatcccgactgcctccctcccccttccacctcaggctagccgagagagatctcggcaccgccgcccgttgccatggcggcggccaacgcccccatcgccatgcgcgaggcgctcacgctcacgagcctgggcatcgcgccgcagttcgtcaccttcacccacgtcaccatggagtcggagaagtacatctgcgtccgcgagacctccccgcagaacagcgtcgtcatcatcgacatggccatgcccatgcagccgctccgacggcccatcaccgccgactccgccctcatgaaccccaacaccaggatcctcgccctcaaagcccaaatacctggaacaacacaggatcacctccaaatattcaacatcgaggctaagactaaggtcaagtcccaccagatgccggagcaggttgtattctggaaatggatcactcccaaattgttgggtttagtgacacaaacatctgtttaccactggtcgattgaaggtgattctgagcccttgaagatgtttgataggacagctaatctggcaaacaatcagatcatcaactatcgatgtgacccagcggagaagtggcttgtacttattggaattgcacctggagccccagagaggccacaactggtgaagggaaatatgcaacttttttctgtcgatcaacagcgtagccaggcacttgaagcccacgcagcatcttttgcaacatttaaggttgttggtaatgagaatccatcaactcttatttgtttcgcctcaaagacaactaatgctggacagatcacttcaaagttgcatgttattgaactgggtgcacagccagggaaacctggtttttctaagaaacaagccgacctcttcttccccccagatttccaggatgattttcctgtagctatgcaggtttcacaaaagtatgggcttatctatgtaattactaagcttggccttttgtttgtatatgacttggaaactgccgcggcagtttacagaaatagaatcagtccagaccctatattcttgacggcggaatcttcctctactggtggattttatgccatcaacagaagagggcaggttttacatgccacattaaacaaccttgagcttgctgtgaatctggccaagagagctaaccttccaggcgctgagaacttggttgtgcaaagattccaggaactgtttgcacagacaaaatacaaggaagcagctgagcttgccgcagaatctccccagggtctcctgaggacgcctgagactgtggcaaaatttcagagtgttcctgtgcaagctgggcaaacgcccccactcttgcagtactttggcacattgcttactcgagggaagctcaatgcctttgagtctcttgagctatctcgacttgtcgtcaatcagaacaaaaagaatcttcttgaaaactggttggcagaagataagctggagtgtagcgaagaactaggagaccttgtcaagactgtggacaatgatcttgcactgaaaatatacataaaggctagggcaacccctaaagttgttgctgcttttgctgaaaggagggagtttgacaagatactgatatactcaaagcaggttgggtacactccagattatctcttcctcctccagaccatcttgcgtacagatccacagggagctgtgaactttgctcttatgatgtcacaaatggagggaggctgcccagtagattataatacaataactgatcttttccttcagagaaatatgatacgggaggcaacagcttttctgttggatgttctgaaaccaaacttgccagagcatgcttttcttcaaaccaaggttttggagataaacttagtgacttacccgaatgttgctgatgccattcttgctaatggtatgttcagtcattatgatcgccctcgtattgctcagctgtgtgaaaaggctgggttgtacttgcgagccctccag

SEQ ID NO: 19532 - DNA, 1466 bp, Zea Mays
gaacgaccacgttctgctcacggcacccgaccaaacaggcaaacactgaaacactagtaccacagtagcagcgaggagcaaacagcaaagcacgctctggagaaatccctcgtctaccttcaccagttgaccgcactagtggccgtcgtccgaccacgatgagcacccgcgcggcaggatccgccctcctccgccacctgggtccgcgcgtcttcggcccagttttttctccggcggcggaggcggtggaggccgctaaggagggtgacggaaagagagacaaagtggtgagcagctactggggcgtcgcgccgtcgaagctgatgaacaaggacggcgccgagtggaggtggtcttgcttcaggccatgggaggcgtacaagccggacaccacgatcgatctcaacagacaccacgaacccaaggtgctgctcgacaagatcgcctattggaccgtcaaattactgcgcgtgcccaccgacatattcttccagaggaggtacggctgccgtgctatgatgctggaaacagtggcggcggtgccggggatggtgggcggcatgctgcttcacctgcgctcgctccgccgcttcgagcacagcggcggctggatccgggcgctgctggaggaggcggagaatgaacgcatgcacctcatgaccttcatggaggtggccaagcccaagtggtacgagcgcgcgcttgtcctcgccgtgcagggcgtcttcttcaacgcctacttcctcggctacctcatctcccccaagttcgcgcaccgtgtcgttgggtacctcgaggaggaggccatccactcatataccgaatacctcaaggacctcgaggccggcaagatcgagaacgtccccgcgccggccattgccatcgactactggcagctcccagctgatgcgacgctcaaggatgtggttgtcgtggtgcgctccgacgaggcgcaccaccgcgacgtcaatcactttgcgtcggacatacatttccagggtatgcagctcaaggagacacctgcaccgattgagtaccattgaacaatcggggtcctgtgacgcttgagagttccagttcattttggctagctgtaggtagctaaagatgcttgagaaataaaaagaaaatgcctggctgctatgagtagcaaagatctcgtgggttgatcctaaaatcttttacgtgagtgtttgtaagtagagatacagacattgatacgtgcactgaatcttgtccagaacataccatcgacttggttggttccacagagaaaactttatatccgattgtaacagagtttttttttcctgaaaaggagcaacgaaggagccgcgcgtcgtcgattatctatgccactttgtaacccacccatttagaacttgttcggttaggagtgaattgatgaagatttctctttctatttaattttctcatccggtttgggtaaaaccgaacatgtcttt

SEQ ID NO: 19533 - DNA, 2394 bp, Zea Mays
ctctctctctctctctctctctctctctctctctctctctctctctctctctctctctcgctctctctctctcgctctctctctctctctctctctctctcccccccccccgggctaagtccatttggcttctcctccgtgtcggacgcccgctggtcgctgactcgtgttgctgttggggcggcgtcgacgctgcaaagttattgctgctggcattgcggcgcggtaagaggagaggagcgaggagggatcggcggagaatgaagatgaaggcgctggcgtgctgccggcggcggccccaggacttgagcatcgacatggaccaagagcccgacagggtgatgacatataatggcctggagacctgcattatcaactgttccgcctatgacgatgatagtggcatcagtgcaacaacatgcggagatggctgtgtcaccgctgattcccttgatgatgaagtctctagctgctttagtaaagatgcttctggttcttccttctcttcacactgccttagcaagcaggaggagcattcgctagatgagttgggtacacccatcgcaattcatctactccctttcaaagcgaagaaaccaatcacatataccttgagtgcttcagatattgaaaacatgaagaaaaaatttgcgaagcttttgctcggttatgatacttcaggaggcgctaggggcgtttgtgcggctctggccttgtctaatggcataatcaatctctctgctactgtttttggagaactctggaagctggaaccattgtgcgaagataaaaagatcaggtggagaaaagaaatggactggttgatgtctcctacaacttatatagtggagctggttccaaggaaacaaagcggagcagatggatgcacatttgagattatgactccaaaggcccgctcagatgttcatgtgaaccttcctgcccttcagaagcttgatacgatgctcattgaagtaatggactctatgatagatacagagttctggtatgaggagagtggtagcagagctgatggtccggtgaaaattaccggcccaaggaagagtaaaaagtggtggctcccatctcctcgtgtccctgagcaagggctatctcgatttcagcggaaaaggcttgtttttcaggctaagcttgttcaccagatcctcaaagccgcaaaatccatcaacgaacaagtcctgttccacatgcctattccggcagctgttatggatgcccttccaaagtctgggagagctagcttgggtgaagatttgtaccaggctataacgaccgagtatattcccatagaggaaatatttgtttccctcagtttgaaaactgagcatagtgtgctcgagactatgaaccagttggagggggcaatgtttgcatggaaccaaagaatcttagaggagcgaagcaagaggtcaccgggacgtcattcctggagcttcatgaaggacagctcgtcagaactcgacaagatgtctgcatgcatcgaaagggtcgacacccttgtgcagcttctgaaagccagatatccgaacctgcctccaacttttatagatgttctaaaggtccagtacaatgtggatgtggggaatgcaatcgtggaggcatactctagggttcttgtcggggtagcattcagcatactgtcgcgcgtggcggagatactgctggaggatgacctggtcaagaggcccaacacccccatggcctcactgaagttcgacctctcctccgacgtgtacttggccggcataacagagacgccgccgggacacgtccggaggtcccttatggatcagatcagcatggtcgacgggcgcttcaacgctgctgtgaagaagaaaggagcgaagcagctgaggtggtgaggacagtcggctgttgtgtgaaatcttttggccatgtacagggtgggtgatgcagagcccagtgtccgctccacaaggacacaaggcaaggttaccatagcaatagcgccagtgtaatgtatttggcaacgagtttatagcttactgtaagagcaagcattaggcgaatcctgcctgtcgaagtctccggatgttgctgttccgtctgaacatctgatgctcttggtcagcctctgctgcatttcttgctggcacctgatgatagcatgtctatggcgagggaccttgcttgagtgcttgacgggttcatgctgacgcgtcttccgctctggaagcagtccgcgtgtggacgcttgtggaattgagactttagagaagagaacgaattccgaagtcagattgggagccagtcgggtgcaaaagggaaggaaatgcactcggcccaacaaatcttccccgcacggtcattcgacggaaggcgacagagcttcaggacaacacaagatgaccg

SEQ ID NO: 19534 - DNA, 1667 bp, Zea Mays
cgatttcgcccccagcaaggcctacgtagaagacacaaaaaaaaaatcagtaagagccgcaacaatcgtcctgccgccatgagggagatcctccacatccagggcggccagtgcggcaaccagatcggtgccaagttctgggaggtggtgtgcgcggagcacggcatcgacgccaccggccgctacggcggcgactccgacctgcagcttgagcgcgtcaacgtctactacaacgaggcctcgtgcggccgcttcgtgccccgcgccgtgctcatggacctagagcccggcaccatggactccgtgcgctccggtccctacggccacatcttccgccccgacaacttcgtcttcggtcagtccggggccgggaacaactgggccaagggccactacaccgagggagccgagctcatcgactccgtgctcgacgtggtgcgaaaggaggccgagaactgcgactgcctgcaaggcttccaggtctgccactctctcggcggcggcaccggctccggcatgggcacgctgctcatctccaagatccgcgaggagtaccccgaccgtatgatgctcaccttctccgtgttcccgtcgcccaaggtctccgacaccgtggtggagccctacaacgcgacgctgtccgtccaccaactggtggagaacgccgacgagtgcatggtgctcgacaacgaggcgctctacgacatctgcttccgcacgctcaagctcaccacacccagcttcggcgacctcaaccacctcatctccgccaccatgagcggcgtcacctgctgcctccgcttcccggggcagctcaactcggacctccgcaagctggccgtcaacctgatcccgttcccgcgcctgcacttcttcatgatgtgggacgccaagaacatgatgtgcgccgcggacccgcgccacggccggtacctgacggcgtccgccatgttccgcggcaagatgagcaccaaggaggtggacgagcagatgctgaacgtgcagaacaagaactcctcctacttcgtggagtggatccccaacaacgtcaagtcgacggtgtgcgacatcccgcccacggggctgaagatggcgtccaccttcatcggcaactccacctccatccaggagatgttccggcgcgtgagcgagcagttcaccgccatgttccgcaggaaggccttcttgcactggtacacgggggagggcatggacgagatggagttcaccgaggccgagagcaacatgaacgacctcgtgtccgagtaccagcagtaccaggacgccaccgccgacgaggagggcgagtacgaggacgaggaggagggagatctccaggactagaataggctgcttcacattcagtcaccgtcagtctatgaaaaactaatcatttgctgcttttcgtcgtcgtcgtagtagtagtaggtcggtaatcatctgtcgtgggtgtgtttcgtttctatcattaatcaggattagtagtagctgctgctgctgcgggcacaacacaaggggggataggaactgcaataccctgttgcgctttggttgtttcttggaaccgatgttatgttaaattctcaacgctcagtgtctgaacactatttgctcatgtttctggaactgctgttgtgttaaattctcaacgctcttgtctgtagtta

SEQ ID NO: 19535 - DNA, 1072 bp, Zea Mays
ctccgatgcgtcctaatttgtttcaaagcatgcaatatatccccaaagctagtcttgtaactgctgtttattggggctataatgggcgcaagagatttaaatatacaaacggaacatggacagcttggcatgccaagcaatatttgctgtgttgttgttgagtaccttgctggaggtgcgctgaaaaattttctgataaagaacaggagaaggaaacttgcctttaaagttgtggtccaaatagctcttgaccttgccaggggattatgctacctccactcaaagaaaatagtgcaccgtgatgtcaagactgaaaacatgcttctggacaagacgagaacggtaaagatcgctgattttggtgttgctcgagtcgaggcttcaaatcctagcgatatgacgggagaaacagggacgcttggttacatggctcctgaggttctcaatggccatgcttacaacaggaagtgtgacgtgtacagctttgggatctgcctgtgggagatatactgctgtgacatgccgtaccctgatctcagtttttctgaggtcacctctgccgtcgttcgccagaatctgaggcctgagataccgcgctgctgcccgagctcgctagcgaatgtgatgaagcgatgctgggacgcgaacccggacaagcgtcccgagatggcggaggtggtgtccatgctggaggcgatcgacacgtccaagggtggcggcatgatccctaaggaccagacgcagggctgcctctcgtgcttccgccagtaccgaggtccctaacgcagggttgtttatttatacccggtgaaatgatgatattggtctctacactacaactcagtgtaatctaatcgcagaagtggctatataatggagaagcttatcattgcttgccatgggtgtaaatggatggggcggggtggttgacgattggtgtgcttgtatgctcgcttcgagttataatgcttgctgtaagttaaggtgtggacggagttgctgttgccgtttgctcacatcgttaaattcgtgggcgtgacatgaagcaaggttatgtactacgtattggatt

SEQ ID NO: 19536 - DNA, 1463 bp, Zea Mays
tatcgcttagccatgtccaccatgcattatactatgctctgtagctaagctagctgactagctctatctctctctcgctccctagcccagcaagtggacctcgtataaaggggaggccagctgagctcaaggaatcaaactagctagcaataagctacagagcactgcctgttgtttcttcttcctcctctctcccctctcgatcgatcgatccaacaagctaagcttggtccttgctttctagctgcctggtacggtctagcgaccgatcgatcgatcgatcgaccatgtcgtccttgctatgtattagccgcaggaacaacaagaaggacagcgatggcgatggagagtacggtggcgagcagatcatcatcagcacgggcggcgcggccatgaggaagggcccgtggacggacgaggaggacgagcagctggtctgaggcgcaccggcaagagctgccgcctccggtgggtgaactacctccacccggggctccggcgcggccgcatcacggccgatgaggagcgccgcatcgtggagctccacgcgcagtggggcagccggtggtcgcgcatcgccaggagcctgcccgggcgcaccgacaacgagatcaagaacttctggaggacgcggaccaggaagaaggcgctcgaggagaggagggctgccgcagcagcaacgtcgacggcggcggagtcggcgtcctcggtgatgacggtgtcgtcgtcgtccgagtgccgccgcccgcccgtatcgtcgtcgtcgtcgtcgtcttcgctacggcgggacgaagcgcggcgcagcggcgacgagaccgaggaggcgtccacgcccaccgcggcgccggcgaccaagcacgatgaggaaccccagccgcagccgcaggagtgctacgacttccccatggaccagctgtggaacgagatcgcggcagccgatgcggcggcgatgagctaccttgtcgtggacgcctgctggggcggagctgctgttggtggtcactgttattactacggcgccgccgcagcctcagccgcctcgccgccgccgccggcctcgccgccgtgggagtactgcggctccgatttttcgctgtggaggatcgacgaccaagagtactacaagaagatgctcgactcctcctcctgatcccggcccgcgactcatatcgtttggcgaggacacacgtacatacgcgctctgtgaatttgctagctcatatatattatccaggcgaggcgaggaacgagctgagatcatggtggtgagatgagatgagatgagatgagagagtagtgtgtattaatggtggttcagatcgagtagtgtgataaattaacagaatatatataataatttacgcttctctccgaatccatatatcgatagatgatcgaccgatacttatatattctgtagcatctacacgtacgccttattagctattactacttgaaatcca

SEQ ID NO: 19537 - DNA, 984 bp, Zea Mays
agctcctgcagcagattgagaagctccatccccttccatttacatgggacccataggtattcatctgagataccagtagtattaattcaggctgtactgtacattggagtcatagcagtgacccgactggcgaggcctaccttgaacaagatgtgctacaacagaagaatggagaaaaacactatgttcttgctctctgttctcagagtcgtggctgcttggtccatacttgctgcctacaccatacccttcttcatcatcccaaggaccgtgcatccactgcttggctggcctctctacttgctcggttcttttgctctttcttccattgttatcaacattttcctcttccacccgatcaccgtcctcacaacatggtttggattcataggcgcactcctggtgatggccttcccttggtatctaaatggttttgtcagggccttggcagtgtttgcgtatgctttctgctgcgcgcccttgatctgggcatctttggtcaagacaatgagctccttgcaggtcctgattgagagggatgcattcaggctcggagaacctagccagaatgcggagttcacaaagctatactgagcctgggagcaagagtggttgtacacaatggaactatctggaaacctctagaatccatgaatgttgttatcttagacatgtaggtgacatatacagtggaaaaggggggagggctgtagaattggtgctgaactgaagaggaactgactggggtcagttgttagttattttgatttattgttcctctgaaaagccaaggcatttttggctttgtttgtaattgatatgatatgttccttcacaaatgaagaaaagggttgaaagttcaaacggtgtagtgttcgaaacagtactttgattttaccgtggtaaaattgtgtggcttgtgctgaacagttttcctttttataactgcttcgcctgaacgttgagttcagctcgtgtcgctgc

SEQ ID NO: 19538 - DNA, 713 bp, Zea Mays
aacctaacagaagcaaccgaatatcccctcgcctttcaactcgtcttcctcctcatgtcgtcgcctcctatccctctatatcttctattctaagccacctcgatcggaccctagatagatgcaagaaaagaaaagagaagagcctctgtggatagtggtgggtgctggatcactgggcggagcagcttctcatatcggatcgatcgattaattaatatatactataaacatacaatcaattacatacatatacgccaagagaagaggaacgccggcccgtttcacttgtctccttcctccgatccctcccggcggccggccgggctcgggcgtttttccccttttgtttcccatggaggacgccaagatggggaacggcgccaccatccgcgcggtgctcgccatcctccagtggtggggattcaacgtcaccgtcatcatcatcaacaagtggatcttccagaaactggagttcaagttccccctgacggtgtcgtgcgtccacttcatatgttcctccatcggagcctacatcgcgatcaaagtcctgagaacgaagccgctgatcgaggtggcctcggaggaccggtggaggaggatattccccatgtcgttggtgttctgcgtcaacatcgtgctggggaacgtgagcctgaggtacataccagtgtcattcatgcagacgatcaagtcgttcactccggcaacgacag

SEQ ID NO: 19539 - DNA, 831 bp, Zea Mays
tgagaaacatgacaagcatatgtctgaaactttcatgctgattgcctaatcttctccacgaggccctttgcactgacatacccccctgttctatcaatctatctatttattaatttctttttgtttttatgtctgctcctttgctatcttctattatttcctaactttgctggtagaactcttcaggtggtgagggttggatgatgatcagttgcatagttcaaatgattacttctgtaatgactatgattacactgaattgtctttcgctcctaactgacaatcttctgaccacctgatttttcctgattccacacctgagacctgctgagtacaagaggtccaggttggcaaggaaccaaaggactgtgaatcgtccatatggtggtgttctgtctggtactgcagttagggagaggtgatcattctttcgcatcccatgcttgcctgtttaaatgattgtttgagaaactaatctgcccgcacgcctcaggatcatccgtgcctttttggtcgaggaacagaagatagtgaagaaggtgttgaagatccaaaagaccaaggataaggcctccaagagctagacgatataggccacaatgtttgagtccattcgaatttatttcagcaggaaaatttctcgcgggtatggggaatcttggtacttatgctagtagtatgtgagatgggtgtggtttaaattttgagcgtaagttgagttctgttaacttgttaagttcggtggaatgttttaaactatgtggatgtcagattttgttaatgtttgcgcagtttgccccaattttggccttcattacgtacataacggtg

SEQ ID NO: 19540 - DNA, 2644 bp, Zea Mays
gctgtcccccctgctcctgctcctgcctccggggcgcggcgccttcccgtctcccttcctcctcctctcccaccgctcggcctcctccaccacacgcgctcggcggtgccctccccggcgcggcgccgaaatgcaggtggggcctcgtcggcttcccgcggctgcgacgggccggagcagctaacgccgcggcctggggctgtgatctggggccgcgccgcattgccgactgcctgccgccgggctcgcgcgcgcagttcctgcctgccggtggcgaggggaggcaagatgcggcatctcgctctcctcgcgcttcttctcgctcccgttctcggatccacaggcaccactctgtccccttctccggccgccactgattctcctgcaaaccaaggacaggcttctagtcctcctcaatctgcatttgctcttggtccagtagctgttccaactgcgccgaccactccatcggcgagtccttccccggagaaagccgcggctgtaagtcctgctgctcccacggagccacgaattgccccggctccagtggctcctcctaaagagtatagtgcacctcctccagttgaggttgcacccactgatcccaccgatgaggttcctccaccagtagctccaccacaagctgcagttggaaatcccactccaattcttcctgggacacctgcattgctaccttatgttcaggctcctgctccatctgtcgttctcaagcctaatccaccagtcgtggtgtcacctccacctgcgaataatcaaccaatccctccttatccaccccctgcatcgccccctccggcaaatggcattccaccatacccaccttcaggaaggtttcctgctattcctcctgccacttcagtcccacctccagccacatcacctgttattgcacaagcaccacagcgacgagcagatcctccaagtagagattataagaacggaaacgcagtgccgccagcaaatacttaccctcctacaaatctcaagaagcatcatgttccacatgcatcccctccaaagggatccactggtcaaactgtcccaggtcacaaatcaccagttacaggatctgcgcctgcaacaagtcctttgccccagaacacaaacatgccttcaatcccgaagaatgcttcatcagtgccacatgcccatccctcaccaccaagtatagctccagaattggcacccactggtagatctcatgctcagggatggaaatccagtaatcccaataacaaaacaaatagattacatgccccatcttatccaccgcctcgtgctcaagggcccgaggtctcacgaaccccaagacagactgggactaaaaactatactcaccatgcgcctccaccattccctcaaggacaccctagctttcctgtacactccccatccccttcaccagcctcatcgaggggtcctgcgaacgcgaagaaaagaaatcatatttctcctactcttccttcaatccctcccctaccagagccaaaagcaccgtcagcgcatcctatttggacattacctccaccaccacctaattcagattgcaattccttatcatgcccagagcctctaacagatccacctgcgggagcaccatgtgcatgtgtgctaccaatcagagttggaattcgtctaagcgttgacctttactcattttttccattggtctctgattttgctgaagaggtagcttcaggggtaaacatggcacagaggcaggtccgtgtaatgggtgcgaacgttgcaggtgatcaacctgacaaaacaatggttcttgttgatctagttccagtgcaagtgaagttcgacaatgctacagcattttcagcatttgaaagcttgtggagcaaaaaagtttctttaaaaccatcagtctttgggaactatgagattctctatgttgtatatccagggcttcctccttcaccaccttcagggcaaggtgttggggatggggcgtttggcaacaacagaaatgcaagggccgtgaagccccttggggtcgatgtaagaagtcccaagagaaaagtgaatggcagcctcattgctattgttgttttgtctactgttatagcattgattatttgctgtctggctgcatggtcgctaatcctcagattcaggggtccgagccacacagctcggggatttccacatactgcacttccaaaattttctaggtcatctggtacgtgtaactaacctgctaattttctgataattgcaccttgatgtgatgtaattggactagctctttgattcgtagcagaataacagtaacttttctccaatgaagtagtgccactgttgaaattcatcatgaacttgtagtctataagcaagttttttttatttggtatcctttccaaggaaaattccattgcttatttgaaatgccagccaacagtgcttgcaatgacttttcagttaaaaggctttcgtttcagtttctgcatcgtgttatgtgcccttgctagaataatatgcacagtttaggcagtactagttttcgttctgaccagtgttttaaaggtgtcgcctaggcgtccaggcgtctcagtcgcctagctaaatcagcaagagggcagaggggaagaggaaggggcggtgccgaatcggg

SEQ ID NO: 19541 - DNA, 1455 bp, Zea Mays
tatgtatgggcatggtgagctgcctcaagctttctgtcgctgtgctgcggttaagggtgccatatatgtgttgcggatgccagtggttgcacttcttatggatgaggaaaagaaacattttgtaggcgctagattggtatctggtcaggatattttatgccaacaattgataattgatccgtcttataagactatcttggatgtcccatttgatggttcagattctcattttccaagaaaagttgtgagaggggtatgcataattagcaagtccgtgaaacagggatcatcaaatgttctggttattttccctccaaaatcactagaagagcagcaagttacagctgttcgacttcttcagttgagcagcaatctcgcagtatgccctcctgggatgtttatgtcatatctgtctactccctgtaccgatgtctcagtcggaaagcaatgcataaaaaaagcaatagatgctctttacagtcctcaggcttcagatggttcagaagaccatcttgagacagccagtgaaagcaccgaggatgtgaagccaacactaatctggagttgtgtgtatgttcaagagatcacacagggaacagctggtcctttattgtcatgccctatgcccgatgaatacctggactacagaaacatactgggatcaacaaaaaagttattcgcaagtatctatgctgatgaagagttcttgcctaaaaagtcagctcctgtatatgccaatgatgactctgattctgcagagtaaaaccatctttctagagggctttatcatttggttggagaacgccgtcagcccgtcactgaaattccgagggcaaaagagcgtcgcaaggggagcctgtggggcttgatgagcagttgtgctggatttccaatgtacaggtgcccactggctggccatacattgcattggtagggaacagttggagggagacatgctcggtgcaaatggccttgtatggattggcaaacattgttgtacgcaagatcacagcaaatacgggatacaaaatgctgaacgctcgatttggtcccccaatttgaacgacagagtgtagaagggtattctgaagacttactagttaagtggctgagggctgatttagcgacgagggaaataaaggtgatccatgaggaaaatagcaatgaaattcctcccccgtgtggccatgtctccatgtggtcattaaaccagccctgaatgtatttttggtcggccaaagcggtgtgtatagtatctttctttgtttttggttgtttcaggtgaggttttagtcttcagctcgcagaattgggcgatattattacccggcctatagtattttttttcttctcgcaaccattttttgtttgttgatgagttctgagagtgcattgtttagttttctacaagaacaatcgtaggacgacacgggaacatgggactcactgctgaag

SEQ ID NO: 19542 - DNA, 6683 bp, Zea Mays
gacttattcaattttgactctcgtcggctccggtatttcgacttccaaaatagccctaacatttaccgaagctcctcccgccggcgcgctgcgatccaactccgagatgctcgcaccgcttccgcgcctgacgagcgcgctccgcggccactacgacgctgatcaggcctacctcctccgcaagagcgccctccaggctctcaccctccccaggccgcatgacgagtggaagttcgctcggaaaatcgtgcctggctgggacgatgcttccagcgaagtgcgtcaggcgtataaacaatttatcggggccgttgtggagttgttgagcggagaggcagtgtctgaagaactctaccaagttgcgcagactgtatatactctatttggtggcgatgacacggagtatgttggtgctaaaaaagtcctttccaaaaggaatgagttggagagccttgtgggctacactgtacaagactcagttttgaaaaagctagctcagttagctcagaagctcgattcccttcaacgagcaagtgcctatgaatctgtacacagaatagcggatgatgtaaatgaaaatgatagaattgaatttggagcagacttcgatttcaagccacttgcccgtttcattgttgatgtttctcttgacgcacccttagaaagtgctgaattgggcagtggtccatttgaaaaatggcagtatgatgcttggagcacatccacaactagtcattcaactgctgttaggggttctgtgagtttgaggtggctgaaagatcagtgtgctttgataactaaaagtggtggctcaatgctctcaggagatgaacttgcaatgaccttgtgcagagtgctcctatcaaataaagcaggcgatcagatagctggtgaacttttggacctggttggcgacaccgcttttgaaatagttcaagatcttcttttgcataggaaagagctagtggatgcaattcaacatggattgtcgatactgaaatctgagaaaatgacctcaggtaatcaaccaaagatgccaacttatggtacacaggtaactgtacaaacagagtctgaacgccagcttgataagattaggaggaaagaggaaagacgtagcaagcgcagtgcagacagtggcaataatgatattggtgttgatgatttttcatcccttcttttggcaagtgaacggaaggaggcatttgatgacgtgattggtagtggagaagggtcagacagttttacagtaacttcccttcctcaaggaaccacaaggaaacacatgaagggttatgaagaagtgaagattccaccaactccaacagcatcactgaaacccaatgagaagctgattgaaataaaagaattagatgagtttgcccaagctgccttccagggatacaagtcactcaatcgtgtgcagagtcgtattttccaagctacatactacaccaatgagaatattttagtttgtgccccaacaggtgctgggaaaacaaatattgcaatgattgcagttcttcatgaggttaaacagcacttcagggatggtattttacataaaaacgagtttaagatagtctatgttgctccaatgaaggccttggccgcagaggtaacagcaacattcagtcgccgattatctccattgaacctggttgttagagaacttacaggagatatgcagttgaccaaaaatgagattgaagaaactcagatgatagtgactactcctgagaagtgggatgttattacacgcaaaagcagtgacatgtcactttcaatgctggttaagctgatcatcattgatgaagtacaccttttaaatgacgatagaggttcagtaattgaggcgctagtagctcggactctccgccaggttgagtctatgcaatcaatgattcgcattgttggcctatctgctaccctgcctacctacttagaggtcgcacattttttgcgggttaatccagacactggacttttcttttttgactcaagctatcgtccagttcctcttgctcagcagtacattgggatcagtgaaagggattacacaaagagaagtgaattattcaatactttgtgttatgagaaggttgttgagtccattaagcaaggtcaccaagcattggtttttgtccatacccgtaaggatactgggaaaaccgctagaaccctgattgacctagcagcaaaagcaggggaattggaattattttcaagtgcagatcatcctcaatttccattaatcaagaaagatgttagtaaagcaaaaagtcgtgaagttgttgaattttttgaatctggatttggtatacacaatgctggaatgatgcgatctgacagaagtttgatggagcgcttgtttggtgacgggcttttgaaagtccttgtttgtacagcaactttggcttggggagtaaacttaccagctcatacagttgttataaagggcacacagctatatgatcctaaagctggtgggtggcgagacttggggatgcttgatgtgatgcagatctttggacgtgctggaaggccacagtttgataaaagtggcgaaggaattattatcacaacacatgacaaattggcttattacttgaggttattgacaagtcagcttccaatagagagccagttccttggatctctgaaagataatttaaatgctgaagttgctttgggcactgtaacaaatgtcagggaggcttgtacctggcttggctatacatacttatttataaggatgaagactaatcctctggtgtatgggataacttgggaagaggttatgggagatccttctatgggtgcaaagcaaagaacatttattattgatgctgcacgagcactggacaaagctaagatgatgcgctttgatgaaaagagtggtaacttctactgcaccgaacttggtcgaattgcaagtcatttttaccttcagtactccagtgtcgagacttacaatgagatgcttcgacgtcacatgagtgaaagtgagttgattactatggtggcccattcctctgaatttgagaatatcgtagtaagagaagaagaacaggatgaattagaagcccttgcaaggaaagcatgccctttagaaattaagggtgggccgactgacaaacatgggaaaatttcaattctcatacaggtttatatttcccgtgctccaatcgatagctcctctttacattctgatgctcaatacattagtcaaagtttggcacgcataatgagggcactatttgagatttgtctgcgtcggggatggtctgagatgtcatccttattgttgcaatattgcaaggccgtggaccgcaagatatggccccatcttcatccacttaggcagtttgataaggatctttctcctcaggtattgtggaaactcgaggaaagaaatgttgatctggatcatctttatgagatggaggaaaatgaaattggagctctgatccggttttctcatcagggaaagttggtcaagcaatacgttggatacttcccgtatgtcaacctatctgcaaccgtgagcccaatcactaggacagttcttaaagtggacctgcatataactcctgaatttgtgtggaaagatcgttatcatggcatgtcagaacgatggtggatcattgttgaggattctgaaaatgataccatttatcattcagagctattcacattaacgaagaagatggcaagaggaacacctacaaagatatcttttaatgtaccaatatttgaacctcatccgccacagtactatatacatgccatctcagactcatggctacatgctgaaacactcttcactgtttcttttcataatttgacattgccacagacacaaataacacacacagaactcttggacttgaagcctcttccactgagtgctcttggcaacaaaacgtatgaggatctgtacagattttcccatttcaacccgatacaaactcaggcttttcatgttctttatcacactgataacaatgtactcttgggagctccaactgggagtggcaaaacaatttcggcagaacttgcaatgctccatcttttcagtacacaaccagacatgaaggtagtttacattgctcctctaaaggcaatagtacgagaaagaatgaatgattggagaaaacgtcttgtaattcagcttgggaagaagatggttgagatgactggtgacttcactccagatttgatggccctattgtcagctgacatcatcatttctacccctgaaaaatgggatgggattagtcgaaattggcatagcagaagttacgttatgaaggtcgggctcatgatattggatgagatacatcttctgggagctgaccgtggacccatccttgaggtcattgtatcaagaatgcgatacatatcatcacaaacagaacgttcaattcggtttgttggtttatcaacggcattagcaaatgctcgtgatttagctgattggttgggcgttacagatgacggtctattcaatttcaagcctagtgtgagacctgtacctcttgaagtgcatatccagggatatcctgggaaattctattgtccaagaatgaatagcatgaacaaaccagcttatgcagccatatgcactcattcacccaataaaccagttctcatttttgtgtcatcacgtcgacagacaagacttacagctcttgatatcattcagcttgcagcatcagatgaaaaaccaaggcagttcctgagcattgaagacaactccctagacatggttctttcacaggtttctgacagtaatttgaggcatactctgcaatttggcataggtctgcatcatgctggtttaaatgacagagacagatccttggttgaggagcttttttcaaacaataagattcaggtgctggtatgtaccagcacattggcgtggggtgtcaatcttccagctcacctggtcataatcaagggcactgaatactatgatgggaaaacaaaaagatacatagattatgatatcacagatattctgcagatgatgggtcgtgcaggtcggccgcaatacgaccaacatggcaaagctgttattcttgtccatgaaccaaaaaagagcttttacaagaagttcctctacgaaccgtttcctgtggaaagtaatctgagggagcacttgcatgaccacataaatgcagaaattgtttctggcaccatcagcaacaaggaggaggcgattatttatctcacctggacttacctatatcgcagattggttgttaatccggcctattatggattggaggatactgaaacaaacacattgaattcttatctatcaaggttagtcgaaactacatttgaagatcttgaggacagtggatgcataaaagtggatgaccactctgtaaagtacttgattttggggaaaatagcttcacagtattacctgagctacctcactgtttcaatgtttgggtcaaatattggccccaacacaacgttggaagtctttctacacatactgtcagctgcatcagaatttgatgagcttcctgtacggcacaatgaggacaatttgaatcgaatactcagcggaaatgtcccgtatccagttgatcaacaccaccttgatgatccacatgttaaagccaacttactctttcaggcacatttctccagagcagaattgccaataagcgactatgtcactgacttgaaatcagttcttgatcagagcatacgcatcatacaggcaatgattgatgtatgcgcgaatagtggatggcttacgagtgcattgacttgcatgcatctcttgcagatgatcatacagggtctctggtttgagagagattatgaatccctctggatgttgccatccatgaatgatgatatattagaccatctcaagagtagaggagtctcaacagtcccctccttactagatctttcccgtgaagaattgcgtagggtacttcaaccattttctgcgtcagagttgtatcaggatctgcaacatttccctcatgttgatgtgaaagttaagcttcataatgaacaggagcgatccaaacctccaactttaaacatcaggttgcaattgaaaaattcgcgacggtcagcatcaagagcatttgcccctagatttcccaaggcaaaacaagaagcttggtggcttgtcctggggaatgctacaagttcagagctgtatggtctgaaaagaattagttttgcagatcgggtgattaatactcgcatggaattgccacagacgttcaatgtgcaggagacgaagctgatcttggtgtcggattgctacctaggttttgacttggagtattctcttgagcatctcaccaagggttgagtgctttattcagagctgtttgggctgtttcattttgtatgggttcagcaaccagctcatcctagattgatcctgtaatcacgagacatgagttcattccatgaatttttgtttgtatgactacatccctcgtgttcatggttatattatatttaatagctatatatacgagtggataggtttataactttcatgaaatatcttttccgtaagcatagtagatgtttgagctctaaggttatgaccaacaaattgtgtatatggtcgtgcaaaatactattttataatataaactatattatttacatggtgaaaaaaagaa

SEQ ID NO: 19543 - DNA, 2391 bp, Zea Mays
ctgttcccgttgggtctgggttagacttgattagtattttaaactcaagatggttaacttcgggaagaaattgatggctgatcaaattccagaatggaaaggatattatatcaattacaagttgatgaagaagaaagttaaacagtatggccagcagctccagcagggcgagaaagatcgtcgccgggttctgaaggatttctcgaagatgcttgatgatcagatagagaagattgtgctgtttctgttggaacagcaaggaatgttggcaagcaggattgaggagttaggaaagcaaagggcaatactacaagaccagccagatatatctggtattgctgagttacgagaagcttatagggaagttggtattgacctcatcaaactccttaaattcgttgatcttaatgcaactggcattcggaaaattttgaagaagtttgacaagcgtttcggctatagatttactgattactatgtgacaagtagatcaaatcacccgtactctcagctgcaacaggtctttaagcatgtgggtgtaggagctgttgtaggagctttgtcacgtaaccttgctgaacttcaagaacgtcaaggaagctacttatctatttatgatcagccatcttctgctcttaaggaccccatcattgatatgataaactcctcagttgataagttgacaaggtcaactaattttcttcgctttttggggcaacatgccttgattgtggatgaggagtctcctagtactgcaggagaggaagaaatagaagatcagaaataccatttcatgtcccttatgctgaacctggtgaacacatttctttacatggtcaacacatacatcattgtgccaactgcagatgactattcagtaagccttggggcagcttctactgtttgtggtgtggtcattggttcaatggctgttgcacaaatattttcctctgtttacttcagtgcatggtccaacaagtcatatttcaaaccgcttgttttcagtagcattgttttgttcttggggaatgtatgctatgcaatggcatatgatatgaagtccctaacagtccttattatcggccgtttactctgtgggatgggttctgcaagagctgtcaaccgtcggtacattagtgattgtgtccctgcaagaatacgcatgcaagcttcggcaggattcgttagcgcaagtgcacttggcatggcctgtgggccagcgctagctggtttacttcaatggaaattcaagatctacatggttactttcaatcaatcgactctacctggttgggtgatggcagttgcgtggctattgtatttgatttggctatgggtctcattcaaagaaccgaaccgtgctactgaggtgaatgaagccccacaaaatcctgcttctggacaaacggttgatattggacaagtagagaatggacttgctcagcctctgctcatggattccgtagataaacaaaatgaagatgaagatgaagaagttgatgaaagtgaagaagctgcagatgattcacgcaagcctgcaacatcaattggctcagcatacagactgcttactccatcagtaaaggtccagttgttgatatacttcatgctgaaatacgcaatggagattttgctttcagagtctagtgttatcactaatcactatttcagttggaacacaagcgcagtggcaatttttctagcaatccttgggttgacggtgcttcctgttaatgctgttgttggaacatacatcagcaatatgtttgaggacaggcaactcctcatggtctctcaaattacgttgctagtaggcattatcttcagcttcaaggttacgagtacatactctgttgtccagtatgttgtctcagcacttgtcacatttgtttctgcagaagttcttgaaggtgtgaacctttccctcctatcaagcgtgatgtcatctcgcctctcccgtggcacatacaacggtggcctcctctcgacggaggccgggaccctggcgagggtggtcgctgactgcaccatcactgcggcggggtacctgggcgtggggaagcttctcaacgtcaccctgctaccatccctggtgatatgtgttgcgtccattgcctgcaccttcctgacgtataactcgcttttctgatggagcttcacaatgtatttgtgtcatcatgattcgttccatattagcgcaaatcaaggcagctgggagaccgccattgccattgcccgaaggggctattgtattactattattatatgttcgtcgatttaattgctgtaaattgattgataaaatgatggtagctactgaacctggtcttgccgtgcaaaattttgaccgactctatccttgtcatgaatacatgctgtccatattatggc

SEQ ID NO: 19544 - DNA, 532 bp, Zea Mays
aaacgggactgtgtctgtgtcggctggctgaccagaacacttgagcagactagcaaggccttcagaccgggagggctccctgtcctgtcccccgcgccgccgcggatggccggagccaccacgccggcatcaggcgccctcgtcaggctctgcctgccttcgctcctcctctttctgtaccggtgctgcagatgtgaggctgttgagatggagagaacccttgcgatgatcaagcccgatggtttgtcaggtaagtacacagaagcaatcaaggaggtcatcttggattctggatttcatatcgtcaaagaaaccgaggtccagcttgatgctgagagggcatctgtcttctatgcggagcattcccagagaagcttctttgacagcctagtcaagtacataacaagtggtccagttcttgctatggttctggaaagacctgacgccgttgcgcaatggcgcactttgattggaccaactgatgcaaaaaaggccaaaacctctcatccaaacagtactctttgtcatttca

SEQ ID NO: 19545 - DNA, 352 bp, Zea Mays
ctaccgctgacagacgattcaaccgtccgccaaatccaaacgcaccgatccattccagaccatggcgacgaccaaggaccccgcgaccaccggcggcgagcccgccatcggcattccctaccacccggcggcggaggcccaggggcactattactacgcgccgccgccgaacccctacgcggcggggatgccgccgcccaacgcgatctacgccggcgcgcccaagggggtgccgctccagcagaccatgttccgcgacacgcccgcgcccttccactgccaggcctgcggtgaagccgccgtctcctccgtccgggcctggatccgctgaccacggcggggctgttcgcgg

SEQ ID NO: 19546 - DNA, 6842 bp, Zea Mays
cgtcgctgctgcaggagctagggtttccggcgtgggcaaccggggtatgtgcagcagctgccgcactgcaggatctagggttccgacgactccgctcacggatggagggtggtagaagggcgagcgaatccctctcggcatacacccatggatcatgatgatactgattttcagagccaaaactttcaactagctggtgaaggcagtaacaaattctcatcaggtttgcgaccatttgcactaccaaaacttgatattgaggaccaattacaaggccatcttcgatttgataatttgatagatacagaagcatttttcagtgtacaagggcacgggaatagttggattgaggttctgtccactggaagcagtgttgttgattttagctctagcgcagctgaatcttgctcaatatctaaaactaataatgtctggtcagaggcaacatccactgaatctgtcgaaatgctattgaaatcggtgggagaaaatgagacaactggtgacatggataataatgcccaccttaagttaagtggtatggacagtcaaattgatcaatcgagtgtccatcctaaatctagtaactccctgccagatagtactgtagtgccaactgaggaagatcagtctttgagtactcattctagaatgacagacgatcttgatcgttctcagatatctcattctataatgactgccgacctttcaaacaccgagagtcagcttgaacattttcggcctttcttaatggacaagaaagctgagcaggcagtggattctgttggtgagaagtgcattgcaggtgagaagttgtcctcttcaaacaacgcaccaggaagctacccagccattgacaactattttggggcaggtcatgatgatcgttctttggacaaacttaatataccctcaactggagtagattcaaagaacttgaataatgaacctttcccagagttggctcccctgcagaacatatatactgattcatatcacttcaaggaagatactacagaatccgaggctggtgttactcctcaagattcaaagtttcgtcatatcaacgaaaataaagttgaaggtggactacaagaactgcaaagtttgtcatgtgctggtcagtccttgggcgctgtaaacttgtctagtcaagcaagcaatgaaactcttttgtcagaaagttctgatggattgctagaggccataacaaatccagttaagatgctgcacaggagtgatgatacttgcaataaagtgaacagcactcctcaaccatctttttcagcagtgcaacatggagctgaaggcctggaaaattcagttcacaggagcaatgagttcgttgttaaggagtttagtatcggttcaaattctcttttatctcaccaacctgaggcagacccaaaattttttaatccacatcctattagttctctgtctccgaaaagtaaaatttccgatgccacttgtgttcctgaagaaacaaagaatgttggatccaatagtataaacacctgctgtacaggtgatgaatcaaaacatgtagtgttggagaaccgacaatattctgttgacaacctaaaaagtggtgacatgggagaaaagatgtctggggaggaaatacccgcagtttcagggaacattgatcaaatgatagagaatgatcatgaagaaaaggctgccaatgctactggtacatccaaagataaggttgacccttctgacagtattgcacttgaaaactttgcagctgacactttcaatgcttcagaggattcagacattccgtcactaaatcataagaggtcatttgaggaacatgaatcttctgctttaggagtggagcctaaaaacacaaatttactccaatctacttctgggcttcaagagaaaatttcagcatcagtgatcagttctagtagtggcatcacacctaccattgttactgacaactttgatatttctgaggataaaaatggctgttcaataggtgtttcttctgttgattctcctgctttactagctgagaaggatttgaatatgtccacagtgaatactgaggagccattcaaggaaggggttaagtccgctttaggagatcaacacaatggtatttcttctggctctggacaaggaggggaaatgccagctgtcccaatggactcaaagattgccgtgtatagtggtactgtttctgctacagaaagggagaaattcaaggagcagcctaattctttgggttgtttgaccacaggagaaactcaggataaatcagatagtatggatccaaccacagcatctacattgggtggaaaggtggctgtgaagattgtaaaaactccactgaatgcaagtgatgatttgaatgcacatatgcaagatatagtgttaaatcaaggtacagattgtagttctggtactgtgccatctcaaggaaacgaaggctcaagcttattggaacctggtaatggtgatggaatctgcactggggttacatgtgggtccccttcagtgattagttgtgctgaatcctgtccccaagaaggtggacatggcagcactgctttacttcatcacacactatgtgggcaatctgaggatcctgaagatcatggggcctcagttgatggtatccagagctcaaaacaatgcaataccagaaatatagaatctgcacctggttctcaggagactagtgcagcaggaggtgatagaagcttctcatttgaggtgggagctccaccaaatgttgctgagaaagcccatagccctgtttggagccctttccctaaatacattacttctcagagtagcaagatggccacagaaaatactcaagctggaggttctttgaaggatactagtgatgatagtaagaaaatatctactgtggagtctggtaaagaacagctatcagaaaggaaagtaactgaaagttctgggggtggcctctcagacaactgcaatatagacgacatcattaagggtagaagttcaccgccgcggcagcatccaatccctgagtgttctgatttagtgaattttccattcacagatccacagcatttgcagctacgtgcacagatatttgtttatggagctcttattcaaggaacaccaccaggagaggcttacatggtggcggcttttggagaacctgtaggtggtggcaaacctacatgggaggctgcttggcgagctgcttttgaaagatttcagtataaaaaatcacctcatgtcagtttagagactcccacaagttcacttataggtagttctgtgcctgagaaagctagcaaaggtacagcaattacaactgtgccagctagcaaaaaagttggtaaaactgtggcgccagcacatcctgctgtaaccctacactctccaacttctgattttccttttggtagttctacatttaatctgcaacgaggcactcatctggattttagccaggcagtatcaccatttgcgtataattcacacatgagacatccgtctcctggtgttgccccctggtatacgcagagccctggtccacgccctgcagcctggttaattccaccacaaaacttaatatttgattcatcaatgcaaccggttattcctacaaatgaaactgcgaagggtgcatcatccaaaaacatatccgtttcacatactgtttcatctggtgttcttcccagcctggcaccttctattgtttcttctccaatagcagttgtgagtgatggaaaacagaaggctgcttctagctctaagcgtggcacaacatcacaaaagtcaagaaaaaaaaagaaagcttcagcaagttcagaacagcaacctgtaattgcttctcctcatctcaaaatgaacatgccatcttttactcctgccattaagcacacagcaggattgaccttatgcggtagcaagcctgttcctaacatgggccagattgcctctgaacataactaccagatcactggtggtatggatagtgatcaaagaatcatcttttcagaacagatccgtggtgcagtagaacaatcagctgcacaagctaaaagtgcaagcattgactcagtggaggcagttaagcacaaggagggcatatggagccatctatctacaatctcaaggaataagttacctccaaaagttgaagagaaacttacctcagttgcagctgctgctgaagcagcagtttctgttgcaaaggcagctgcagaagctgccaagatggcgtcagaggctgcattgcaggcaaaaatgatggcagatgaagctcttagctcttctatatctgtaatgtccatgcatcacgaagctgatcaatataatgtcattagcagtccgcctatcttgtcaagttcaacgccagcatcatctctgaaaaccaagaacaagagtcatgccccaggttccatcatttctgtggcacgggaggctgctagaaagagggttgaagaggcatctgcagctgcaaaacgtgctgaaaacttggatgccatattgaaagctgcagagcttgctgcggaagctgtgttcagggcaggaaccattattggaatgggagaaccactaccttttaccctaagagagcttttggaagctgggccgaatggctactggaagtctgcgagtgcgagaaataaatctggaagttgtaatgataatccagtaacagaaacattggaggtagatgcacctgctaactttaacaaatctggcagaaagcgcggtcggaaacctaaatatgatcaagcactaccaaattcggagccatcttcaagctgcaaagaattacagtcatatggaatacactcaggagtaggacatggagttgttgaagatgttcccattactgtgtcacctaatggtaacaatgttacatcaccaataaacattatctggaatggcattgaaaagggatctgcagttgaggttttatctgacaaaggtgggtttggagtagcttggttttctgctaaggttattgatataaatggaaataatgtttttgtcaactatgacaaccacaatggatctggtcctcatgaagaatgggtgccattgcgacaagagggggataagccgcctcagatacgtcttgcgcaccctgctaccctctcaaaattcaaaactaggaaacgactcagggaaacagcaggaagttgtttatgggttatcggagatcatgtagacgcttgggtcaacaatagctgttggcgagagggagttatttctcagaattatgagactgatgagacgaaatatgatgtacatttttcagttggaggtggtggtgagtccttagtagttgatgcttggagccttcgtccatcgcgtgtttggaaagatggtcaatgggtagagtggtcccatgcaagagaaaggaaatccaaatctaataagggcgattcacctcctgagaaacgccaaagaatcgacttgcttcaaactggtggcaatctatctgttcttggcgaagtggggggttcttcgaaggacaataatataaacaatgcaaaaaacccggaggaattaaagccattgtctttgtctcagggggaaattgttttcaacattgggaaaagtgtagttgagaataaatctgattctcttgcattcagacgtcctggactacaaaaagaaggatcaaaggtcgtctatggtgttccaaaacatggaaagaagaagaagtttatggaagtaagcaaacattatgatgcaggccaatctgacaagatttctgagggcaattcatctaacagattcgtgaaacatctgatgccacaattgccaaggccacgtgaaaatgcttccaaagttgaccctattagaggaaggagagtaggtgaaacaaggtctagattacctaaacctacgaagtcccacaatgttggagctagcagtgttcctggaaaggattccttgcctatgcaaatgcatgttccaaattctggtgtttctgaaaggagttctagttttgcaggaagttcgacaagcacttccaacaatgagaagcccacttcagaaaataataatccggtgcttggtgtgggccttagaactgaagtttcttctggtcctgaactgcaaactgcatctactgttcctagttccaagccaaatgtatccactactaatcgagctaaaaggaaatatgttcccactgtcagtaacacaaacagaggtatactaaaaacctctgaaaagtcgagttctgattctgctgagccccgaaggactacttctgattctgctgaacctagacgatctaacaggcgaattcaaccaacttcaaggttactagagggcttgcaaagttccctcgtaatctcgaaagttcctggcgagaaggttcataggagcaattacaaaagtgcatcctcaagagggagaactcaagctcatgggtgagtgaaggcaccacatagctcatagctgcttttggtgggatagctctcgtgtacatagctgtagccgtccagtatggaaggaggatagggttggagtaggaagtctttattggagcgcaaggattcagatgtattataaactagcttaagtgcattgtgttaaccttttcttttacttgctcgaattatacttttccgtgttgtagaatacctggaaatatccttttagtatgtgtggatacaccgggaaagaaattgggtgccgtttaaattcatccgataatttaacgtgagtctgaacgtcaatttgactcgctactatcgtttgatcatatcattccttttctaagtcgtctacctgcagttgcagaagctggatggtgctctgcttctgtgccgttgtgtagtgaatgcttgttgtttgatcgtttt

SEQ ID NO: 19547 - DNA, 1102 bp, Zea Mays
actagtttttttttgaacaaaaaaaaagactattttccaaacaacttcaagttctcggcaacgcattttgggccggctcggcccttgacccatgagtagcctgatccgcttgctcttcaccctcgccgcggccatcggcgcggcctcgctcctcgtcgcctcactccgccgccgcgcgccgcctcccgggcttcccgccaagctcgtcccctcctcccacatggcaggacgcaaccggagtttcgtgctgtggctgcacggcctcggcgactcaggccctgccaacgagcccatccgcaacctcttctccgccccggagttccggctcgccaagtggtcgttcccctccgctccccgcgcccccgtatcatgcaacaatggttttgtcatgccgtcgtggttcgatatccacgagcttcccatgagcgctggctctccgcaagatgagactggggttctcaaggctgtcgaaaaggtgcacgccatgatagacagggaagtagccgatggcatccaccctgagaacatatttgtttgtggattcagtcaaggaggtgctctgacattagctagcgttttgctttatccgaagaagttaggtggaggagcagtgttcagtgggtgggtgcctttcagttcatcagtcactgagaggatttcacctgaagcgaggaagctggccaggctggtccaccgtttttgcaaagcgctggtgttaactgtgagttcaaggcatatccagatctgggtcattcgctttcccaagaagagctactttatcttgagtcgtggatcaagagtcgtctaaatgcctctcaagagaaggacggttaactgattccatcatgcttaagtggcatttatttagtatttttattatacgatacacagatcaactacttgtcctggaatttgttatttggaatttccgattggttatcgttgtcgggtgaataagggcacatagaaccgggatcttctgctggccatggatgttctaaatgcacttgtaacggccctggtatctgacactctcctacaatacaagggctgcagctctagcttgaattgcctggtcaactaaactgtctttgccatggat

SEQ ID NO: 19548 - DNA, 892 bp, Zea Mays
atgaaggcgatagatcaactatcgaccttggagctcctccgtcaggaaactgcaagtacatttgtgaaactctgtgagaaaagattgttctacacaaagagaacagaaaccttgactgtcaaactacaggagcaacaggaatggtttagtatgaagaataagattactagacaggagccacatgttgccaaatctcagagcaagcaaaacttcattgaaggggagaaacatgtcatatttaactcagaagggagcctggataagtttaacaagcccgggaaactctacacacaactggtgtcagctcagctcaagatccaagacatcaaatcacaaagatcagcgcttcttttagaaatcagcagaatcaagcagattctggagcaagagaaaaacataattcctggttttcccgctgcactacagcagatggatatgaagtcattggaggaggaatacaaagctctgcaaggtgataaatcgggggaagttgagtacttccagtctcttgatgaaacaattaatgggatgaaggggattttggatcctgtcaaatgccaatgtggactggagtacaacttaaaacttgatggtgaagccatggatataagctaagcaagaacgaccacatacgcagatgcccatctccaccagatttcgtgcattttagatctgtacagtgtgagagatggattattctttggaaggtacagaatcttctcgcatgtatacgggtggatgctttgggcagagcttgacagcgtcatcgcgaataatatagaattctgatgttagaactatctggagcttgaacggactatacggccatagttttgttcaataattgtttttccttacgctcaaccgcttgtccagattgcagacataaaag

SEQ ID NO: 19549 - DNA, 1611 bp, Zea Mays
ggacttgttggtaaagtggacttcactgtgaggcacctatcttcatcggtccagacatttccaaactcattttctggattctcaagtggccagccttgctttagtccattgactcgtcagtgtgcggcttctactgcaccggctaactcgcaaacaacttggacaatgcgtgctaccttccctgaatatgtggttgctcttactacaattgttggatctgtgcttttcacgatatttggtggtgtcggaattgcctgccttccattgggacttatattctcatttgttcgtcgtccaaaagctgtaattacacgctcacaatatataaaggaagcaactgaactgggaaagaaggccagggagttaaaaaaagctgctgaagccctacaccaagaagaaagaagtgggaacaagggccggaaatggcgcaaaaatgtgaaggctttagaaaaggagttattactcctggaagatgacatgaaggctctagaagagatgtatcctcaaggagaacaggctgaggctacttgggcattcacagttcttgggtacatcgggaaacttctatttggtgttgttgggttaattgtttcaatagcttgggttgcacatattgtcatatacttgttgattgatcctcctctatcttctttcctgaatgaagtcttcataaagttggatggtgtttggggtctgcttgggactgctgctttcgcattcttctgcttctatcttcttattgcagtgattgctggggagatgatgcttggattgaagctagtttttatcacaattcacccgatgaaatggggaggcactttaatgaactccttcctgtttaatgttgggctcatactactttgctccatcagtgtgattcagttctgtgccacggcttttgcctactacgcacaagcaactgcagctcaagagatatttggccacactttgcaatcccttcgtggaattaagtacaatgttttccagtatggctttgttgctcttgccatcctcactctcttctactatgctatatttggatggagaaagaggaaaccaacaggaagattccagctctcaaattgatttgctctgtaagtgaagtttgacggattcatcatatgtgccccctgagtggtagttcagttagcatcttagaaatgtatatgatcaacaaaaccaaaccaatccaaaccaaatcatcttcccaaagagttgaggaactgcaaatgatcaactctgagaccttaaaggccagaattatcaactctgagactttgaaggcaagaatggggcaactgttggttaccacggacatggatgttaaagtagaacccagttgactttgcaatgtacacatttcttgtatcggctcttcatttacgtctgtattatcgcttttatgattggatgatgatgttattcttgagagatgttcggtgtgtttgggggcgcttagcccccctttgatattcattcgtgttgggagttaggtcaattcattgcttttatatgtgttatatactgtgattacaatgcaagattctaggttgtattaatgatgccttgatcattcatgtgcttgtctgtgatcactgcttgtgtttcaac

SEQ ID NO: 19550 - DNA, 3290 bp, Zea Mays
aacctccaccaaggaattctttgcccaatgcgctcatcgtccccgtcacacctctgcccacgcaccatcgccgatcctattgcccactacaatttccccatttctctcacgtaagtaggccacaccatcgcgtcatctctgctccgcctccttcccgccggcttcccgccgtcctttcgctgccgctgccattaccgccactgccgcaccggctggccgcgctaaaacagcagccgcgcccgcgctacgctgaccggcgacggcggccggcaagactgcccgttcgtccggtcccttcactccaccttcgcgcaacggcacaaggcggcaagggaccggacggggccggcctcgtgctttttgtgcgtggttggagtggttgagcgagccgatggcgacgatcccgggcggcgtggcgccatgacggcagccatttcaatacgcgccccccagcagctgaaacctgacaagctaaccagattttaggtggttacccgtgccgtgtcgcctgcctcgcacacccctcgcccttcgcctcttttccaccctggacccaggatatagttcccgctctcgtcgcttgcgcttgtatcttcctcgtctcaggcctccccgccgcgcctttcggttcgggttcagcgaattcagccacgaagcgagcgggcggccggagggttcctggtaacggaactcgctcgctttccagtttccaggtcaggccaggcgacgaccgccgcctcggcagttttctattccagcgtcgcggttccgggtcagaaattggttgcaggctcgcagccagccagtagcccggcgagatcgtcttgtgacagcggcaagtccacggcggttagcaggttgagcgaaccagtggcctggctacttaccagcttgccgtgccatgtgcaactgcggttcttcctgctgatctcgggagctgcaagcccggctctcggccaccgttcgtgggcgtcatggcggcggaccacggggagggcgtcgggcggtgcatactggtggggctgcacatggacgccgtcggcagggacctgctccagtgggcgctccaccaggaggtcaggcggggcgaccgcatcgtcgccgtgcacatttaccgcaagtccgacaagacgaacacactgaagctgatcaggacgctggacgactacctggcggaatacgaggctctctgcaaccagaaacaggtggttctcgtcggccgggtgacgccgggaagctcgatccagaaggagctggtgaaggaggccaagctctgcgccgccatggtcgtggtgcttggcgccaataagaagtactccttcggagggtcgtcctgcctggccaagtactgcgccaagaagctgccgccgacaaccaccgtcgtcgccatccaggacggcaaggccgtcttcgtccgggaggcgcccaggccgccacttggagcagagccaaagccggtgctccgcacggtgctgcacccgagcgtggggctggagcccaaggtgatcatcccgaacccgaaccggcgcgcgcggtccatgtccatggacttggacgccccatgctgcggtcacggcgccgcggacgcgccggcaagcaggtgcttggacgacgccaccaaaggcgacggcggcgtggcacccgagcagaggctcgggtggccgctgctccgccgcgcgcacgccgccgccgccgcctcagctgcccctgtacagacgcccggcggcaagaatcatgagccgcggaagcagtcggtggtgcactgggtgatgagcctgccccggcggtccgcgccgtcggagtccgccgagccgcatgccggggcggggctcgagtcggagctcaaggcaatgcttggcggcagtggcgcgcggtgccggtggttccgctacgaggagctctacgactccaccaaccacttctccgcagagaacctgatcgggaacggagggaacagcagggtgtacaggggcagcctcgcctgcggccggcaggtggcgatcaagttgtgcaaggcgtcggcggaggcgtccaaggacttcctccgggaggtggacatcatcaccaagctgcagcaccaccggatcgtccccttgatcggcgtctgcgtggaaggccgcaacctcatctccgtttaccgctacctccccaggggcagcctcgaggacaatctacacggggaaaggtcaaagccggcgctgtcgtgggagaaccggtacaaggctgcgctggggatcgcggaggctctgagctacctgcactccggcagcccgcggccggtgatccacagggacgtcaagtcgtccaacatcctcctcgcagaagagttcgagcctcagctatccgatttcgggctggccatctgggcgccgacgaatccgacgtccgtgacgcacagcgacgtcgtcggcacattcgggtacctggcgccggagtacttcatgtacgggaaggtgaccgacagggtggacgtgtacgcgttgggcgtcgtcctgctggagctcctgtccggccggaagtccatcagcagcgacgggtcgtcacccaagggccaggagagtctcgtcatgtgggcaactccggtgcttagcagcggcaacatctgtgacctgctggacccgaggctggacgtgaagcacgacgaggtggaggtcaggcggatggcctctgccgcgtcgctctgcctccggaggtcggctcgactcaggccgccgatatcgcagatactgagcatactacgaggagaaagcgcggcgagcatcgccgaccagggcgcgacggagccggactgcgtggacgacgaggcgtaccccgccgcgaacgtgaggtcgcacctgggcctcgcgcttctcgacgtggaggactcggagtccatctccagcacggagcacagcagcggcctcagcccgttggaggagtacctgcgagaacgttggagccgatcgtccagcttcgactgatgattcatgcccgcgctgcgattttgtttgtgggcatgtgttttagtttttttttccctctccgccggtaattcacatgtttatcgtatggtttggttaccggggccgtgtgtacagtggacagtcaaaaatcaccagagcgagccacatcttcggcgacaaagacgcgattggttgagcttgacctgcctcgcacctgccggccaggcaagttgcgtacaagtgacaagtcgcatgtgttttgtggttctctgcccaagctgcatccgtcatacgatacaagagccgtagaataacagaaacggcacaagcgtccgtgctgcaccccgc

SEQ ID NO: 19551 - DNA, 3839 bp, Zea Mays
  misc_feature (2274)..(2373): n is a, c, g, or t
ctgccgcgttccaccctaccccggtccccggctggctggctggcccgcccgcattcatctcattgtactactaccttctctcccgtgacacgccatctccgcaaaaccgccgctcgtcacctctcaacgccaccatgctccggccggcagccggagggctgaccctttccggttcctccaccgcgcgacctcttcctcctctcgcccgttcttagcccaaccaccatcaccgtcatcattcataaacaaaaaggcaggcaggcagtcagtccctcggcaggcacgagcgcagacggtgcgaggcgtccgcgtcgcgtccttccacctgtctccttcgccttgcgtgctcctggcttcaagaaaccgccgcacgccatccagcctgcggtgcggtggtcgcgcagcccgcctggctgccaccgctttccctctcctttcgcttctccgctaccgctaccgctaccaccagcggcgcgggcctccgggtcgtccggccggattcgttccccgggccgtgcaaccacgcacgcgcttgggttccgctcgtcgccgaaagcttctgctctgctcagtttccagctgggaggaggcgccgcctgcggaccgctgcgcaccacggagggagatcgacatcttgttggtggtggacaagctctcctctcagcctcagtgtgtccttcgcgaggctctggaatctcgcctgacgaacaaggttgctcctgcccctccatgatccacctcaactcctcaagccccagcagaatttcagcttctggtggctgcctttgcccctctgtttcctgcctgtcgtcctctcgcaatcctgaattgtgtctcattgcaaaagccctctacttgcgtcgctgaaataaactagtttgtccttgcaatcctgggtgggtgtctcattgcttcagcgctctgcctgcgcctctgaaggctgaagcaaagtatttctgcttcctcttacatagcccttccagcctgtctgcatcaccgtgccattcgtaaccccttcatccttctagctcaacttggactcgccatggatagcacagttgttggtctcaaactggttgtgctagccctttctgtggccatctggttgtttggcacctgctgccatgccgatttcacccctgcagacgactacctcatcaactgcggctccacggtcgacgcgactgtcgaccacagggttttcgtgtctgacacttctggggcagccatcctgacgaccccgacccagagcaccgccgcgaccacctcgccgaatttggtctcagggtttgaaggtgctatgctgtatcagactgctaggatattcgttgtgccatcgtcctatgccttcatgctcaagagccatggccgacattttgtccgccttcacttcttccccttcaaataccagagctatgacctcaccacggcgaccttcaaggtgtccacgcaggatgtcgtgctcctcgacaatttcacagcgcccagtagttcttcgccggtgttcaaggagtattccctgaacattaccagggacatgctcatcctcacatttgtgcctcttgggaacaacacaccggccttcgtcaatgctatcgaggtcatctctgtccctgatctcataaccgactcggtactaagtctggaccctgtcggtcagtatcttgggctgtcaacacagccgctgcagacattctacaggatcaacgtggggggacccaaggtgactcctgagaacgacacgctctggcggacatgggttactgatcaaagctccttcgtaaattccactcccactacacttgccaatttcccaggaaagctgaattttcagaacggattggcaacagaggaggatgcaccggacagtgtgtacaatactgcaaggcggttgcaaaacagtactcgctccgtgtccaatatgacgtggcaatttgatgttgatgcccgttcaagctatctcattcggttccatttatgtgacattgtgagcaaggctccttatcagctcctgtttgatgtatatgtggatagctggtcggtggtgaaagatctagatctctccgataaagcatttggcaacttggcaacaccatattacattgatgctgtcttgctatcaagtgatccatctggtaagctcagtgtcagcattgggccttctgctgtaaagatagcagcgccggatggtatcctgaatggcttggagatcatgaagatgaacatcagtacagggtctgtttccattgtggcaccaccttcagtggcaagaannnnnnnnnnnnnnnnnnnnnnnnnnnnnnnnnnnnnnnnnnnnnnnnnnnnnnnnnnnnnnnnnnnnnnnnnnnnnnnnnnnnnnnnnnnnnnnnnnnncaagctacatccaccagcaccaagtcggccctcaagttcttggacacccctcaatggtcttagcttccttaccacaggcagccgaaccaccagtcggaccactcttacgtctggaactaccggtgacacgagctaccgaattccttttgttgtgctgcaagatgcgacaaatcactttgatgagcagatggtcattggagttggaggctttgggaaggtctacaaagcagtgatgcaggatggaagcaaacttgcagtaaagcggggcaaccagaagtcccaccaagggctgagggagttccgtacagagattgaattgctgtcagggctgcgacaccgtcatctcgtgtcgctcattggttactgtgatgaacacaacgagatgatcttggtgtatgaatacatggagaaaggaactctgaagagccatctttatggcggtgatatgccgcctctcagctggaagaaaagactggaaatctgcgtaggagcagcaagagggctccactaccttcacaccggttttgcccagtcaatcatacaccgtgacgtcaagtcagcaaacatactactcgatgaaaatctcttggccaaggtttctgattttggcctctcaaaggttgggcctgaattcgaccagacgcatgtgagcacagcagtgaaagggagcttcgggtaccttgatcctgagtacttccggagacagaagctgactgacaaatcagatgtgtactcttttggtgtggtgctgcttgaggtgatttgtgcgaggccggttatcgacccgactcttccaagggacatgatcaacctcgcggagtgggctatcaagtggcaaaagagaggagagcttgatcagattgtcgaccagcgcattgctgggacagtcaggcctgaagcactgaggaagtttggagagacggtggagaaatgccttgcagagtatggtgtcgagcgtcctactatgggggatgtgctgtggaacctggagtttgtgctgcagctgcaggaggcaggtccagacatgtccaacatcaacagtatgaatcagatctctgaactcccttcaaatccaaagagagttagctccctggatatcagcagtacagatcaaagccgcgtgcccatcgactactccgacatgtcaacgagtaacgccttctcgcagctaatcaatgcagaaggaaggtgaactggatagaattgttccagtcactgaaaaaaatgtttgttacaaaaactagagatgcctcttgtgtgactacccagcctatcccttctcacatatacaacaccaagttgtgaatcttattgaaattttgtttgccacttgtaactacttatgttctagaaaagggtgagtagctttattgcaatcgtcttttgctcaaatatgtctgtacatgttctgtcacgacccaccagccgaccttcattcgctaagatagttcggcaacatgcttaac

SEQ ID NO: 19552 - DNA, 1433 bp, Zea Mays
cttgaataggagtgcataaaaaacatatatccatgtgtctaaaccttgacttgttttcgttaaggttttaactctggcctatcccaacatggttgaagccatcataggcaggaatgatgaagcgataatgaactttgagaaggtccggctgattgatccaaacattatgacatatatggatgaatatgcaattcttctaaagtcaaaatctgactacatcagactgaataagttggtacatgatatgctacatattgaccctgcaagaccagagacatgtgttgctcttgcagcaatgtgggaaagaaaggatgaaagaaaagctttgacatatgcagaaaagagccttcgagttgatgacagacatataactggctatataatgaagggcaatctgcatctttcattgaatcgaccagatttggcagtgacagacttcaggggggctcaagaattgagggctgatcttcgttcttatcaaggattggtgcgtgcttatctagcactttctaaatgcaaagatgcattattcactgcacgcgaggcgatgaaggttatgcatcagtctgcaaaagctcttaagctagttggtgatgttcatgcaattagttccagtgggagggagaaggcaagaaagttctatgaatcagccattcgtcttgaacctggatttcttggagctgcactggctctggctgatctgcatgttgcggaaggacggaataaggaggctgttatgctactggaaagatatatacaacaatggtcagatgattctctacacataaaggtggctcaagtacatgcggcaacaaatatgctttcggatgcactttcccattatcaatctgcactaagaataaacccacaaaatgaagctgcaaagaatggattggagcgcttggagaaacaaatgaagggagtggacccagatgctccagaagacgatgaagagaacgaggaggaggacgtcgatgttgatcgagatgactttatttgaagctggctcattacaggtctcttatacctgtggaagctggcgctgattgatcacgaccatctttgtatagcggtggtagcagtggttttgtgctatttgtgactgaatagcaggtgttctagcagaaccccagttgttttagcttgtaaaaatgccgcccgaaacgaattttgcacgtgttgtatgccatttcctttcagttcttctttgtgtattcttttgcaccaaatatggttgacccaactcttctctccactcagatcacagtatttcccttaccgcctgttcaaagtcagctgacatgcccgcccataatacctctctgtcatcatctgctttatcagctgagttgcatgtctttgaagagccatagaactgaccctttattctatcgaggtattctgtgacagtgtcacactctggaattgagccc

SEQ ID NO: 19553 - DNA, 2646 bp, Zea Mays
atggtcttcacgcgctggatacttggacgtgagaatctgacagtgatagacagacactggaagctaagacgaccaaaaagtttcttcccccgtggagcatgacatgcacagcacaggctacaccctacacgtcgttctgatgacatggcgaacgcctagtggctgtcgccggctcgccgcagctccggcgagcggcgattcgttggtgcggggatccgtgacgctgagcagacagcgagtagttaacgtcggcgaggcgatgggccgcctccgtgacgggcgagccttcctccaccgcgcgcttgtcctctcgtcgctgctccttctcgcctccggcgaaatcttcttcgaggaacggttcgatgattcagaatttcagtttgttgtttgagtgagctgttcactattcacgtggtttagcttctcaaagaagtgaattattccagagatattgctactgctagttgtgccttctgaaatgctccaagcctccaatggtcctgcctccaggagtcgaagaacttatttgtagttggcttacagtccgatgtcctatcgatctgatgtcttgtgctgtccatgaagttatcagtagctgatgtctgctcaagtttcttgttttcctaggtgtattgttttatttgtgattcatgaaattacgcaacttggtaacattcagatgggtgggatagccgctgggtgaaatctgattggaagaagagccaaggacaagctggaaccttccgacacacagcgggaacctactctggagaccctgacgataaaggtatacaaacaactggggatgccaaacattttgctatatcagcaaaattcccacaatttagtaacaaggaccggacattggtgatccagtactctctaaagattgagcaagatattgaatgcggtggtgcttacatcaaacttatgtctggttatctcaaccagaagaaatttggtggcgacactccttacagcttcatgtttgggcctgatatatgtggggatcagaaaaagaagctccatctcatactttcataccaagggcaaaactaccctatcaagaaagaactaaaatgtgaaacagacaagttgacacatttttacacatttattcttagacctgatgccacttatagcatccttatcgataaccgggagagagaattcgggagcatgtacactgactgggatatccttcctcctcgtaagatcaaagatgttaatgcaaaaaagccaaaagactgggatgacagggaatatattgaagatcctgatcaagttaagccagagggatatgattcaattcctaaagagatacctgatcccaaggacaaaaagcctgagtcatgggatgacgatgacgatggtacatggaagcctagaatgatacctaatccagaatacaagggaccatggaagcggaagaaaattaagaatcctaactacaaaggaaaatggaagaccccatggattgtcaatccagagtttgaggatgacccagacctatatgttctgaaacctttgcagtatgtggggattgaagtatggcaggtcaaagctggttcagtttttgacaacattttgatttgcgatgacccagactatgcaagacatgttgtagatgaaacttttgctgcaaataaggaggctgaaaaggaggcctttgaaggagctgaaagaaagaggaaggctagagaagaagaggaagcacggagggcacgggaggaaggggagagacgaaggcgggagagggatagggaccgcggcagggaccgatacaaggatagatataaggtacatttcttccattttccatactgggtcattattccctgttgcaattatgttcgtcttgtccttgtcatatagggggcctttttttcttggtttgcagttcaatattccatccccttaacttatcactagccttcttaaggattatcatctgtcaaaagtttcaggctgtaggtccttgcctccctgtaggtcgttgatataaaggattgtatggatattatgacaacaatatatataggcagggccagcacaccaatgaagaatttagaattcatcactcccgtggacgaaattagcgaaaatatgtaccagtgttcatagatcttagctgcatagttttaagtctcaatagtatggcacagtgctttatatatcgaccatatgctgcgttgctgacatttttgttcctttcctctgcatctgcagcgtcataggcactacgactaccatgacgagctatagatcctgtattcttttgaaatctgcacgatattggatgtctgtctacggagagcgcacgtgcaaaacttgtatgttgtactcacggatgaagctgaacctgtgattttggcgatgggtagagattggccatcgcgtctgtaactaaatttccacgttgcgatgcaatatgagctgtagtactgtcctcgcactactatttaccgtttgtgctgcatatgtgatataaaccttcaagaaacacacacacgaagggtctgaatgagcacggcctttgttgtttgcttcttataaaaaagaactgttttatctgtgtatacttgccctactttttgctatttccaagcagctggacagaaactgactactgtaccagaaccagaa

SEQ ID NO: 19554 - DNA, 157 bp, Zea Mays
tgcttttccagcatgtgtgatcaagtcgagccgtgactagtgctggataaaatggattggttgcaaagccaacatcaatggatctcttcgttgatattttacgagtctttatcatttctcttggacttggattttctagctagccatgggtcaactg

SEQ ID NO: 19555 - DNA, 818 bp, Zea Mays
agtttgaaattgttgccaagctaagctgatgctatccttcactgcttcaaagatgccacacaagaaacaataaattaaggacactaaggatgaatctggcaggttctctggtgtcttctcttctagtggttcaccaagacatggtttctcaagaagttcaagcagattgtccatgcaggatgatactgatgatgcagattttccttttgctgtggatgatgtttatccagattcacggccagggagtagtagtggaaaggacacaggggatcaggctggttcgtcatcccataaatcccaagatgctgctgttgggtatctcgtccacctgctgaaatctgcacgtccactgagagattctacctactcatctcatacatcaaggggtgaatctaccgaagcaggaagcaccagctctttcttgtcccgcaggacatccgacgcactggaggagtttgaatctttcaaggaaacaagggagaacctgctagcacgtagtagatctcggctgcaagattcattggataagccctagtgttgatgcagtctgtggttcgattcctcaaaaggtgaagggtccaaactgtagagtaaagatcatatggcgagcctgggtaaactctttatttcagactagtccgtgtgtaaatagctaattaactggcgcttgattccgaaagagaatacacaggtcgccgttgattctattgttggaaacttgtcattcttaaactcaaagcaggaatatcgtgtgcctttgttcatagtgtttgtttacaagtgaaatcaacatgataatccatctttatcaaaataga

SEQ ID NO: 19556 - DNA, 1449 bp, Zea Mays
tgcaaagttaatttctgagtgcaccttccatgcctatgatatatgagctcagatagattgtatataaggaccacggttcagattactgtcaagcatgtctctactttcaaagttgcgcttgatcaccgtggatgttactggtacactgattgcttacaaaggacaccttggggattactactgtatggcagcaaagtctgctgggatgccatgtcctgactataaccgcatgcatgagggcttcaagcttgcatacactgagatggcaagacagtacccttgctttggatttgcagctaagatgccgaacatcgaatggtggaggacatgtgttaagaattcattcgttaaggctggctatgattatgatgaagagacatttgagaaagtcttcaggcgcatttattctgcatttggctcctctgcgccatactcggcgtttcctgattcgcagcccttcctaaggtgggcacgcgaaaagggactcactgttggcatcgtcagcaatgcagaataccgctacaaagatgtaatcctgccagctttaggattgaatcagagctccgaatgggactttggggtgttctcaggtgtcgttggcgttgagaagccagacccaagaatttacaagatagcgctggagatggcaggaaacgtcgctccggaagaagcgctccacataggtgacagcatgcggaaggactacaccccagctaggagcatcgggatgcatgcgctgctcctggaccggttcaagactgccgacgctgagagctggaggcagtcaggcgccacggtgctcccggaccttgtcgccactcaagagtggctcaccaaggatcagaatgacgaacaggaggaaacagtggcagcacgagtgctgaagagaatgtccgaaaagctatagatgggggctttaaccatgcattaattctacgagtgttcctttatattatctagctatggactgaaggtccaaaagcaacttatgctgatgagaggttggtgacgattcttggctactggctactgtaattagcttgagctactattctggttgcagcatctgtggctgaacacgagtaccatatctgagtgtcataagtcatgttgcgaagaacatgagtagcatatttcaggtgccgtttggttcatatatttgtaatgtaatgggtaacggataacgttaaatcatgtttgttttagtccaaccgtaatcaaataccaccctaaaatttgataccagcctattcaaatttgttaccgccagtaatcgagtcgaaaccattaccatttgcgttacattttttgaaccaaacatcacctcagtgtcatgagtcatgttacgaagatctcgagttgtcttacattcacctgcgtggagcagtagaggagcaagtggaaatgaatctgaacatgagcacaataataaaggacgaagcagtgaat

SEQ ID NO: 19557 - DNA, 887 bp, Zea Mays
ttacttatttgtgcggtctgtcgggtggggtggattaagaatgtccatgaaggaactactagaagccaagcatccaacggcttggtcagaatttgagaaaggactgattgatgagaatgagctggccaaaaagttcttcaaggatggcagatcgtttgatttgcaaggtctaaaagagtgcatggtgagagcatatgaatacattgatggcgtcgaagatattctttgctgtttgaagaaaaataattatgaaatgcatgcttttacaaattatccagtatggtaccaattaattgaggataagctaaagctctcaaagtatttatcttggacattttgttcttgtagaactggaaagcgcaaaccttcgcccgagttttatcttcaagctgcagatcaactcaacgttgatccagcaagctgcgtttttattgatgataggatgataaacattgaagcagctcttagtgtaggaatggttgggttgcagtttaaaagtgctgaggcactacagaaggacttgtgtgctctgggagttgaattatctcctcttgtttgtgaaggtgaagcacaagtacaataaggtcgtgtgtgccctatcttatcttatgctcaaccaaactacaatacgaatgtacataatgtatggtgcccttgctttgtgagctatgtcaataaattattgtgctaatctgaatcgtctatcaaatataactgatatgttaactgcacatattctctcctatgaagagctttttgttgtcagttagtagaggtgaatttgttttatcacaaacatgtgctgtcaagcctcagccaataggccctgtaacttcaattcaggttaatgttcgtcgagtttgaggagtttttatcaaaagttataa

SEQ ID NO: 19558 - DNA, 2605 bp, Zea Mays
cctagggcgactgggcgagtcagtacttcagacttgagtccacccagccagccaagacacgcagcgcaggcgcatcccagccagattcaacccgagttcgcgacgagagcacgagatggcgatgcggacagcgctgacctccctccccgcgcgcctgcgcgcccctgcgccccccgcggcgacgggcggccggcgcctcctcagcgacgggaaggggcgtgtgctcagcgaggaggagcgcgccaaggagagcatctacatccagaagatggagagggagcggcaggagaagctgaagaagaggctcgagcaggagaaggccgactccgacaaggccaagcccgccgacgccgacaaggtaccgtagcatcgttgtccgcttgacatcgagcggcacagagctatctgatctgcatgtggaaattacattgttgtgtggactctacactctagctttcaagtcgctgcaaacctgtcgggcaagtcccagacgaaactttagatgccgaactggtcctgatgcaatgggggttgggatggggtcctctgtctactgaacaaaatggatggggatttgtggaacactcaagtacgttttgcagggtttagttctcaagaacatggaatgtccagatcatgagttaatctggactgtgggtttactttgactgaacgttttttttttacaccagaggggatttagaatggggggatttgggtctaattctgtagccgtgtgtgaatggcataatgctgtggaccctaattgagccaaggagcttggtccttggagttaactatgcataaatttccaacacaaacatgtacagtaccctattctacttatagggtctgatttctatatccgtgagttatcattcctctgcttgccccatggcctataaacccaataagcccttgtttggatgcactccgatccattaatcatccatcctaaattcccaatccctctcaacccatgtggattggagtgcaccgaaacaatccctaatcagacatgagtctgtaattttttttcagaagtcaaaagatacatagccaagtacggaagtaaagtcttctacgattattacaagattacaaaccgtcatgctgaactctacttccatttgttttggttcacaaaacagcgtcaagagggtggggtcaagagggtgggatcaagcgtgcgttcacaaaacagcatcaatctgctcactgtccgaaacaaattgttctgcgtccttagtcaatgaaaccactctgctgagacgaaagctaggggagcaaatggggttagagaccccagtagtcctaggcataaacaatggatactaggtgttgtgcgactcgacccgtgcagtgttgtacctaatgcgttaagtatcccgcctggggagtacgttcgtaagaatgaaactcaaagaaattgacgggggaccgtacaagcggtggagcatgtggtttaattcgatgcaaagcgaagaaccttaccaagtcttgacatgccgcgaatcctcttaaaagagagaggtgccctcgggaacgcggacataggtggtgcatggctgtcgtcagctcgtgtcgtaaggtgttggattaagtctcgcaacgagcacaacccttgtgtttagttgccactatgagtttggtttggaaccctgaatagactgtcggtgttaagccggaggtctgagaggatgaggccaagtcatcatgccccttatgccctaggcgacacacatgctacagtgggcgggacaaagggttgcgatcttgtgagggtgagctaactccaaaaccccgtcctcagttcggattgcaagctgcaactcgcctgcatgatcgctagtaatcgccggtcagtcataagtgttatggtctggtgtctatgttttaggttccaaataacattttcgagttcctttcctccacgcatttaggaaaaaagagtgtcagtcaggtacatgtaccatcatcccttttcaactcatccggttacagtacactgcagttaccgtctcacagattgggattgtttggcataggctttaatatgtttgtcgcgttacaaacttggatacaatgatttcaagtcgtccgactaatcgcgattaatcgcgattagtcgggctagtcggttttagtggagcgaccagggtatccgacccgattaggtcgactaatcgtccagtcgtccgattagtcgtcgaccaagtgcgattagtcgtccagttaatgtgtggacgattagttaggtttggttggctggtggctgacctgtttttgctttgggctagacgtctagtaagtctgcaactctacatcatatgttataatatgttatgtagtgagtagtgagtgatattcagttcatgttctgaaatctgaattcttaattctgaaatgtgatctgagtgcctgacaattatagtattcataatttctatgatgttctgaaatctgaatgttcaatggtgttctgaaatctgaattgtccactctccactgtccagttctagtattcatatttgttttgtttggtaatttggttaccttgatattgcctcctatatgctatattgctatatgctactgttggggg

SEQ ID NO: 19559 - DNA, 307 bp, Zea Mays
cggcgattggagtgtacgtttttttaattgaaactaaaaatgacatgtttgtgaaaaaactttaaagggccaaaatagaaagaagaaaagacggggaagaaacactcgcttctgagtttggtcgcggttttgcccctcccttcttgaactcctccgctcgatcgaactcagttccgattcggcaggtacgtgcgaatttctcgtccctctaccgcgtggattgattaccaacgttgatttggcgaggcaatcgcgggggatggaggggttcgatcgctgcgccgccgattctcccggtccttaggtc

SEQ ID NO: 19560 - DNA, 1173 bp, Zea Mays
atgggcgcggcctccccggcgatgtgggccgggctggtgctggtggcgttattggccgtatcggggccggcggtggcggcggggctgccgaggttcgccgaggcgcccgagtacaggaacggggaggggtgccctgcccctgtggcgggcgcgggggtctgcgacccgggcctggtgcacatcgccatgacgctcgacgcccactacctcaggggctccatggcagccatctactcgttgctcaagcacgcctcctgcccggagtcgctcttcttccacttcctcgctgcggcggagggcggcggcgcgccggcggcctccgggctccgggccgtcgtggcggcctccttcccgtccctgagcttcgagatctacccgttccgcgccgacgcggtcgccgggctcatctccgcgtccgtgcgcgccgcgctcgaggcgccgctcaactacgcgcggaaccacctcgccggcctgctcccgcgctgcgtgccgcgcgcgatatacctcgactccgacgtgctcgccgtcgacgacgtgcggtggctctgggagacgcggctgcccgccgccgcggtcgtcgccgcgcccgagtactgccacgccaacttctcgcgctacttcaccgacgccttctgggacgaccccgtcctcggcgccagggtcttcgccggccgccgccgcgcgccctgctacttcaacacgggtgtcatggtcatcgacctccggaggtggcgcgtcggcaactaccgccagcgcatcgagcgctggatggagatgcagaaggagaagaggatctacgagcttggctccttgccccccttcctgctcgtcttcgccggcgagatagaggccgtcgaccaccggtggaaccagcacggcttgggcggcgacaacgtgttcggtagctgccgccctctccataacgggcctgtcagcctcatgcactggtccgggaagggcaagccatgggaccgtctcgacgccggcaagccttgcccactggaccacacctggaaggcgtacgacctctacattggcgagaatgattcatcatcttcagggccgtcacggtcagcattgtcatctttggcggcatgtgccgccacagcggctgctgcaagccagctgccgccctcggctgtacaggacagtgaggtgaggggcggtatacag

SEQ ID NO: 19561 - DNA, 1265 bp, Zea Mays
tatcttagtatgagatccatgcagacataccaaagataaaaaggcatccctcagatgggccgacctccaggttgcccagtctcttgaatgtgggtgatggatgtagcttagttatccttgtgcagcatgtttctgcaaacatagaagctggatgattatgagttatgaagtcgcttcttttctgaagcagcatgaaagtaaaaaaagaggattctgattactcttcattaggttataaatgacagagaggcatcgtgcatctcggcaatatcatgacgaccctcgggggtatcgtgaagctccacctcctccacttgcacgaacaaggcttctctctccgcgacgcttggaagctccacctcctccacttgcacgaacgaggcttctctctccgcgacacttggacgaggaattgtctagtcgccgtgccgagatgcgcagaatccgtggagacaatcagcgtctggcagatgaaattgtcagtctcaggcaaaccatgcctcgtttgaaagaagacctccaagtctcaagtcaagctgtaccaaagctccgggcagagaaagagcttgaatcgagggagctgactcagaggaatctgaagctggaagctgagctacgtgccttagaaccccttaggcaagatgctttgcatctgcgatctgaagcaagtaaactacaatctttgaagcaagagttggctgcaaaggttcaaggtctatcaaaagagcttgaacatcagaaatctgaaagccagaaaatgactgctatggtagctgaacgtgatgctctgtgtcaagaattgttgcaggccagggctaatcttgagtttgagaagaaggcaaaaccagagcttactgcacaggttcaggcaatggagaaggatcttgtagctatggctcaagaggctgagaagctaagggctgatatttcgaagagaaacacacctagtttcagcggccgtggagcttatggaacttctttgtcgacgcctgggatgggtttgcaaggcatgtatgatggcggctatgctacggccgggagccgctatggcagtggcgctggggcttggagctcgcatgatccccatggttacccgcatctgtaattgtgcttctgacccgtattcactcctgaacagctcctagagtactttggcaattttctgtagtagtatataacttgtgctttttggtgcaccacattgctaccctttctggtcaatgaaatgcagtgtattgtgaaagcatctaaacccttaagctttg

SEQ ID NO: 19562 - DNA, 712 bp, Zea Mays
atggatggaaggggatcgcgggggcaaccgattgaagccatggatgcggtagcggtcataaggaatgaagcactgttacttcttacttatttgactcgggatgcagaggaaattcaaaaaattgttgtatttgagggtgtgtttgagaagatatttagcattatcagagaggagggctattctgacggaggtgtagttgttcaggattgccttgaattgttaaataatttaattcgacacaacgcgtcaaatcagatgcttttgaaagagacaatgggctttgacccattgatatcaatactaaagattaggagaggcagtgcatttaattttacccaacagaagtaaatctcctcgctgctttaaatactgtggaattgcttttgatggtgggcccatccggtgaagcaggtaaagatgctaacaagaatgcaaatcaaactgcattggctcagaaaaacattctggaccatcttcttttgttgggtgttgagagtcagtgggcccctgtcgctctccgctgtatggcactgcgttgtattggcaatttggtgttaaggaatcctcagaatcttgattctcttgcaagaaagcaagttggagaagagcctcatgttcaacctgcactgaatgccatcttatctataatcttacggacatctatagcgcaggaatttgttgctgctgattatgtattcaagtgtttctgcga

SEQ ID NO: 19563 - DNA, 3086 bp, Zea Mays
ccctggacattttgatgtcgataccattaactaaaataaatagtttttcttcgatgtaaatgtccgtaaaatatttagttcctgaatttctttcttcctttctagtgtgactgtcccatctaatattctgaaggtgacatgtcattgttgggttgaaaatcacaaggggagagaaggaaaaaggcagggaatgggaggggaaagtacctaagccagctaggaagcaagcagctggaggcagagatgccaaccgcaatgtcctgtcatctttgctcatgaccaaatcggtcaaggtcgcccatggatggagatcacaggaggcaagccgccgccgcggtcaccgtcacgcaagtcagcccggcgcggcgcctgatcgcctggctgaggcttctcttccgggcgttcgttcatagatacggcaaggtcgcgagctggaacgcggcggggcgccctgtcttcgtcgtcctcgcggtcttcttcctccagaggagcctgcgccgccggtacctgtcatggaaggagtcgtcgcgtcttccgctgatggccgccgccgccgtcaccgtgcagacgaccgtcagggcgatggcggcgcagcgcgagctctctgtccggaagcagaccagagctgccacacgcatccaggcgcaatggcgtgcgcacagggcggtgtggagctacctgacgacgaagagagccgccgtcatctgccaacgtgcttggaggcaaagcgttgcacgcaaggagctcaggaagctcagactgtgtgtgcaggagaatctggagagggaaatgctggaggaggtgtgcaggctgcgtgagatggtggacgtgctccagcaggctgtcaatgacgccgagacgagggccgtcaacgagagggaggcggcgaaggatgcgatggcgcagttggaagcagcctcggcgatcgaagagaccgtggtgatggttgaggacactgagaaggtcaagtcgctgagtgccgaagttgaccgcctcaaggatttgctgggagctgaaatgagtgaaacttttgccgccaagaaggcgctttctgaagccgagctgaggaacgagaagctggccaggctgcttggagttgaggaagttaagaacaaacggcttcaagacaccctgaaaaggatggaggagaaggcttctagtctggacgaggaaaacagaatgctgcgacaggctgtggcgtcaaaccctgctattgtcaggtcgccatcgggcgaaaaccatgaagcacctggaattcagctcctgataatgagaaatcaaggaatggtacagtgaagcctatagcagtggatcgggaggctaatgtccatggcgctgaacagcccagctcaaatggtcaagaagctgggaagcaacagcaagagcttctgatcaagtgcctatccgaagacctgggtttctcggtcggcaggcctatcgctgcatacctcatctacaggtgtctggtgcattggagatcatttgaagaagagaggagcgtggtctttgaccggattatccagaagattactgctgcgcttgaggcgcgagacaacaacgatgcactagcatactggctgtccaattcatgcgcgctcctggttcttcttcaaaggacactgaaaatcaacggggtagctgccttggctcgtcagaggcgaagaacgtcgtcacctctcaaggtgccacagcaggaaaaccaagatccagctcccgacggacagttgatctgtggactagcccaagtctaccaggttgaggccaagtacccagctatcgcgttcaagcagcagctcaccgcactgctggagaaggtctatgggatgatccggcacaacctgaagaaggaactgtcgccgcttctgggcctctgcattcaggcgccacgcacattcgtcgtcagtcccagaggatcgtgttcccaaggaacagatctggcgcaacaagcctccatggcgcattggcagagcatcatcaagatcttgacaaattctctcgatgttctgaaatcaaattacgtgcctccgttcctgatctgcaagatgttcacgcaagtcttctcgtttatcaatgtgcagctttttaacagccttctgctgcggcgtgagtgctgctcgttcagtaacggagagtacgtgaaggctgggctggatgagctagagcattggtgcttttggctgactgaagagtacgcaggatctgcatgggacgagctgaagcatatcaggcaggcagttaccctcttgatacttgacgacaagcatagccggagtctcgcggagatcacagacgacttctgcccagtgctgagcatgcagcaactgtaccggatcagcacgatgtactgcgacgacaagtttgggaccctgggcattccatcagaagtcgtctccagcatgcggaccaagatgatcgagggctcgtcgagcagcccgtcggcgcacgacgacatcaactcgttcctgctagacgatgacttcagcataccgttctccgtggatgacttcacgaagctgatagtgcacgtcgacgtagcggacatggatttgccaccgctcattcaggagagcagcggcggcggctccaaaatgggacattgaggagtgacaatatgcacgccttttttgtgtgtgttgcggtgatgtgcatagtgcgtgacatattgctctgagaccagggttttgtttttttcttcgtcgactggtcttccatttttctcccatatgactactacctgagtgagtagtgcctgtttgggtttgcgcgtgtgtatgattgtacagaactgagctgtggcatataaggtaaggaaagaaagcctgtgtgattcaattttttttatcaaaagagtgagtgatgcttgcaagtcaagctttcctttgccaagtgtgatctcagattctaactgctgtgacacctgtacttttgttgtttgtttgttttttttttttttttgaaagaagcctggcgctgatggcctccatttaactgttgagcatctgtcactcgctcaatagttaatggtctagagaaacattgtcgaccatctgtgtcactagaattgatgacttgttgtctatccttat

SEQ ID NO: 19564 - DNA, 1299 bp, Zea Mays
caacgcaatctagtttgctagtgacaatcctgttatgtccacgggtaccctcatgctactcagtagtcagagcaattattcaaaattaacatatgacggagttgacttaatgggtgaaaggctagcagaggaggttcgacaagttgttcagaggagaagaaacttgaggaaaatatcttttgttgctcattcacttggcggcttagtaacaagatatgcaataggaaaactttatgaacctgccatggatgaaacatcttcttgtgacattgataagccttctgatgaacaaaatgtacgtgatgttggtaaaatagctggtttggaaccaatcaattttattacatctgctacacctcacttgggctcaaggttgaataagcaacttcccttcctttttggtgtcccacttttggagaaaactgctgcaggaacagcacattttatagttggaagaactggtaaacatctattccttacagacaatgatgatgggaagcctcctcttctcctacgaatggttgaagattgtgacgacgggaaattcatgtctgctttgcgctgtttcaagcgtcgtgttgcctatgctaatgtaacatatgatcatatagttggttggagaacatcatcgcttcgacgtcaacatgaattaccaaaactcaagctaacagcaaacgatgaaaagtatcctcatattattaatgtcgataaaggaaatctagaggatcatcggcaagagggatctgtagaagattcactggcagatagttatgaagaggtgatgatccgtggccttacacaagtggcctgggaacgtgtggacgtatgctttcataagagttggctaagatacaacgcccataataacatccaggttaggatccatccaattaattcagatggagaagacgtcatataccatatgatagacaattttgtagtgtagccaagtagtccgtccggtgaatgccaactactacgtaaaagattactgctatttccagtggattcgccttgagaggtcattaatcttttaccatgtgggttgctatgcacaacagctagataattggcatcaatcagcacgtaactcatacgtgctgctaggtgattcgagcgtaggacctgtgcttgttggttgttgctggcaatgtaaatataagtgttaggtaatgcaaatatttgcatgacagtgcatattcttgtaaatgggaatttaccatgttattggaaatccaaagttcaaactatctcaagcttgttggttgctgtgctgaaataaaaaagatgttccttttc

SEQ ID NO: 19565 - DNA, 4355 bp, Zea Mays
cttttacatttataaattactgcagcagccagccagccagcaaatcacgccggccccacaagacccaagctgcaaaactatccagccaccattcacccctccgcactccgcctccgccgcctccctgccctcaactccacgcccggcagggtggccgctcgccggcagccaaaccctaggcgatcgcggaggccaaccacgcttcgggcgcgatcagccgccgccatgcagggcttccccggcggcgcccccgatccgcagcagctacaggccaccatgctcgccatcgagcaggcctgctccctcatccagctgcacatgaatccatctgaagcggaaaaagtgataacttcgctgcattcgtctctcatgccttatcaagtatgcagattcattcttgagacatcccaaaaaccaaatgcaagattccaagctgctggtgcaattggtgatgctgcggtaagggagtggggagttcttacagatgacaataaaaggagcctaataatatattgtttaaactatgttatggagcatgcaagttctcctgatggctatgtgcaatcgaaagtttccgctgtggcagctagattactgaaaagaggctgggttgagttttcggaccaagaaaaagcagctatcttctttgaggttgagcaatctatccggggcatccatgggcctaatcgacagtttgctgcaatcaatttcttggaaaccttggtttcagaattctccccttcaactgcttctgctatgagcctgcctaaggaatttcacgaacaatgtgaatactcactcgaagtgcagtttttgaaggatttttactgctgggcacaagctgctgtgttcaatactgctgacaaaatcttgaattcaactgtaacaataccggacgaaagagcatgttcagcagcattgcgcctgatgtttcagatactaagttggaatttcaaacatactgtggagcacgagagttcagatgctaagataaatttcggcttaaggattgatacgataaatctgaagaagtttgaacgttcgttggtgaagccagggtctatgtggagagagattctaatatcaagtggacaccctacctgggttttaaacttctataccaccttgcgccaaaagtactcatatgatacactgtggggtgattctccaattgctgtctcttgcagacagcttatagtgcagttatgctccttggcaggctctgtgtttcctaatgataatggggatgcacagattaaacaccttatgctgatattatctgctgttgttctatggattgaacctcctgatgtaatcacagcatcaatccgaaatgggggaagtgaaagtgagttcatagatggttgccatgccttgctttcaatcgcatctttaactactggctcactttttgacaacctcctaaaatctataaggccctatggtacagttaatctgctttctgctttgacgtcagaagctgtcaagtcggttctgaataaccagagtgaagaggaaacctggggcatagattcccttgatattttgttagaaacatggaatgttcttttgggggacgtagatgccgataaaaatccaatctcaaccgatggagcacttgcatcttcaagtttgtttaagatgattgtggagtcacacttgaaggctgctgctgattctgcgttcgaggatactgatgatactgaatattttcatgtttctgtttcaaaacgtgatgaacagttagccttgtatgctctaatagcacgggcttctgcaaatactactattccatttcttgcacagttgttttcagaacgatttgcccggctaaatcagagaaatggtgaaagtgatcctactcaaacactggaagagctctattggctgttgttggttactagtcatgtcctaactgactctggcgaaggagaaacactacttatccctgaagcattacaggctggattccctaatgtgattgaagcagcacatcatcctgttgttacactctcctggtctataataaatttttccaggcagtgtttagatccaggaattagggcaaaatacttcagtccacgactaatggaggctgtgatctggttcttggccagatgggttgcaacctatttagtgccacttgacgtgagtagaggaaaagtaagcagagaaattgataatgtgggtacaaatggatcccaacattccagaaaactgctaaacagttttgcttgggaaaataaccaaggagagcttgttcttgattttgttgttctcatttcaatgttagctcttactacctatcagggagaaaatgagttgcagacactgacatgccagaagctacttgctacagtcgttcgccggaaacacacatgcacttatcttgttcaactggattcatggcgtgatcttacaagagcttttgcaagtggacggtctttgctttcattgagtggacgtttacaaaggtctctagcagaaacacttgcctctgcagcttcctgcatcaaagatcctgaagcatctgcacagtacctgagggatctcatgggaccagtggcagggtgcctggtagaaaatgctagcaggagtgatctaaaatctgtggcacagcaagcagatgttatttacatggtctgttgcctattggaacgactaagaggcgctgctagagctactcaaccccgaactcaaaaagttctatttgagatggctcatactgtgatgaacccacttttgactcttctggaggtctacaaaaatcattccacagtcgtatacatgatactcaagtttgtggtggactttgttgatggtcaagctgtattcctggatgctaaagagacatcagctttggtgagcttttgcttgcaactactccagatatactcctctcataacattgggaaggtaatgctctctctttcttcaagtctgcgtaatgagtcacaagcagaaaaatataaggatctgcgagctttgcttcgtcttctgacaaatatatgttcgaaggatttggttggctttctgtctgattgtggcggtgaaggttcacctgatatcgcagaggttatctacattggtcttgatattgtgacccccttgatatctttggatcttctgaaataccctaaacttagtcgtgattattttgtgcttatatcgcacttgttggaactgtacccggaaaaggttgctcacttaaatagtgatgcttttacaaggattattggaagtcttgacttcgggctccgtaatcaggatagcgatgttgttgagaggtgcctggcagcagtaaatgctcttgcttcatacaatttcaaagaaagattaggagggagaggaagactgaactcgcagctcatggaatctgaaggatctaatggcaaactgcaggaaagcatatcaagtcacttcttgagacttctgttgcaaatacttctttttgaagatttcagatcggagttagcaggttatgctgccgatgctttgcttcctttattgttctgtgaacaggagctatatcagaggttggtccatgagttgttggataaacagcagaatccgaccgtaaaatcaaggctggcaactgcgttccataaccttacaagttcaaacaatctctcaagctcactcgaccggccaaacaggcagagattcaggaaaaacctccttagcttcatggcggatgtatcgggcttcatgcagatcaagtagatgcgatggcagggaacaggtgatgtttgaccggtcaattaaaccccgaggaagcactgcaccactgtggtaggggtgcatgtgggcaccacatgtctgtggattgatgagagcgaagactgccacgacaagtctagtagatcttgaagagctagtgtcaccagaaaagacagggagatgagctagtcttagggttggcattcatagcgcatttgctggacaagatggaggcgtccctggccacgagatcgtcgtgtaaatgcgtttgttagacgcacagaaacggtggggattttgtggtggcgactcgttttgttcaattcccacaggcagaaggtagagatgttaagttgatgtaaataccgtttgatttaaacatgccttattcgtaggagaaagcgacacggcttgctgtaacttagggtttattactctttctcgtggcataggatccccaaagaagtctttgctggggtatttgcagccaaacgatgaccagtatgattgcgagaggttttcaatcttttgtaccaaatttggcctgcagttatgatgacactgagtgccgatacaggcatgaggcattccaaaattggcgggcaccacatgtgtctgtctgctgtctcagtggg

SEQ ID NO: 19566 - DNA, 2779 bp, Zea Mays
tgatttgccacaccgaggcccaaagggaactgtagcaggtttggttgttggggagcttgagctttgccgtcgtgtatttatggtcctctatcgcatatcctcgaataaggatcctggagcaggtcgcggcgagtcccttagcatgaaggagcatgcagcccttctgctggagaaaaaattgcttgatctaccaaaattgttggacatatgtgctatatatgagcatgacaacggcaagttaacaagttcactggttacgaatgttattaatgtgcagccgagtgtactggatgacattaatattgtcattccccagttcctcaacattttccacacgatgcatgataggtgcatgacatctttacaggtgctcacctcaaccggatcaattgataatggatatgttcagcttcagaaagatttcatggaggttacttctatccatgcagtgttagattttataaatgatgcgattgttactctggattcttttgttggtgcttatcaacctgccgctttattgttctgtactaattttgaaatgagctatggagttgaggaattgctgaatgctcttgcaaggctgtatagttcattgctaccatcattgctccatgggtttaaagttatgcccaagtctcagagcaatgcagaggcatcacttgacagcacacttagtgacattcctcttgctataaggatgttgtcaaagagaacagcgagatttggttggagattgttgcactactgttatttgaatgatcaagttagggagcatgatgctcaaacttctactaagatgtttccagctaaagtcgaagatcctatgatcaggggagacatcttggttcaaacacttaaagatataaatagagaatccacttactcttctcaagtgaatcatggaaatacttttctccaagaacttgaaagtgaatttcaattaatgagccagattggtgatattcggaacaaaggatggatatacatggatgatgagcagttccagttcttatcacgattgtgtggatctactcacacttcttggaatggcatatctgatttgccagtctcttctcatggtggtgaattacagcagaaggatgaggaaacagcgatggttgagtccaaaattagtcagataagggatcttttccctgattatgggaagggtttcctttctgcttgtctggaagcctacaacctgaaccctgaggaagttatccaaaggatattagaaggaacacttcatcaagatctgctagctttggatacttcattagaagagatgccacacgaaaaacctgcaccaactgctgtgaaagataaagggaagggtatattggtggaaactgtgcctcaaattacaaagaaaccccataaagttgctgagacacattactttgttcaagatggcctatcttcagcaacttcatcagcatcacaaggtccatcttctgcaatttcaccagcatcccttgggccatcttctgcaatttcctcagcattccagggaccatcttctgctatttcatcagcatctctgggcccatcctcatccatatcatctgtcccaaaaggtagatttacaaggaaggccaatgatgatttgccggacactgcaatcctggactcgaaaaatgctaaaaatgcagctagatctgttatccttgactcgcaatatgagtatgaagatgagtacgatgattcatttgatgatcttggcttcagtgtggtagagtcaagttatgaggaaactgatggtgtcaatgacgctgaggcttcatcacatggcccaagatggagttcacagaagaaaccacagttttatgtcaaggatgggaagaattatagctacaaggttgctggttcggttgctgtatccagtgctcgagaagcagctgtcatgaggcaaactcaaaaagagacaatctatggtctgggtcgtggtggaaatgttccttttggtgtcccgaacaggcaacatatagatgtggaggcagaggaggttggtgatgctgacaactcaggcagaggttcaaattcccgtggccggggaagaaaaggcggaagggaaggcaaccgtccggaggagaatgagagctccaatggacgaggctctggctttggtggtaaaagaggaggctggagtcagggcaatccggctgaggaaaactggaaccctaatggtcaacaaggttttggccgtggtggcagaagagggggctggaatcagggtggcccagcgaaggaagacggtaactctagtggcaggcaagaaagttttggccgtggagcaagacggggcagcatgaaccatgaccaatcagccgaggataatgaaggccataataatcccgcacaagactttactcgaggaccagctcctcgtggtggccatggaaggggaggtggccggaaccatcacaggagagatcgggcaatgaagaagcatatgcaaggattgacagggctttagctgctggtagccttatgcttttgatgtgccgtactgtaaatggcatttttggaggcactcctacttgaccatccaaatttttgtgcttgttctgtttttaaatcaaataacgccatgaagtaacccacatatgttctcgtaacatttgtgattgccctaaaaagggtaatagtgtatgtagttctaaacatgcttgtaactcgttaaatacataattaattctctagcgactgaaaagaaaaatcatgaaaccaaaccaattttgttagctttttttgtcatgtgctatccagtaaaaca

SEQ ID NO: 19567 - DNA, 202 bp, Zea Mays
gtgcccccttctcctcacagcctgccttgagacaggaaccgcccagcacgccgctaatctccgccatggcgccgcccactgatgtcgcgccgtccacctcgccggagcacgtccccagcacccgcgctcgagtccgccggggtgagaactccttgccgtctacctattttttgctccctccccttccgttcccggcggtcga

SEQ ID NO: 19568 - DNA, 1623 bp, Zea Mays
gtcaaaacatgataatttttgcttttgtttgggtgaaaagcaccgagcttccggatcaacagcaatgaaccataggagcagtcgttcccacagtatcttaactgtccatgtaaatggaaaggacattgctggcaatgtgagccgtagcagtttgcatttggtagatcttgcaggaagcgaaagggttgataggtcagaagccacaggagacagattaaaagaggctcagcatattaacaagtcactctcctgccttggagatgtcatcaacgcattagctcagaagaactctcacattccttatagaaatagtaaactcacccaactactacaaagttcattaggggggaatgcaaaaatgctaatgtttgcccacataagtccggatgcagaatcttgtgcagaaacccttagtacactaaaatttgctcagagggcttctactgtagaacttgggactgcactcgcaaacaaagaaagcagtgaagtaagagagcttaaggaacaggtagatactctgaaaaaggcattagcaagtaaagaactggaaaaaacaactcttaaagtgaagggaagtgcaaccacgagtgagagaacaaagcaagtactggattgcactccccctaggccacggagattaagcctagagaatgctagtgataaagccaggatgccagaaagaaagatactgaaatcccctcgttcagctgtgggtataacccacgacaaggaatgcaacactgatgccttccgtcacgccaaccaccacgaatcactaatacagatgtcagcggcatgcgctgaagttcttgttagagaggaggagaagataatttgtacagttgatacagtggaattttgtcagctacccactgaagcttataatctacttaagcaatcaggattaaatactccagaggcagcaccttgtaggtcaaggaacctgcgcactgaagcaagttgcggtgatgctctttcttccactaccaaattggagaaaataatggcaggtactgcagtgaagaagggatctcaactaaagaagtcaattcaaagcagcatagggagattgattcatggtactgaaagaaggaacgcgcagcattcagcacaagggactccaactaaaatcatagctagcggatgccataataatgtctccccagttacagctgatatcaggttaaggagaagacagtcactgacaggtatcccaccaccgctcccaactatgtcacgcagatcctcacttggagggaggtcggatacaagttcaaacgacaaaagaggtgcaaaaacaccacctcccgtgaactcggcagcaaaggctaaaagatggctttgaatctgaagcagaactgtcagaaaattttgactccaagcagagctcaaggcagacacgtatttggtgccatcacttaactgtggttttaggccttgggtggtggttacattctttgtaacagctgaagcattagttgtacaagggggaagggtgtgtgtttgttgtattctggatttctatgatggagcattggagcaactcacttgttcgatttattatgggatgtttgttttgaggaaatcaccccatctaagatgaagtggtgcattatgagttca

SEQ ID NO: 19569 - DNA, 3128 bp, Zea Mays
gccgctccggcgtccagcaaatccacggccctgctgaatttgtctcgccgctcatcgaccctgtttcactatttggaactgaattatctcatccagcgattccaggtccccgtagcgccatgaacctgccgacgccgctcccgcccaccagctccccggccgcggctccccgcgccagccgtgcgcctgtcgtgcctgctgcccgacgcggcaccggccgccggcgtcggcggcagaaaccgtcttcgtccccgtccacccgcgagaccgaggccgagtacgagcagccggacgccctcgcccgcatcctccgcacagaggccgccatctcgggcgtctcccgcaaggctgcggccgcgcggcagcagtccacgaacctttggccccgcgccgtcctcgaggccctcgactccgctgtcgccgcctgccgctgggagtccgccctcgagatcttcgagctgctgcggaagcagcactggtacgagccgaggtcgcagacctacgcgcggttgctgatgatgctcggcaagtgccggcagcccggtcccgccgccggcctcttcagggagatgctctcggagcggctccggccgacggcagacgtgtacacggcgcttatcggcgcgtacggctacagcggcttgctggagcacgcgctggccgctgtcgagcagatgaaaggcgccgctgactgcaagccggacgggtacaccttctccgtcctcgttgattgctgcgccaagtcgcgccgcttcgatctgatccctgccgttctcgacgagatgtcgtacctggggatcgaatgcaattcggttatccacaacgcgataattgacgggtacggcaaggccgccatgttcgaggagatggagggtgcgctctccaccatgcttgagagtggtagcaatgtgccggacatttacaccatgaactccgtcgtcggggcgtatggcaaccatggaagaacagatgagatggagaagagttacagtgagtttcagctgatgggtgttgagccagataccaagacgttcaacatcatgatcaggtcttatgtaatagagtgtttcggacgtgctggcgacatcgaaaagatggagtactatttccgtcttatgaaaattcagggtgtcaaacccaaccccatcacctactgctcgctggttaacgggtacagcaaagccgggcttcttgataaggttgcgggggtcattcgacagaccgagaacactaatgttgtcttggacacaccattctttaactgtgtgataagcgcatatgccaagtctggggatatcaaaatcatggaggagatgctgcagcttatgaaggagaagaggtgcaagcctgacagaataacttatgccaccatgattcaggcatacactgcacacgggatggatgaagctgctatgttgctggagatagaagctgaaagatttgataaacggttgctgggatcggtttctgacattgatggcaaataatgcatacaaccattagtcctaatctaaggccggggaaaagatgttgctgcgcaagaggtgcttttggtggagatagcttggaatccatccacaaccggatctgaacaaaagggtcgggccaattggatgcagagccatgcagatagcaaggaaagcagatatctataaccctttctaaattcctggtccgataattagttccatgctcaggtaatccatctgtttggggctcatatttaggatcactgttcaacaagacatctggtcagtttggtcactatgttgtcaccactgatgtgctggatatatttcttattggcaaaccgaattctgttgccggtaagcatgtcgtcaccgagtttggtcactacgttgtcaccaaaaggccacacatgccactgtgctgatcctattgccagttgtagcagcctccaagtgagactgggaggctggggatcgagagcatgaagcaagcagcatggatgacgctgtcagctcacgaacaaatcgctggtggaggcactcgcaggtcatgggatttgcgttgcaggcttggtccaagtgaaacgaactatatagatcttcaatggccgcagaagtggtaaaaccctgcaaggaattcatgttggagtcatcacatttgtctgtagtcactgaacatttatgtgctgatgaagtggtaaaaccatgcagatgaagtggtaaaaccatgcagaatgtagcgtccgcattctgtatctgttgttgatcaattatgtattcagatttgttttttgcgcctacttttgtgcaatgtaaaataagcagagtatcaagctatctgatcaatgcacgttcacgaacagagcagtgaagttgacatggccagagccagtgaaatccatgaaataaacctggtcgttccatacaggtttatgagtttattatccctctgtactcgaaccaataacttaacacgaaagggggaacatcttatatgaataataataaatgtagaaaaggaaaagaatcacagcttccagtttttttccttttataccctccttttcttcctaaattctgagttttcaccataaccatattgggatctttttcagacaaatccttactgagtcccgaattctgatctagtcgtgtatcctgagataagcagctcagctcttcttccactcctccgcggcgccgtcggtgcccgcgagtgagtgagtaagtgggaggtgaaccacaccaccggcaggggagaagaggtatgggatggtcttggtttggcccagtccctcccagcccagctggtagcgtgagtgggaggcgaaccacaccaccgacggcagcggagaaggggattgtttggtacagctggtgcaaaacaaggtcacgtggtgcgtctccctccgtctccgtctcccatgggcaaatgccaagcggccaaactctaccgtaccgccgctagcgtggtaggatgatggggttggaaaatccttcgtcccaacataaatgtgcacgtcccatttctgatctcaatttttgagttaaaaatttaaaagtttaacttaaaattttaataacactatgaatacttacctctaaaagacagtattaatatttatatattcaaatatattttaaaagtatactccatac

SEQ ID NO: 19570 - DNA, 1650 bp, Zea Mays
cgtgtctaattcttcttcgcttctactccagtcctgcattacaccataaactgcagtgcttccagagagcctgaccgaccatccaccagcagctagcgtagcgagcgatggccaccgaactccggtcgccgctcctcccgccgccaccgccacagcgccgactaagcccgcgggcagccgcgtgggcggcgctcgccgtctcggcgacggtcctgctcctccccttcctgatcggcagcaccaccaggaccaccagcagcagcagcacgagacaccctcggccccgatcctccccaccatccaaccccgtggagctgaccctcctgaccggcgcccgcgacaagggcgcggtgtgcctggacgggagccccccgggctaccacctgcaggcggggtccggcgccgggtccggcagctggctcatccatctcatggggggcggctggtgcgacaccgtccgcagctgctccgaccgcaggacgacctacctcggctcgtccctcttcatgcagaaagtcatggacttcactggcattctcagcaacgacccggcacagaatcctgatttctacagctggaacagagtgttcgttaggtactgcgacggggcatcgttttcgggggattcccagcgcgaggctgggcctgggaacggcacgctcttcttcagaggcctgcgcatctgggaggcagtcctcgacgagctcatgcacaagggcctcgcgcattccaaacaggccttgctcacaggttgttccgctggtggtctggccacgctgctgcactgcgacgattttcgcgcacggtttccccctgaggttcctgtgaaatgcctctccgatgccgggttctttgttgacgcgaaggatttgtcagggcagcgctccatgcgttctgtgtacagcggagttgttcatcttcagaacgttactaaagttttgcccaaggactgcctcctcgcaaacaaggacgatcccacgcagtgtttcttcccggcggagcttattaagagcatcagcacgcccacgttgatcgtaaactctgcttacgactcttggcaggtacggtttgttgttgcgccagacagctcgtctcccgacgagtcatggcgcggctgcagagacgacgttcgcagatgcaattcctcccagatccaagtcctcaatgcatttaggaagacgatggtagatgacctcgtcgaggctgccgacggcaccaacagcagctggttcatcgactcttgcttcacacattgtcagactatcttcgacacctcaggatggaactcagcggccgcgccgaggatcggaaacaagacactgacggaggtgatcggggactggtactttggtaggagcccgagcccggtggtgaggcaggttggctgcgagtatccatgcaaccctacatgcaacagtcagccaccagttgctggcttctacaacaaagctctgccgccgcgtcaacaagcaaacattcttgtattggggtgaaccatacaagtaaacggacaataattctaaagataaatatatatagcacacactgcatgagagaacactgaaaattgatggaaagaaaattgacgtacgtacgggctcttgttggaccctgttaatgatgataattaagaagtgatggatgatgatg

SEQ ID NO: 19571 - DNA, 60 bp, Zea Mays
gccggatggccgggtggggtccccggtgggcctggcttagggtgtgccagggcccacccg

SEQ ID NO: 19572 - DNA, 1144 bp, Zea Mays
caatggaaaactttggaaattaaggaagaggcagaccaaccttggattggccaacaagactaaaaattgctttgggttctgcgaagggattggcatatcttcatgaagattgtcatcctaagattattcatcgtgacataaaggcctcaaatattcttctcgatctaagatttgaagctaaggtggcagattttggacttgcaaaattcacttctgatgcaaacacccacgtttcaaccagagtgatgggcacatttgggtatctagcacctgagtatgctgcttctggcaagctcactgagaaatcagatgtcttctcttttggagtaatgcttcttgagctaataactgggcggcgccctgtaaattcaagacaagcggacgacaacctggttgactgggcaaggcctctgatgataaaagcatttgaggatggtaatcatgatgctctagtggacccccggctgggaagtgagtacaatgataatgagatggcgaggatgatagcctgcgcagctgcatgcgtccggcattcttcacggcggcggccacggatgggtcaggtcgtccgggcgctggaaggcgacgtatctctggacgacctgaacgagggcgtgcggcccgggcacagccggttcgtggggtcgtacggcagttcgacgtccgactacgacaccagccagtacaaggaggacctgaagaagttccggaagatggcgctgggcggcagcgggctccagagcagcagcgcgcagacgccgacgagcgagcacggggagaacccgtcggtgtcggtgtcgagcagcgacggcgacggcggcggaggaaccggcgaggagcgtgaagacagacggcaggcagcgtcgtgaggcgtgaggcgtgcccagcctacggcccccgcgcatgcatctgtagatcctagtcctctcgacatcgctacgtacatgtctaattgatagctgacctgtggccgggaggcgggactactgagagattcatgattgctttcttttcttttgtgtgtgtgattctcttggtgggtacactggtctcatgcatgcgatctctgtataaattcaccgactctttaggaactgattactattggctattcgtatattatgagtatactcagtgttgcacg

SEQ ID NO: 19573 - DNA, 756 bp, Zea Mays
ctccttgactctatcgttctgcctaccccaacaggccaacactcactcgagtactcgacaccgcccctctgatatggctcaggcacgcgtgcgccttactccggccggccgcacgccggccgccacgttcctctcgggctccaaccccagacccgcccacctcaccttcttcccgaagcttacccctacctccctctccgccgccgcagctgccaatgcgccgccgccccacatcgtcgtcgtgggctccgccaacgccgacatctacgtcgaggtcgaccgtctcccgctcatcggcgagaccgtggcggcccgcgcgggacgcagcctcgcgggcggcaagggcgccaaccaggccgcctgcggtggccgcctcgcgctgggccctacctacctcgtggcgcgcgtgggggatgacgccaacggccgactcctcgagggtgccctagccgacgctggtggtgtccgcaccgaccgcgtcgcccgcgcggccgatgcgccatcgggacacgccgtcgtcatgctcatgcccgacgggcagaactccattatcatcgtgggcggggcgaacatggagggctgggcggcggggatcggttcggaggacctggaattgatccgaaaggcaggcgtgctgctgctgcagagggagatacccgattgggtcaacgcgcaggctgcccagtattcggttttcgaaatttggggagatatagtggctgtgtcatgtggggtcaccactacactcacaagcgc

SEQ ID NO: 19574 - DNA, 1330 bp, Zea Mays
tatgggtcaaaaaatatatctatatcttaatctatcggatcgcatccaagataagacatgggtcaagcactcggcttgattcaagtggatcaatcgacagtagccatcaaggaaacttttgggaagtttgacgaggtcctagagcctggatgccacttcttgccatggtgcatagggaagcaaattgctgggtatctgtcactgcgtgtgcagcagcttgatgtccgctgcgaaacaaagacaaaggataatgtcttcgtcaatgttgtggcatctgtgcaatatcgtgcccttgccgataaggcatctgatgcattttacaggcttagtaacaccagggagcaaatccagtcatatgtttttgatgtcatcagggcaagtgttccgaagatgaacttggatgatgcctttgagcagaagaatgaaatcgccaaagctgtagaaaatgaacttgaaaaggcaatgtctatgtatggatacgagattgtgcagactctgattgttgatattgagcctgatgagcatgtgaagagagctatgaatgagatcaatgcagctgctaggctgaggttggctgccagcgagaaagctgaggcagagaagatactgcagatcaagagagccgaaggtgatgcagaatccaagtacttggcgggtctgggtatcgcaagacagcgccaggctatagtggatgggctcagagacagtgttcttgctttctctgagaatgtgcctgggacctctgcaaaggatgtcatggacatggttctggttacccagtacttcgacaccatgaaggagattggggcctcgtccaagtcctcgtcggttttcatccctcatggaccaggtgctgtcagagacatcgcagcgcagataagggatggtcagctccaggccagtctgctgtgagcacgttggaaaaggcatgcttttgacattcccatcagtaaagaagtacatatacatcatgaggagtaaaaaaaaacttactagcgataatgtgagtacagcttgttcgttctatctatatggtgcatgtgattattattatggagattaatgttaaataggttcgcatgtattgtgccagaacaaggctaaggaccagtttgcgtaaaaaaatgtatgtttggaacttatctaagttttggagcctgaggaaacccctccatcctgtgcaaactattttgtggtaccctgcttctctgttatcgtgaatgagaatctcatgttcattttctgtgcccagattaagaggaaattctgggatttgattactgacgtggatgcatcctgtgagatttttgaggcaataatcaaaagtgcc

SEQ ID NO: 19575 - DNA, 2384 bp, Zea Mays
ccacgattgccagaggagccacccagcaggtaccatgctatccacaatgaagtttacaagtggtttaacataaaatttgacaagtttgggcggacatcttctccagagcagacagaaatctgccatgcaattttccataaattgatggaaaacaattggctcacagaaaatactatgcagcagctttactgcgatatgtgccaaaaatttctagccgataggcttgttgaaggaacatgcccaaacaaagtctgcaacgcatcagcacgaggagatcagtgtgaaacatgcagcaccttgttgaatccaacagaacttattgacccaaagtgcaaggtttgtaagaatactccacgtattcgtgacacggatcacttatttttggagcttcctctattgagagacaagctggtaaactacatcaatgaaacttcagttgctggtttgtggagtcaaaatgctattcaagcaacaaatgcatggttgaaggaagggctaaagccacgctgcatcaccagagatcttaaatggggtgttcctgttcctcatgagaagtataaagacaagtggtggaagaatcctgataatgtagagttgtttcagtttatgggcaaagataatgtgccgtttcacacgatcatgttcccttcaacgctacttggaactggggaaaagtggacaatgatgaagacaataagtgttactgaatatttaaattatgaagcaggaaaattttccaagagtaaaggtattggagtctttggtaatgatgcaaaggatacaaatattcctcctgaagtatggcgatactacttgcttatgaaccgtcctgaggtatcagatacactttttacttgggctgatttgcaagccaaattgaacagcgagttgctgaacaacttggggaacttcattaatcgtgtgctaagttttattgcaaaagaagctggagctggatatgattctgttgtacctgatgctcctaatgcgggtgaacacacattgacaaagatacttgcagaaaaaacaagtaaatgggttgaacaatatctcgacgcaatggaaaaggttaaactgaaacaaggactgaagagtgcaatgggcatttctagtgatggaaatgcgtatctgcaggagagccagttttggaaactttacaaggaagatcctgcagcatgtgcgatcgtgatgaaaacttcagttggccttgtctacctgcttgcctgtctgctatcacctttcatgccctccttttctgatgaagtattacgtcaattaaatttatctccagaagaaaatttgtcattaagtgaagaaaagggagaaattgcaaaggcaaaatctccttgggattttgtaccagcagggcacagaatagggaagcctgcacctctgttcaaggaattgaaagatgaagacgtagctctccatagagaaaaatatgcagggagtcaagctgagagaagctcaaaagcagcagctgatgctgaagccaacaaagttgctaatcagctcaagggcacaaaattatccgatggaggaacaaaaaagggaccaaagaaacaatctggtggttcgaaatcgaagacagctgatgctgatattacggttgcaaaattggatattagagtgggccttatcaggaaagcagagaagcatccagatgctgattccctttacgtggaggagattgatgttggagaggacacaccaagaacagtggtcagtggcctcgtcaaattcatacctctcgaagaaatgcagaaccggaaagtttgcgtactctgcaatctgaaacctgtggcaatgcgtggtataaaatcacatgcaatggttttggctgcatcgaatgaggaccacacgaaggttgagttggtggagccacccgaatctgctgccgtgggcgagcgtgttacctttgctgggtactcgggggagcctgaggcttccctcagtggcaagagcaagacgtgggagaagctggccgccgagctgcacagtaacggtgagctcgtggcgtgctacaaagatgtgcccttcacaacctcggctggaatctgcaaggtcaagacaatagcaaacggagagattcgctaggcacatctccgaactgcagccagctgacccaatctgggaagtgctaaactttagcatcatgaacctaaacaagcctaaagccttttatgtttgaaaagtcgtgtacaagacaaactctccgtgaagagatgctttttttttacttactctactagagactcctaaaaaataccgatattaattggggttatacatgtcctaagcatagatcaaatataggtagcactcgctgatagtttagtaaaacacaattattatgtttacagaaaatacgattatttggcaaa

SEQ ID NO: 19576 - DNA, 3126 bp, Zea Mays
cacaggccgcctatataaaaggagagaactaaccctaaactcccaaccttcgcctctcctcccgttgtcagccgccgtgcctgttctctctgcctttctaaaagtgcggcgactggttgggctgccgccgactgccggggccttcgccgacctcttcgccggcgaagaggtcccatcaggagaaggagtagatcgtcgacccagaaccctcgctgatggcgactttcgcgaaacctgagaacgcgctgaagagagccgaagaattaatccatgttggtcaaaagcagtcagccctgcaggctttacatgatctcattacctcgaaaaggtacaggtcatggcagaagcctctcgaaaagatcatgatgaagtatgtagaactctgtgttgacctgaggaaaggcagatttgcaaaagatggtcttattcagtataggattgtctgccagcaagtaaacgtgtcatccttggaggatgtcataaagcacttcatgcagctttcaaatgagaaagctgaacaagctaagagtcaggtcgaagcactggaagatgctctggatgtcgaagatcttgaagcagacaagcgtcccgaggacctcatgctcagttttgtcagtggggagaaaggaaaggaccgatcagataaagaggttgtaactccatggtttaagttcctctgggagacatacaggactgttctagagatactaaggaacaattcaaagcttgaagcgttatatgctatgactgctcatagggcttttcaattctgtaaacagtataagagaacaactgaattccgtaggttgtgtgagatcatcagaaatcatcttgctaatctcaacaaatatcgcgatcaaagagatcgtcctgatctgactgcacctgaaagtttacaactgtatcttgatacacgtgttgagcagcttaaagttgctacagaactctccctttggcaggaagccttccgatcggtggaagatatccatggtttgatgaccatggtgaagaaaatgccaaaaccatctatcttggtggtctattatgcaaagttgactgagatcttctggatatcggacagccacttatatcatgcgtatgcgtggctcaagcttttcaacttgcagaagagctacaataaaaacttgtctcagaaggatctacagttaatagcatcttctgttttacttgctgcactatccgtgtcaccttatgacaaaaaatatggtgcatttgagacagagaatgagaaagagcgcaacatgcgtctgtccaaccttgttaacttttcgcttgataacaagcgtgaaaacagggaaatgccttcaagaccatatcttctatcagagttggcctccaaaggagtcctttcatgtgcttcccaagaagtgcgagatttgtacaaccttttggaacatgagtttctacctctggatcttgcatcaaaagtgcagccacttcttttgaagatttcaaagattggagggaagctttcatcagcttcttctgttcctgaggtcaagttatctcagtacatttcagcattggagaagctgacaacattgagagtgctacaaggaagtccatcattgaaaaacgtaaagaagagcttgagcgtcaaatattggagaaggaaaaagaagaagaaaaaaagagaatgagcagtcaaaagaaaactgtggatgaggaaagggtgaggcttctcaatgaacagaggcagagggagcaggaccggattcgtagagagatagaggaaaaaaataaagcagaagcaaaaaagatgctagaagatttgaataaggcagggaaaaaacatgtcgttgttgaaggggagcttactaaggaggccatcatggaattggcacggaatgaacagttaaaggagcgccacgaaatggagaaaaaactgcagaagtttgcaaaaacaatggattatctggaaagggcaaaaaggcaggaagaggcaccactgattgagcaagcttttcaaaaacgtcttgaggaagagaagatccttcacgagcaagagcagcttcgggagattgaactcagcaagcaacaccatgccagcgacttgcaagagaaaaatagactttcacggatgttggagcacaagaatgctttacaggagagaatcatccaagaacgtgcagctgagtttggccgtctgaagaaagagagagatgaacggatgaatcggttgatatcttcaagaaagcatgaaagggagacagtaaggaagttgatgttttatctgaacctggaggaacagcggattgaaatgcttcgtgaggaagaggaagctagaaaacgtgaagcggaagagaggaggaagagagaggaggctgaaaggaaagctaaacttgatgccatcgctgaaaagcagcgattgagagagatagagctggaggagaaggcaaaggcaacaagggagaagctcttaaagggatccgaggctgtgcgcgctccagattctgcacctgttgcacagccacctcgagagtcagcagcagcgcctgcagctgctgcggcggcggctgctcctgctcctgctcctagtaaatatattcccaagtttaaacgcggtggtgatagcagcagcatcccttctggcagccgcgatgaagatcgctggggttcacgtggtccgctcaggcaagatggtcctcctgcacgactggatgcaccctcatcacggcaagatactgatcgctggcgtggatcaagatttccctctaactcaacgtcctcttcatcaacctggagccgttcacggaactgatcctatgctgcaggacttttttctagcccatgtgtcgacctccgtgcacaatgtctaatcgtacctttccaggcactgcactccatgcatattgtcgctgttttgtacttttgtagtaatactctacaatccatgattattgtccctgtttgttagtaatgctgttttatctgtgcatgaaacactctatacctacatatagccaagaattgcaggactgtatgcatgtaaaacttgcaagattatcaatttttatgagctataaaattaatatctgtgggcaccaagagttgtaaatttaaatgtctatgaaccataaaataaatcttttaatgatattgcag

SEQ ID NO: 19577 - DNA, 5355 bp, Zea Mays
aggcaccttggtgggaatctgggggaagaagggcccgaaatccccctgcacggcggcggcggcggcagcagcagcagcgtgagatgtaagaacaggtgggggatggggagttgaaagagatggaaatgggtggcggcggcagacgcacgcagatcatgttgagggcgtccatgcggatgttggggacgatttcgacaatctcatcctcagccacgaactccacctgcagcacagacaggacaggtccaaacattccctttgacgaagatagtctagtccctgcctgtgattgtggaagggatggggttggttacctcggagggcgagaagatggagaggtgcgggtcggactgccccgccatgaatgccccccactggaacgccgggactcgtgagagagagcaatggaggcgctgctgcgggtcggaggcggcgaggcgagagcgaggtcgacggagagaggaggctacaggtcgctgggactctctaaactacagcccaatctgagtgcccgaaagcccatccaacaacagagcccaacagccgcttcacgcagcttcagttcgatttggtcgggtcgcggcagcgcacggcgggtgaggcagcggcgaggcggggcggcggggcgccgcggttgcctttctcgctgctcctgcagtcctgctcgctcagcgccgggacccgggagaggttattagggtttccttctcatcaactttagccccagcagcaacacagccagcagaagagggcgggcccgatgctggccgcccggaacccccctccgccgccccatgacatcgccgcgcgcctccaccacctgcgcgacctccgcagggtgccgctccccaaccgcgtcgcgcgcatcgccgacctccacaccgatgaggccagccccgtgcgcaagcttgttgccgagatcatcggtgagcttgggtcaaaacacatgaggtatctacctgatatgatcccttgtttgctgcaccttctgaatgatgagacgcctgcagtcgtcaggcaagctgttaagacaggaaccaacttgtttgccaaagtactccaaaagctagctatccagggtttattctccaatggagggattgatgatgcacttaaatcatcatgggaatggctgctcaagttcaaatcaggtgtctcgcacatggcatttcaggccaccggcaatgaaggtgtcaggttactggctattaagtttgttgaaaaaacagttcttatgtacacaccagatcctgatgtcccatctgatccgccaactgaaacaacagaagatatggcattcaatgtagcttggttacgaggaggtcaccctttgcttaatgttggggatctggccatggaagccagccagagtcttggattgttgctagagcagctcaagtctcctaaagtaaagtcactcagtacttccatgatcattgtcttcgttactagtctctcagctattgcccaaagaaggccttcattttatggacgcatattgccagttttactttccttggatccagcaagttctattattaaattgagagtcccgggcgcattccatgccttgaagagtgccttctctgcatgcctgaaatgcacacattcaagtgctgagccgtggcgagcacgcctattggaagctcaaaatattatcaaccaagggggttcaatagaagatgcagcaaatgctgctaagaatttcggggacacttcaaacagggaagaatcgtggcctctgatggagagaagcactgacggtagtaacaagcgtagtctggctgaagacatgaatcatgtgacagaggatgatgtccactccactaaaagagccaggcaatcaattgatgctaatgaacatagtgaagaggcaaacaagacaaattttgagtcgatgtctgttgatatctcatctagccagcccagctctataagaactgggaattcagaagctgtgtatcaattaattggtatgtttgctgcactagctgcacaaggtgacagagcagctggatcactgcaaatcctttcatacagtatcgctagtgacttactagcggaggtggtaatggttaacatgcaacatctcccaatctctcgtcctgaagttgaccaacagcagcttccttctacgagctctggagatggacttccactttcaagtttctcctctctgctggggattctgctgaagggagcgaaccaaattgatcaagatgaagtgtctccagctaaagaacctgcgctggtgtcgtcagttgcagatgacagaatgatacttcctgctaattcacctgttcctagctcagtaaatctacctatcgaagagaacagtaacagtccaacagttccattatgtatagaaacaacagaggccaaagtaaccagtgcaggtggcaatagttcgattgatattccagaatcatcagaagcttcccatgcctcaacagagccccagggaacccaagagcatgctagcacttttgccggtccatttcctgctgataatttctcagttggatttagtttggcacaatcgtcagaaactcgcagcccaagctcttctacattggaagcaaaccactcacagctttcatcccttagttcacaatatgttcttccaaagttggttgtcaataatattgatctcagtgatgaggccaaagatctccttcaaaaagaggcgtttgtgcggattcttgagagtgataagaaagaagcatctggtggttcaattgctcgccttccgttgcttgctcacctgggtgttgagtttcctctggaatttgatccttgggtgattcttcaaaagcacattctctctgattatgcgaataatgaggggcacgagttgactatatgcatcctgaaccggctatatcatgaggcagagcaggatcacgatttcctttcatctagaactgctacatcagtttacgaatcctttcttctaaacatagctgaaaatcttcgagacatgtttccagcttcagataagtcacttggcaaattgctttgtgagataccatacttaccagaaggtgtgctgaaactgcttgaaagtttatgttctcctggaagtaatgagaggcaggacaaggatattcagagtggtgatagggtaactcaaggtctcagtgctgtctggaaccttatcatgctaagaccttcaaatcgggacagatgtctggagattgctttgcagagttcaactcatcatctagaggaggtccgcatgaaggcaatacgtttggtggcaaataagttatttcctatgacaagcatttccaaaaagattgaagattttgcaaatgaaaaacttaattcagtgctggaaatgactccatctggtgattgtgtaactactgaaatggctacacctgaagcacacaaagatattggtttagaaaacttaacagcttcagtaacaggcatgcagactctgatgtctctatactttgcattgtgcaccaagaaacattcccttctcagacatgtatttgcaatatatggtaatctaccgcaagctgccaagcaggcagttcatcaacaagtaccaattctgatacgcactataggctcctcctctgatcttcttggaatcatctcagatccaccagctgactgccgggacctcctcatgcaggttttacaaaccctcactgatgctgcggttccatctaaagatctgatttcttccataaagatcttatattctaaaacaaaggatgttgagttcctttttgcaatcttggttcatctaccaaaagatgaggtcctgcctgtgttccccagtattgttaatcttccaatagacaagtttcaaagtgccatttcccgaatcttgcagggatcacctcggaatggcccttcacttgatccatcagaaattttaattgcaattcatgtaatagctcctgataaggaaggaataccactcaaaaaggttatggatgcatgctcttcttgctttgagcaaagaacaatatttacccagcaagttctggcaaaagcactaaatcaactggttgaacagattcctcttcctttgctattcatgaggactgtcatgcaagcaataggtgtttttcctgcattggtggattttgtgatggagatcatgtcacgccttgtgagcaagcagatttggaaatatcccaagttatgggtaggatttctgaagtgtgctatcttgacaaaacctcagtcatatggtgtgttgctgcagttaccagctcctcaacttgagaatgccttgagtaagaacccgacactgaagacgcccttggctgagcatgccgagcagccaaatattcggtcgacacttccaaggtctactttggtggttctgggtcttgctgaagatcaaccacagcaaccagcagtaacacaggtgcagagcagccaaaaccaggctgcggaaaccagtagctctgctgctgatacggctacagaagtaactcaggaatcttctggtgctagctaacatcttttatgccgaaatgggctaatgcttgcaggttgtgtaccatatgtctcttgagggtctaagatgtgtttttctgtgtgatgcgtctcattggacgggtgttagctgctgcatctggacgcctaaatgagaactaagttatttagttgctgggggtaattctaattttcggtggtgcacagggaccattgtaaagtaaagaggttaacattatatatcatccttaaataggaaaagggcaaacaagtgtttgttgaagctgtagctcaaacagtccctacttattccatgagttgtttcaggctaccaagggggctggctatgtcaagcaaccaatgcaatgattcgaaaattttagtggagcagtaaggaagggaagagattctaaatttaggggactacgttttcttgatgtagccctatgaattagaccgccacaaatgtggagagctatacttgatggacttgacgttcttcagcaaccccaagggatggagctttatggccaacccccccagatgtgttagtgaattaatagaagatggattggctggatggcagagtagatacttcagataatgaagccggtgaagttcttaaagaaaggtcaatgagtcgatgaaagtgggttcaatataggccaatttgatgaacacaggcattgaattatactagattaggctgctgaatagcgtaatacctacatccatttaggtgtgttttcttgttagcgtgctattgtaatgtctatattgtaatgggtctcgacccaccaaactttgttatattaatgcactcccaatcttgattaggattagggttttcaatatgttataaagctagattctctcttccccctttca

SEQ ID NO: 19578 - DNA, 528 bp, Zea Mays
tttaaacgtgagagtttaatctcaccacaagcattggtgaggacatacccgaggcgcacgtttacgagcagtgagggggacgtatcgttcagtgatcttggcttaacaagcaagcaggaagccctatttctagaacagatcacagagtagaggataagtgtttaggcagcatggttatagacaccacagctggagccggagaattttttttacattttatacttgcagcttttgctagtaaaaactcggtctgtgaaaatggttgggttggtcgaagaaaggcgtcacgttacctatacaatgtggacagctacgcatggccgttcattcgcacgagtctcagagtggctctgtacatactgtcggttctgtgaatcaaagcaatgttgcgtatatataagcaaactgcgcagcaacgggagatgatgcgaaacggccgtcagagtttgctgctttcgcatcactggtcactggtgtctcagagacagaactggctgaacgtgtattgaaaaaactgagaaaaatgaa

SEQ ID NO: 19579 - DNA, 4437 bp, Zea Mays
tttatttcccacaaaacccaaaactagcctcaactagtactattgtagatcatggtagaagaactcgctgatcactgttcttctgtcgctttcatttctgccatctttgaggtgatgtgtaattctctgcttgcatcacgcactaacctgtttctctcagagaacagaggagaggtgcagagtgcagagagctctcttgccaacttttccccacaccccaccatttcttcctttctcctccctcctccctcctatcgctcgcccccgcttttttagcccacctaccggcagcagcgccccgtaaacaaagagcacccgcacggcacctctaccattctccccacctctccctcgttccccttcgaaccaaaacccaaacccaaacaccaccatcaccaccacctccaccactcatacagcggcagagcgagagccgagaggcgagccgcattgccaaaccgggcgagccgcagtgctgcaaccgcccaccgcgcacgcgccggggaggcgccgcccgccaccctacgcgcgagcccagcagcgggaggaggaggcgagattccaaagggaaaaaaaggcggcgggagcaaaaggggaggcgaggtgtggaggggggaaaagcggcagtgggcagctgggagggagtccagagtccagtccagtccagtccaaaccagccggaccacggccgacgcggcagggcagctgtgactggctggaaggcaagtgtgctcggcaagcgacgcacgccacgccaccgacaccggcaccggcacccccgcccgcggtgatcggacccgcgcgccagatccgacaccccggccggaatcgcggcggactccagcgcccgcggccccgccccccggatctgcattccgcgcagccgcgcaggggctcctcctggccgccgcgcgccctcgtctccccagatactctgcaagcaatggatcgacgcagctggccttggaagaagaaatcatctgacaaatcatcaaatgcggatgtgctgcagaattttaatcatgcagaacaggaagataaagctccaaaatttgtgcaaatttcacctgaaacatatgcacatcttaccgagtcagaggaaaaagtaaaaaaattagaagaaaacgtgaaggtcttgaatgaaaaactctctgcagcgcaatctgagatcacaactaaagatgctcttgtgaagcagcatgcaaaagttgctgaagaagctgtatcaggttgggagaaagctgaagcagaggcctccgcgctcaagcttcagctagaaactgttacattatctaagctagccgctgaagaaagagctgcacatctggatggtgcattgaaagaatgcatgaagcaagtaagggctgttaaggaagaaggtgagcagaagctacatgatgtagtctttgcaaaaaccaaacagtgggagaagataaaggccgagttagaagcaaaattacttgaatttgaacaggaactcataagggctggtgctgagaatgatgcactcacaagagcacttcaagaacgggcagaactgttgatgaaaattgatgaggaaaaagctcaagcagaagctgagattgaaatcttaaagagcacaatccaatcaggcgaaagggaaataaattcacttaaatacgaattgcatgttgtctccaaagagcttgaaatccgcaatgaagaaaagaacatgagtgtgcgctcagctgatgtagcaactaaacagcaccaggaagatgtcaagaaaatatcaaaacttgaagctgaatgccaaagattacgtggccttgttcgaaagaagttacctggtcctgcagcactagctcaaatgaaaatggaggtggagagcttgggtagagagtatggagaccacagagtacgacgatctcctgcaaagaattctagtttccatcggcccatgtctcctatgtctcctgttcctgattacgcaatcgagaacatacagtacatgcagagagagaatgagtttctgactgctcgtttattaacaatggaagaagaaaccaagatgcttaaagaggcattgacaaagcgaaacagtgagctgcaatcttcaagaagcatgtatgctaagacagcaggaaagctccgaagctttgaagttcatatgttgactggaaaccaacataagagtccaactatgaacatggatattcattttgatggtgcactgagccaaaatggaagcaacccacctagcatgacttccatgtctgaagatggggttgatgatgaaggaagttgtacagaatcttgggccaacactctggtgtctgagctctctcagttcaaaaaagagaaggctgccaagagcagtgcgacagaaagctccaataggttggaactcatggatgacttcttagagatggagagattagcatgtctgtcttctgatgttaatggcaatggcagcactattgacaaaatgaagatagatgaagttggggctactttgtctgactttactgaaagagatggtgttaaagatttgcagtcagcttcaccaatgacagaaagtccatctaataaacagcgtttgtctgagaaatcttcgctttcgaaattccagtcaagaatatctttattactggattctgaatcagcagagaataatgctgaggtacttgatagtatcagaaacattctaaaggatattgaagatgaggcagattcggtgaacacaaatggaactcatcattcaggcaggaccttaagtttagatagcaaatgtgccatcgatcaagaacttaagaatgccatattgaagattcaagactttgttaagttacttgatcaagaagtctccaagtttcaaggccagtcatctgattataatgggctaagtgagaaaacacaacagttctctgcattggttgacaaagttctgtcaaacgatgatgtcctaaatgatattgtcatggcactgtctgttatcttgtcagaaactagccagattaagttgacactgttgagagacaacaacaatgaagcagaaagtaataacttagattgtgttgataaagtgactctacttgaaaataaggtgcagcctgagccagtaaaagacaatggttctggtctctgcccactgttgcctcattcatcttctgatcctgagtttgaggggcctactgatgctggatttgatgttaaggctgcagtgaaggtatgctcgccggaggaatatgaacaacttaaatctgagaggacaaatttggagggagagttagcaaagtgcaacaaaataatagaagaaacaaaggttagattaagtgatatggagaaaaacctggaaaacctcacatctaagttggctgacagtgagaaatcaaatagcttgagtgagacacagttgaagtgtatggctgaatcctacaagtcacttgaatcaaggaaacttgaattagaaaatgagatagaagtgctaaggtccaaaatagatgctttaacagctgaactctctgatgaaaggcaaagtcatcaggacgacttagttaaatacagagatctcgaggagaagatggaaaggtatgagatggagaggagttcaatgcttgtggatggggacccagacaccaagtcaaagcaggataaagagataggggctgcagcagagaaactggcagagtgccaggagaccatattgattcttggccgtcagctgcaagctatgcgtcctccagccgagtcactcggctcttcacctaatcggcaaggcacggagaactttctacaggacgtggtaggaacaaccgcaggagaatattcccagaagccttcaggccaacctgatacagaccaggatatgcttgggacaggaaatgtctctccggtcaatggatacaagacacacatgatcccttctgatgcagacggaagccctttcctttctccgaacagctccaagcgcccgaagcatcgatcgagatcctcttcgtcttcgtcattcaccaaccaccagttgccagacaaacagagccgaggattcagtcggttctttgcgaagaccaaagagtgaaacttctcccgattgggtgggatggtggaggacatgaatttctgtagagcttattgaggcaagccttcgtgtgcgttctctcaggtcaggtgatgctttgggttgctggaataatactcagcttgcagtcgagcgggtcgtgggccagagtgttgcggaatgtatgttatcagtctcttctgctagagcttttctgggttgctgtgtgtttgaaacctcactgtacatgtgcttacatgcatgaaggagcatggttgttggtttgtgtttaatcttcttgtgaattagcatgtgtattttccttgtactggtttcatgtacagttaacctgcgctaatttcaagggcattgatatacgtattatattgtgttgatcagtttatacagtgttcctt

SEQ ID NO: 19580 - DNA, 2073 bp, Zea Mays
gggagtagcttggaagaaaggggcagagtggatacagtacaaagcgaagcggcaaccaccgcgaggtttcctcgagaatctccagtctcttcttccccgcacccactctttatccacgagcgacggggacccgtgacagcggcgaaaggctcgagcttttcttgatttgccctgccgcctgcattgggacgagaggaggtccttttcttggacgttctggggaggagtacctgagccgactcgcgggcgttcttgggctcgttgcgtctgttcaggttctggaagcatgaggttatggtctctctttctcttgcctctgctctgtctacctgcgcgggttcgatcagaggattacgcggatgcaactgtcattgttcgaggctctgagacgattgcttcgaccagtgatgagtttgtttgcgccaccattgattggtggcctccagagaagtgtaactacgaccagtgtccatgggaaagggcttctgtcttaaatctggacttgactaatcctttgctggctaaagctatccaagccttcagtccgctgcgcatcagagttggaggctccttacaagatcaagtgttatatggcacaccaaatttaggattgccatgcgacccatttacaaaggtttcaagtggcctttttgggttttctcaaggatgcataacattggaaagatgggatgatattaatgatatgttcctgaaaactggtgcagttgttacattcggtctcaacgcgcttcgaggaagacagcagacaagaaaaggtgtctggggtggtccctggaattctagcaatgctcgagaattcattgaatataccgttttaaagaactatcctatcgattcttgggaatttgggaatgaattgagcggaagtggagttggtgcgagtgtgtcagctgaacaatatggaaaagatctagttgaactccaaaccatcatcagcgagctatacggagattccaacaaaccactggttgtagccccaggaggattttatgaccagaaatggtttgctcagctcctcgatgtctccgggccaaatgttctcaacgcaatgactcatcatatttacaatcttggtgctggtaatgatccacaggttccaaacagaattttgaacccgcagtatctgagccggacttccgacacattcagaagtctccaactcaccatacagcgccatggaccatggtctgctccatgggttggtgaatctggtggtgcatataacagtggcagccggctcgtgtccaatacttttctcaatagcttctggtatcttgatcagctgggtcagtcagcaaagtatgacaccaaggtctactgcagacagacgctgattggtggcaattacggccttcttgacaccgagactttcgtaccaaacccggattactacagtgccttgttgtggcatcagctcatggggacaggagttctttctgtagacatcagtggttcttcgtacttgcgcgcctacgtgcattgcgccaagcaaaagggtggcgtcactcttctcttgctgaacctgcaccgaacgatgggcttcatggtctcagtcaggaacgacctaaatgtcaacctcgcagaagggcaagggatcaggagggacagtgcctttgtccatggcctgaagaggacggtttcttgggtcgggagcaaagcctccgatgggttttccaagagggaagagtaccatctctcgtcgaaagatgggaacccttttgcccggaccatgctgctgaatggagcccctcttgagctcactgaagatggtggcatcccttcattgtatccagtggaagtttcagttaactcgccaatctatgttgctcctctgaccattgcgtttgtcgtcttccctgactttgaggctgaagcttgtggccgatgatcaactgtacatagaatatcacctttttttgctataaggcatctaaagaacaaaggtcattgtaatgtaaagacgtgttcgttttctgatctgtgccccaatcgggccatctacgttttcccaacgaatagtctccagatgccatgatggatcaattgggtgaa

SEQ ID NO: 19581 - DNA, 5702 bp, Zea Mays
ctgacacctgccacgattcacactcacacacaggtccactgcaggctgcagtgctgcacaccgccgcctggaacgaagcccctcttcggaatccacctacacgccccgtcggcggtccctcgcccgcatcgctagttcggcacacggagtttataaacccctctgcagtctgcacgaataatccccaacccggctctcggctcctctagtccttttctcgcattgcatttactgcggcatctttgcgtcggattcggttcccctcgattcctctcccgttgattgcctcgccgggtccggggtcaccggccggcgggggttgattgggtcggcggttatggggaaaggggcgaggaggcgcagccgtgcgtctggcgccggcgggggtggacacgggagcaagcgcccgcggcgggccgaggaggaggaacaggaggaagaggaaatggaaccgctggtgggggaggaggaggaggtggcggcgctggagggggaggactattgcttcgtctgcaaggacggcggtgacctccgcgtctgcgatttcaggggctgccagaaagcttaccatcctgcttgcgtggggaaagatagcggcttcctcaattcagatgaagaattcatctgtgaatggcatacttgctttatttgtaaagggcgttcacgttattattgcttttgctgtccgtggcaagccttttgtcaaaattgcgtgaaacaagcagaattcgtcccagtcttgaggaagacaaagggattctgcaccaactgtttaaggatggcaatcatgattgagaagaatgttgatgttgactccgatggggagagggttgatttcaatgacagggcaacttatgaatttttattcaaggagtattgggaggagatagttaaaggcaaggagagcatgactctggataagcttgaaaaagcatatgcttttctgaaagaaaaactaaactgcaaacaagatctagatttagaaaaggttcatgatgaagaacacagttcagatgatgattttgtgggcaatagtgatgacgacgatgacaacaagccatcttccacaaccaaatttaatggaacatcgaatacaatgaaattcttcctgagggaagataggccaatgaagaatggctatgtgggctggggttcaaaagagctcatggagttcctttcctctataggcaaagatacattgaattccctagatcaacatggtgctactgaagttgtgaaggtgtacattcaacaaaaaggtctcttagcaagagataagaaaaaacttgtcatatgtgatgacaagctcaagattttgtttaggagatcaaaagtgaggtacaacaggatatatagcttgttaggtaagcatattgctgtgaatatgacatcagaggatgaaacttttgctaactctgatgataacaatgaaacatttgtgagaaagaaagctcgtattgggaactacagttccagtactccaaagtgtactccagaaataaacaagagatgttttgctgctcttgttcgccataacattgatttaatctacttgaagaaatctttggttgtggatctactaagggagccggatacatttggcagcaaagttattggctgttttgtgagaataaagattgatctcaacgattatagtttctacatgcataaaaaggtgcaccaacatagaaagttgtatcagcttggactagtaacaggcaccagtaaatcccctgaagaatacaagataaatgatgtatcaacagatattcttttatgtatttccagcatacctgacatcaaaatttcaagtttgtcagatgaagaatacgaagaggaagaatgtcaagaccttcggctgctggccaagaatgaatcctttaaaaggcctactgttgtaagttacccttgctttttgtttcctttaacaaaaatgtttgtggcccagtagcagatgataatgcaagccactgaagttctaatttcaattggcattctttgtgataacaggagaggagttaccaccaataacaataaacaaaacctttgagtttagtcctaaacaagttggggtaggctacactacacatgaaacctaataagaagaaaaaaaactcggtcggtaggggaaagaccgcccccacgacattatattaagaagctcaatcagagccccgaccgagaaaggtcacgaaagctggcctcccgtgcagcatgagggtccgtcctctatagaccaaatctttactcgtgctttgatccctcccagcctctacgcgaggatccgcccccataggccagtccatctcgtgtgcacacaaccaggggaaccagctagtgacctttttttaacctcagcctaaaattcactcccactaaattgggataatcatcttgtatcttgtaattattagaggttatcttagggcacaactccaacggtagcatgtcagctagctcgaagggagctaatgatggattcttgcttttgtggaagaaagagaaagcaaaaaattctccatgctagcaacaaaacaagagctaggatcaattgtgtgtcccaaggaaaacctgacccaacacatgatcaaccctccactgcatctctctccaaaataaagaatgccttttctacctctcactctctctagatgacgactatccactcatccaccattgatcataagaatgtgtgcagagagctgggacctgggagccgctctctagagaagcattagagagggaagcgagctctgcggtggtggtcgtcagtggcacacacacatgtgcggggacgtggtggtgtgagcgtatgatggcggcagatctgatgtggcgtgagcttagtggcgtctcgtgagtgtcttggcatgcgttgtgcaagcacaagacgatagaagctagatgcacacgagccctgcagcccgccacatggagtgagctcggtggcgtcgcgagcgacccaatgtgcggtgggttcttggtgacatctcacgagtgacccggtgcacgatgcgtgagcttaggacaacatatgccagacgcggtgttagccagacgacggtcgcatcgcatgaggacccagtgtggcacgcaagctccgcagcgtctcgcgagcggcctggctctcatgtgaacgacaaagtgagtgcgagcatggcgttcggtgccattggcggagctatcatgcatcatggttgggagatataacgaagataggtgagagaaaggtaagatgtgggacccaccttgaaaagtttgcgctagactactgaggctactggagagtatgactcatgtactcagatgacgtgataatatatgagctagcaggctgactcaaccgttgaggttgcccttatagtttggtgcatacattgaacaacacggtaaagagccacaataacttttacccatctcagttctgacaatcatatcttattagtgatgatctgatgatacaatattgcagcaatttgctatttgtttaaaattgttgaaggaatttgtatttaatgtacacatttttgttcaagagatgtcaagtatatttattagcggttaactgatggtgcaatatcacaacaatactttatttggctaaaattgcttaaggaattggcacttcacatactaatacaagtcagtaacacaaaatgtttggttatatcatgacatgcagtattgttcactggatcattcacaattctgctcttcaactttgacctctagttgcacatttgctctccttttctcaactttgcaccattgctgctactatgtccaagtcaatgcatcattgcccctagttttgccatcaaagaaggcgaaggcaggggcaatggtgcattgacttggtcaaatcaggggggcaatgatgcaaagatgaaaaacctgtatttaaatgtgtaattgcgggtacttaggctatctccagcagaccccttatccaatccaatatattctcccctatttcaaactccactctgcaaacagtatcaaacaatgttatctacagttccgtgtcccctattttaccctatctactggagacagtcttattatgcaattgccccctgaccgtgatgaaattgtcttattgaatcagattgagatcatgcattgttggtgtggcatggcgagtaatcagatggaagcttgtttgttttaattgagtattttttctaactaatgagctaaagttcttgtagttgtcttagcttgctgaattttacagggggatctagaggagaaagcaagaagtttacgtagggagatagtgaatcattggatcagtaaagaactccagaggctagaaagattaattgacagggcgagtgagaaaggttggcgcaaggaaaagtttgaataccttgataagaaacaactcttgcgcaagccatctgaacaacaacgtttacttgaagaggtgcctcaagttattccagagacagaagataataaagatactgaatttcaagttacaggacaagacaaacctattcaaaagagtactgtcgctttacaaggtaccaatggagagagcattgtttctttgaaaaaaggctcagaagaaaaatgtaaacatttgcttctatagtatgtgttaaaaaaaaatccatgcaaggcgaacattgtgatgtttttattgtaggtacatatgtgacaagggcttcttttttgaagagccacacagggaaaaaatccaaaggtactgatggggagagagatctttccttggaaagtttatcggaagaaaaacctgaagttaataaggcccacaccgatggtggtacagctgtaatacacaatcaaaatcggagcactacagctgctattgctgcgctaccaaagtatttgcatcgccatgctgccactgaagccaataatgctggtgatatttcatctgttcaggagctggatggtgaaggtgttaaagctagcacggatgttgatacaactggaacagatgtccagcacgggagcattgaagctactaaagccaacgctgctggtgatgcacctggagcattttttcaaaagcagtgtgctaaagctgctgatgttattaccattgacgacgatgacgaggacaacagtcatcgttgttataaagaagaacaaacagcagtagttgatcttgaagctgattatgctggggataaccatcccgtgcagcttgaggcaaatagtcgaggccataaacacgtgaaggtgaaggagcgcatttggtattacattgatcctcagggtgatgagcaagggccatttacaatgcagcatctgagcatctggtggagcaatggcttcttccccggcgacttcagggtctggagaacaggccaaactagtaatgacgccatcttgctcgtggacgcactgcagatgactaggtaggctagttaggagcctcgtagaagactagatgtatttatgtatcgcggaaaaagcgggggggcttcgaggcagatatatgtgttctgctggggtgtacatccttctgtgttatatgatatgatgatgacatcctatccccaccatcacctcacccaccaatcaaaaacatcttgccaaacaaaacaatggttgtttgatggcaaagaggatttgttgggatgaaatatttgtggactattcagtatccctgtgctgtgacaatgctactgaaaatctggttctttggcatgttaggctgtttaacg

SEQ ID NO: 19582 - DNA, 1369 bp, Zea Mays
aaatgttttagaggtattactccctgaaggtgtaataattcctacaggttttgaaacaatagggcatatagcacacttgaatttgcgagatgagcatatgccttacaagaaacttattgcttcggtggttcttgataaaaacaagccaaaaatccaaactgttgtcaataagacagatgttattcagaacaactatagaactatgcaacttgaagtcttagctggcaatggttcccttcgtacgatggtcattgagagcggccttcgttttcaagttgatcttggtacagtctattggaattctagattagccacagagaggcagaggctagttaatatctttagaaacttggacgttgtttgtgatatgttctcaggggttggtcctctagcgatttcagctgcaaaaaaggtcaaatatgtctatgcaaatgacataaaccctaatgcagtgggataccttgagagaaacatggttcttaacaaacttgaaaagaaaatagaggtttttaacatggatgctagaaggtttgttagtgcaatatattcaagcaagcacgtgcaaccaatcacacaaatagtgatgaatttgcccaatgacgctgttgaatttttagatgtgttcaaagggattttatgcaatactaaatcagaactgcattgtgtgatgccaatgatccatgtgtacggattttctaaagctgaggatccagagcatgacttccatgagaggataaatttaacgttaggcgagaacatcgacactgttgaaatgcacagagtacggcttgttgcacccggaaaatggatgatatgtgcaacttttactcttccacagtcagtggcgtctgcacagccgaattacattacctgttgattttttgtactctctccgtcttaaaatattggcaacgactgttatgcaagcagtccttctgtgcaagcgtgcaagcaaaccatatgatccattagattacgatccaatcacagatacaaccatgtttgttagaggttttttataaagattattgagctgttggtggaagggtttaagtgttaaatgtgacatacggttggatcacgatctaatggatcaaatggtttgcttgcacgcttgcacagaaggactgcttgtatagcagtcgttgcctaaaatattagtcgttttagctcagctctggatttttatgtctatatccaaagacatgtaaaacatataaatcaaatgttatatgaatttattaattgtcgaaaatgaattttaatttgggatagagggagtactattcttactgcagcccctcgtatcttctgtactgtcgtcgaatacttcctatcagattatatagatgatgcccttgatcatctc

SEQ ID NO: 19583 - DNA, 2522 bp, Zea Mays
attctgggttttcctctacaccacaacgctacgaaactcttcatccatttgatccacatcaaacggctgatagggcccctcctatctctcctacatcttctccactcccctggattgagttggacaacttggcgcttcacctcgctcgctgctctcctctcagtcctctggttctccgtcctctcgcctcgcgcggccgcgcctgcgcctcgtcagcaagataaggctgcagcctgcaggccacagtgcaggcccatgcttccagaatcttccggaaccttgcgccgagcctgaactccccggcggcgcctggccctgtgaaggctgcatgagtagtcgcgccgccgccgccgccgcagcggagccatggggatgctcgccgccgccgttgcccccgctctcctcgcctcgccacaggcatccctcgtccgccgccgcctctccggtgcgtggacgctgcgcctgaagcccgctgctgcctcccacggcgtcgcggcgctcagggtacataattttctcccaaagtgttacattaccaacgttgaggttgatgttagtactgtaaataaagaagaaactttcgatgatcatccatcattggcaccaggacgcaacattccgcttgttaatcttcgaggagatattctagattctagtccttttccgctgcacgatagggcttcctgtccttcaggttttgaagagttgccggtcttgtctgaaggagagcaacatactttggcatccactcctgctcatcctgctggactatatgctctatatgctagttacttatttggtaacttggtggaacaactgtggaattttgcttggcctgccacactggcaattcttcatccaaatctattgcctgtggccattgttggtttcttcacgaagctttcagtgtttgttggggctcccatagttggcaaacttatggatcatttcccccgaatacccatgtacacagcattgaatgctgtgcagctgtggttctgagaccttggttcattgcactagtggcagctggagctatcgaaaggcttgcaggattggcgctaggagtttccatggagcgcgactgggttgtgttgttagcaggaacaaacaggcctgttgcattagctcaagctaatgctgtgctcaatcgacttgatctagtttgtgagacagttggtgcttctgtttttggccttcttttgtccaaataccatcctgtgacctgtttaaagattgctagtggtctaatgatatgcagtttccctgttctggtcatgttgggtcaactaatcaatagagtttcttgccatgcacttgattcctctagaactgccactgatgaatctatttgtgctgatcttttagatgtacgcaggatagttccaaatagcttgagggctatcaaacatggatggaatgagtataagcagcaaacagttctacctgcaagtgcagctaccgtgttcctaaatttcaatgttgcacttgctccaggtgccataatgactgcattattgatgcatcgtggtaccagtccatccattgttggtgctttcagtggattgtgctctatcatgggccttgttgcaacattcatctcctcaagcctggtgaaaagagttggaattctaaaggcgggagctgctggattgatatttcaagcttcactcttgtcaatcgcgctcacagtgtattgggctggttcaatttcgcaaacgacacctctacttatattcctagcatccattgcattgtcgcggttggggcacatgtcttatgatgttgtggggactcaaattgtccagacaggtgttcctgcttcaaaagcaaatctaattggaggaatggaggtttcaattgcaagccttgcggagctagtcatgcttgctatggctataattgcgaatgatgtctcccatttcggcttcctggcgatcctgtctgtgtcatcagttgctggggcagcatggatgttctgtcggtggttaacaaatccaacagatgagcagagggaactattcatggttgatcccctttatcaagttcaggcaatatagtggatgaggcaggaaacaaccaggaaaactgcaggcgcctacttgctggtggtgcttgttggatctgcaataccgttacgatgatactaagatacagtgtgacatttaggttcaatacgggatacacttagggtagaagcatttgctcctcgtggcctcagccatgcgcagaattcaatttgtatactcgttcatctcctcacctgtacaacacatatttgatctgtataagtgttacttgttatagctgatgtagaacaacattaacagccatcggtagcacacagtcaatgaaatctaaccccctcacctttcctctgatgctgcaaatgtgtaactgtatcttttattggatccactgtcttctttctcctgtcatcttggttccttgttaggcatgtacatccctgaacctcttacacatagacagtacatcaagcataagacataattaaaaaaaac

SEQ ID NO: 19584 - DNA, 2003 bp, Zea Mays
ggacgacaggctgtgcgagaagcaagaagaactcaaacaattcttgcttcccgctagctagctcgcaagaaataatggctccacttcttcttgcttctcgcacagcctgtcatcctggccttacaagcagccgccatgataatggccggcacggcctttcttcttcaccgggaagtagtagtaagcgaagccgtagccttagcttcataccacgagctgaaaagacgacgacaggcggtgagggtcatgttgtgagcgaaaagctgagcccctggcaaatccccaggagggagtggttcccccctagctttatctttggtgccgccacttcagcataccaaattgaaggcgcttggaacgaaggtggcaaggggccaagcacttgggacgatttctgccacaaatatccggagtggatagcggacgggagcactggggatgttggagcgaactcctactacctgtatagagaggatgtcagattgctgaaggagatgggtatggacgcctacaggttctctatcgcttggtccagaatactgccaaaggggacgctcgagggaggcattaaccataaaggcatcgagtactacaaaaggctcatcaacttgttgaaagagaacggcatagaaccatatgtgacacttttccactgggacacacctcaagcgctggtggacagctacggtggcttcttagatgacaggattgtaaaagattacacggactttgccaaggtgtgctttgtgcacttcggcgacaccgtgaagaactggttcaccttcaacgagccacagacgttctcctctttttcctacgggaccgggatctttgcaccggggcggtgctccccgggacaaaaatgcgctaacccaaccgggaactcactcaccgagccatacattgttgcccacaacctcctccgagctcacgctgagactgtccatgagtacaacaagcattacagaggtaacaaggacgcacagatagggattgcgttcgacgtgatgggccgtgtgccatatgacaatatgtttctcgacgaccaggcccaagaaaggtccatcgattataacctaggatggttcatggagccggtcgttcgcggcgactaccctttctccatgagatcattgatcaaggatcggctaccctactttaccgacgacgagaaagagaagctagtgggttcgtatgacataatggggataaactactacacctcgaggttttccaagcacatcgacatctcgccaaagtactcgccagtgctcaacaccgacgacgcctatgccgcccaagagacgaaaggaccagacgggaatactattggtccatctatggggaatccgtggatttacatgtaccctaacggcctaaaggatatccttatgttcatgaagaacaaatacggaaacccaccggtctacatcactgagaatggaatcggggatgttgacaccaaagataaacctctacccataaaagacgcgttgaatgaccacgtgaggctagattacctccagcgccacatttcagttctcaaagacgcaatagacttgggagcggacgtgcgtggccacttcacctggtctctgctggacaacttcgagtggtcggccggttacacggagcggtacggcatcgtctacgtggaccgtggcaacggctgcaagcgccgcatgaagcgctcagccaaatggttgaagaaattcaaccgagccgcgcatacgaagaagaaagatatgacgggcattattccgccgtcagcttattagaacagtgcagctagctagctgccatatgcatatgttttaagatacagatatggtgtgtgtgtggtaagtatggtgcatgtatgttgtttgtaaaataaattaacccacatgatgttgtggaaagtaaaattaaaatactcaatggatcggagacatatagctatttgtcttgctattgttgttgctgctggtgctgtgctttgttgttatgtatgcaaatatatg

SEQ ID NO: 19585 - DNA, 2571 bp, Zea Mays
gaatttggtagcaaacgactttgtgatggatagctccaataacagtgttttgccatggggattggagtgtcttcagcatagtactccctgtttcctcggttctccaaagtctgcgtcctttgcggtggactgtggtggtagtagagcaatatcaggttcagataattctgtctatcaagctgataatgccaaccttagtgctgcatcgtactatgttgcgggtgcacctacatgggccgttagcagcgttgggttattcttggacgcagatgcacccaatgcaagttacatcatctacagttcacgccagttcgagaacaccctagactctgcactgttccaaacagcaaggatgtcgccatcatccctgagatactatggcattggacttgagaatggaaattacacggtcacacttcaatttgcagagggagagcgcaaggagcagaactttgacattagaaaggcagctggagggaaatctttcactgctgttaagaagcagtatgttgttccagtaaccaaaaacttccttgagattcatctcttctgggctggcaagggcacttgttgcattccttataagggatactatggtcctgcaatatcagccctgagtgcaactccaaatttcgttcctacagtccgtagttctgaagacagcaagagcagccataaaactggtgtgatcgctggggttgcagttggtgtttcagtttttgcattgatcgcactggccggaatcttcttgtggtgtcagaaaaggagaaagctattgttagagctagaagaattgtataccatagttggaaggccaaatgtcttcagttacagtgagcttaggtcagctacagagaacttttgttctagtaacctacttggtgaaggaggatatggatcagtttacaagggtaagttgagtgatggaaaagtggtggcagtgaagcagctctctcagtcctctaaccagggaaagatgcagtttgcggcagaaatcgaaaccatttcccgagtgcagcaccgtaacctcgtgaggttgtatggctgctgccttgagagcaaaacaccattgttggtctacgagtacctggagaatggaagcctcgatcatgctttgtttggaaaggggagcttgaatctagactggccaacacgattcgagatatgtttgggcgtagcaagaggtatagcttatctccacgaggagtcaaccatccgcattgtgcacagggacataaaggccagtaacgtgttgatcgacgccgatcttaacccgaagatctccgatttcggccttgccaagctctacgacgacaagaagactcacgtcatcacaaatgttgctggcacgttttggttgtctcttcgactctactgtcatctagtggttatctcgcgcctgagtacgctatgagagggcatatgactgagaaggttgatgtgttcgcgtttggcgtggtcgcgctggagattgtcgctggtgaatcaaactatcagaatgctctggacgaaggcacgacctatatctttgaaagggtgtgggaactgtacgagaacgggcggccgctggagttcgtggacccgaagctgacggagtacgacgcgtacgaggtgctgcgggtgatccgcgtggcgctccactgcacccagggctcgccccacaagcggccgtccatgtcgagggtggtcgccatgctcaacggggacgccgacgcggccgaggacgttgcgaagccgagctacatcacggagtggcaggtgatggcggccgacgtcagcggcagcttcgcgagcagccacgtcgggtcgtcgtcgacgcagacgcagccaacgtcttcgtccggcggccacggcggcgcccaggcgagccctgagcccggggacctgacgcccgcggtcccgtcgccgctctacacctccatcatcgaggagggcaggtgacagctagcttgcctcggaatcgcgaatgcctggcagtggcatgcatgcttgcctcggaatcgcgaatgcgttgctgtgctctccagttttgtggctaatacaatactgatgtcgggtcgccatggttgatgttgttgtgaggaatttacttgaatgtgaggccgcaagcagcagatttgatttgggaggcacactgaaatggcagccgacgcagattttgggatggcgtgcgcgtccctgtcaagaatgggatggcgtgtgcgccggcgccaggcctgcctcgccttgcttgccggcggcagcgtgacacgtctggagggtggagaccccgacgaacgttccaagggatgtttctcctgaattcggcatgcatcacctggctggtagatggtcacgtctccccctcctatgatttaagtgtgtgaaacgtggtatatatatgcattagttgtgcaatgtgttgcagacatccacatacaagtcttcccacatattttgattttgttattatatactccctccgttataaatatagtagaaagtaaaacaaatttaaatttgagacagaaagtatgttttatttttcgttgaacgcttaaaataattaagcaccactttaattaagtcgga

SEQ ID NO: 19586 - DNA, 3348 bp, Zea Mays
atggcatcatgcggcggcggtgtctgtctcaagagagatcgacgagaggaggaggagaacgacgacgacaagggcgagacgagcggccgcaacaagagaccaagctccggcgcttattacacgggcgcgggagtcgatgctcagagaacggatgacgacgacagcgccgccgccgattacatgtacgagtacgacgacggctacgaggaagaagaatccgctgctgagcaacccaagggcgacgacgcctcggcgcgcgacacggagcagaggtacgccgtgctgaccgaggacgacgtccgcgcgcggcaagaggcggacacggccagggtcgcggaggtgctgtcgatcccggcgggcttcgcgcgcgcgctgctgcgccacttcaagtggcgcgtcgggcgggcgcaggaggagtggttctcggacgcccagcaccagcagcgcgtccgcggcgccgtcggcctagtccccgcggcttgtccggacggcgacgccctggtccccgccgcgcgcagcccgcggccgcgggtgtgcggcatctgcttcgacgcgtttcccgcgggcgggacgcggtcggccgggtgcgccgcccactactactgcgacggctgctggtgcggctacgtcgcggcggcggtaggcgacggcgcgcgctgcctggcgctgcggtgccccgacccgtcgtgcgcggcggccgtcgtccgggagctggtcgacgaggtggcgcgcgacgacgaccgggcccggtacgcgcggttctggctccgctcctacgtggaggagagcgggggccggatcaggtggtgcggcggcgaggcgcaccggcccgtgtcgtgcggcacggtgcgcgcgtggctggccaagaacgcgtccgactcggagacggccaactgggtggtggccaacaccaagcgctgccccatgtgccgccgccccatcgagaagaaccacggctgcaaccacatgacgtgcggcgcgccctgccaccaccagttctgctggctctgcctcgacccctgggaccaccacaggggctgcacgcgctacgactcccgccgccgccgccgccatgggccggtcgacgaggtggaggacgaggaggagcaggcgcagcggaccctggccaaggcgtcgctggacaggtacctgtaccactacgagcggtgggagggcaacggcaagtcgctgcgcaaggcgctcgcggacgcggacgagctggagcggtcggagctccagcggatggccaggctgctcgacctcccggcgatggacctcggcttcgtgaccgaggcctaccgccagatcgccgacggccgccgcgtgctgcggtgggcgcacgcctacgactacttcctgtccctggacccggagcgcgacgcggccaagcgcggcctgttcgacgacctgcagagccaggccaaccgctggctcgagtgcctgcacggctgcgccgagctggagaggaagcacctcttcggcgctgccgacgccgacgccgaggacgagcccaccgtcgccgccgccgcgttcatggcgtacaaggagaggctcgccaacctcaccggagtcacgcgcaggttcatcgggaacctcgtcagagcgttcaagaccaacctgccggaagtggtggtgacgctgacgccgccggcatccgacttgcaacacatagtgaagagtggaccaacgacggagagacaaacaacggttggcattggaggcatcctttctacagaagcaactgtgacactacctgtttccaacgtgtcttctttacaagggacatcagcactgcgaccttcatcgtcgtctctagtagtctcacaggaaacggacattgcaaatgatagcgtgcaagaacgacacagccctacaagaaaccttgcccaggcccagcatccagttcgtcctggcggtcatggcggcttcctcagcaatccatacccgagtttctttggagaggctacctcaaccgcgggaccattgcaactctacatgccaaacatggtggtgtcaggtggcacgacatcgacgccctctctcgccttctctctgtctgcgcttggacagcctattacgagcacagctcttggcggctcctttggctcaaacactcgcactgcatggggcaattcagatatggctgctgcgtcgtcctctcagcctgaccgcatgggcatggatcaacaagcaggaaccggttctgccatgaatctgacaattgggctgcatcccaatgcccagcagccaccaccaaaatatgtcaaaatctgggagggtgacttatacgggcaaaggcaagggcagcctgtgtttattagtaaactcgaaagttggggtggaacagtgtccagaaaagttgcagaggattggccagaaactatgcagattgttcgcctcatagcccaggagcatatgaacaagaaatattctgaaagtcaatacgttggaaacacagactttctaatatttcgggctttaaatcagcatgggtttcttggacaactacaagagaggaaactgtgtggtgtgatacagttaccgtcgcaaactctactactttcaatgtatgacaaaacaagccgtatggttggcatgctcttccctaagaacatgctgatgttcaggccagaggccttaactcagccatcaccagtgcagcaggaagaacttatacaccaccaacaacaacaactacagcagcaacagagaaacatacatcgtcttcaacgacaactcatacagaagcagcagcagcaacatatgcagaagctactaccacaacgacttcaataccaagagcagctacatttacagcaacagatgacgcaacaaatacaacagcaacaacaatctctataccagcaacatcaacaaatgcagcatcaacagcaactgtggcaacaaatacaacaacagaagcatcagttgcaacacatggatccccaacaacaacagctgttgtctcagatggtgggtacagaattaggcagtgatgatgacacaagggaagattgggtcacaggggctgggccgcatgcctagggaatcagggagggttaatgagggcttacactcactcacttgagggttaagatgtttcctagtgtttgtcgttaaatcattaactgataacttcaaaaaaataaaccagtcatttgtatagttatacggatggggtaagagtttaaataacaccgttatgttatcgaatagctagtatattgtattgagctgggagctagatttttgcaaactccccatgtttcttcaccaaaatctttaatcatcgatcaaagatcggtaatccagtgatgcactggctcaggacacgcttaacgcacacca

SEQ ID NO: 19587 - DNA, 1795 bp, Zea Mays
cgaaaggttatcccacctcttttctattcttttttccgcccgaagacaacgtaacaaaccaacgataatcctccctcttgctacaaaaaaggaaaaaaaaacatcaataataatccactgcggtcgctcgtcctcctcccaacctcctcccaagttgcctcgtgctctgcttcttcggttttcaggagcgtcggccattgctgctggaaaagcagaccattgggactccctcgtgcgttttccaaatcagtcaggttgatggcgatggagggaccagttttatgccgccctgcaatgcaagccaaatcgcctgctgctgcgctggtcaacaactccctgaccagattcgggcagcttgggaccatttcaaaatacaggaacgtttcaagattcatttctcccatctctcagccatctacgaagaacataggtccatgctgtagcttcagctcgtcttctgatggcaatggatacatggctggaaactttagcgacagtgatgaagattatgttaattctactgtgctagaagcagttgaggtgagaagtggatcggaaggatatgtgataaagatgcgagatgggaaaaacttgcgttgtgtccataacaattctcaagggagaaatattccagagagtgcaccccaacctgctattgttttgaggattgaagatggaagcgaaactttacttccaatcattgttttggagatgccaagtgtacttctgatggcggctattcgtaatgtccacattgcacgaccaaccatatatcaagttgtcaaggaaatgattgataaaatgggctatgaggtaaaacttgttcgggtaaacaaaagaattcaagaagcgtactgtgctgaactttgtctaacaaagattgatgattctacagacagcatcaccttcgatcttcggccttcagatgccataaacattgctgttcgttgcaaggttcctgtacaagtccatagaagtcttgcatacagtgacggcatcagaccagtcgagccagcaagaatggcagtagcagctggcctatcagatgggttgttatttacagagcttgacaggtattctagaaggcgaataagaattttacagtagctgtaggatttgtttttaatattttcgtgatctgcccccaactttgcttgtggtctaagaagctttgttgttgttgattatctgccctgcaacttattgcttctaccgtgttatttctgagggcatggagggactgatgaatcgatatgtttcttagacctttcactgatatatccaacaaactggtttcgtacattcgagtatattctgtgcatttaagatccagaactccaatatatgaatctgtatgttaatttttgttacacttgcatttttgttagacccgatggacaggcatctgttgaggctcaagagtttggattggtgaagaacatgctcattgcagccgtagaagagagatacaaggatgctgcatcatggaaggacaaactgatgcggctgaggtctaagcggaagaactgggcctgacagcgttgcatgtctggatggtgtaaataaagatgatgcccagctgaattccagtacgcattccagataattgatgctgggttatggctatgtaactagctgtacatattgtatggacccgaggatggtcttctgtaaattcagactaagctttgaagtgaaacactaatccttcggagaaacttggtaccttgtccgtgttcacttgtggtatataatgttggaaattaacagggttaagattaatttgataatgcag

SEQ ID NO: 19588 - DNA, 1093 bp, Zea Mays
aggattattccgacctttttcatcccacgcccaaacgccaaactccatctccatcacctcgcacttatcggtgaaaccgcgcgatgattacggcggcgcccgcgctgcccatgttcctccggctgtgcccggcctcgcccttcctcctccgccccagcctacacgtccccagctcaaggaaagaataacaaatgagtaccgagagataggcatgcgcctgaaagcttatccgcaagaagaagttcgcaaagctaggattttagtttcaagtttcataagagctggtggagatgttgaggaggaaattgagaaggctgctgaaagaggagagcttactgaacttgtccttatggtcatctggaatcgacttgatattgctcggcgtgatgatgagcgggatgccatcagaagccttgatctcttgtatagaagggtagagacagagattctgaagagtgaagcaactcctgccatgagattgctcaatgatcttcttaatcttcatgatggaggcgacaatgagaagtggttaaagaaatgtagaaagcgcatgcttgaagtctttccaagagaggacccattcactgtggtctttcctgctgggttcaacatggagaatcgtgaagggcgaattgagctaccgcctcaggatgatgatcttcttctgagagtggactttgtcagggaagttgatgagctgctgaaagaggttcgtgctgtggaagacaagaacaagcaacaaattgggtttgacccagaatcagttgcatatatgctgaagcagcaggagaagatgcagacgatgcgtcaggtggaatctctcctggacttggcgtcctccttgaaatggtgaggattgagtactatcgaacaactgaacaactatgctgtttgcttggaagctagacgtcattgacttgacatttatactcaacagttagagggggtatctgttttcagctagttagaccaataaccgttctgggtagagccatgcagtttacttggacatccatgtacatttgtatgtgtagagatatcttactatatatcaatgtatgtctacacttctaatgaaaaaactatctgaccc

SEQ ID NO: 19589 - DNA, 1581 bp, Zea Mays
attactcacattttcattttcagagaggaaacagagttctatcaccggcgagaaagcaaaattctctctttatgtgtttcctacttcacttctgtgtacgtaatgaagtggaaagacttctttcctaacaaagagctgaaggagccaccatattttgatgctcgagctgtatgttacccgaatttgaagactattcgtgattatttggcttggagacaagtggactgtcatataaataatcagtacaatacctgcttctggatgttggtgaaatctggaaaaagtgaacaagaggcccagctagctttgaagggaacatttgcaaaggacaagaatgagctgcttgctaaacaattccaaataaactatgatgatgaactggctatgttccgcaaaggatctagtgtttaccgagagaaggtagaaacaactgtgaagattgatgactatggggagcccataaaaagaccaagattgaaagttacagtggcacatgttgataccatagggactgcgttttgggaaaaccatccacacattcttcgagaaggaaaatttatgcacgggtttgtaaagaaatttggcatcaatcacatattttcaccttgtaattggatcattgttcgcatcattgcttgccaatttgaccaattctcaacaattcattcatttgacaagccaaatgatgagactgcactaaggctgatgaatgaatctgcatctttgatgatggagcaataccctgacattgtctttggctatggttttagcaatgagtatagttttgtgttccatgagaagagtgaactataccagagacgggaaagcctaatcctttcatcatgttcttcatatttcacttctctttacatgacgaaatggaaagagttcttcccctacacagaattaatgcagacaccacactttgaggcagatgctctatgttatccaaaactaaagatcatatgtgaatacttatcatggaggcaagcagagtgtcatgctggcaaccaatacaacacatgcttttggatgctagtgaaatctggaaaaagcgaaaaagaagcccatgagatattgaagggaacgttgtctaaagataaaaacgagttgctttttcagcaattccaaatgaactacaacaatgaacctgctatgttccgaaagggttcatgtgtctatcggcgaaaggtggaagaacttgcgggggctgaggacggcggcaatggcacatcaagagagcggtggcatgtgaaggtggaccacgttgacctagggcccggtttctggcgaaagcacccgtggttaatgactaattgcactcagtagtcccgactgatacatggtttttgtactggtttatcagtgtatgtaactcttgctgacacaggtctagaaacgaaagacggttgtttgttcacacatcgaggcttctcttcaccctctattatgttctgatggttttctgagtcgtctgcctgaagccttgctagcgttgttttccttctgagctgtgaaaaccttttttcccatttttttaaaaatagctgccatgaacgcacgcacctcacgctttgcctg

SEQ ID NO: 19590 - DNA, 2633 bp, Zea Mays
ggcattctgaaggaagcagaattactaggagtaaaagttgatgaattgcctattgtggagaaagaactaaagaggtccttatgtaggaagcaagcatctgaggcacttgcaacagtaatgccaatggaggtggttgaagaaattttaaaagaagcttcgatactacatattgaagaggagcaaccatttgatgatctgtctcggatgctcaaagaggccacttcctgggaagagaaggctagacttattcttgaacgatcagcttctctctctgagtttgaagaccatatgaggtgttcagagggaataagagttatccttccgtctaaactgcatatgaaagcagaggttgatattgctaaattgtggatagacaaatgtcaggcctatttgagaccaggctgcaataaacttgcatttggagactttcttaaagttgatgatatcaaggatttaatcaatcagcctgcaaatttgaaagtcattcttgacacttcagaacttaattctgttctcaacaatattgaaaaatgggaacacagttcactaagtctactcaataattttagagccttacttcatttgaatagtattggctctacagttgacacacttcaaagaaaattggaggagctgcaaggtaaaatgaacacagaaatagaagttggattatctcttggttttgagttcaaggttctttgggaactgaaggattcttcgttgatgctaagatggatattgaatgcactgtctctgtgctgtatgattcctttattgcaggatgttgatagattaattgaagaagcagtccaccttcctgcttccttagcagattgttctttggttacattgttgatgagggcattgtcttgtctaagaaaatcacttattttgcttcctggttctggaacatctgcaaaatccaaattggaagatgttgaaaatattctagcagaattcaaggaggttgatgttccttatcctatcatgactgccaagctggaggatgctgtaaacaatcataattcatggatagagcaatgcaataccttcttcatgctgtctgatggccagtcgtgggctatgctgcaaaatctcagggacaatgggcagtctgttgcatttgattgccctgagatggataaagttgttgatgaggttaaaaacgttgaagagtggctcaatcagtgccactgtactctacttctagatggaaataatagttctttgctctccatacttgtaaagataagaggattattggatgatgtttgcacgttatatgctgaggattgtatgaagttaagattatgtgctgtatgctcatgtgacatcggagataggctggcatctagatgtgtgacttgtcaagactgagtgaggaccaattgaagaaccaactatctgtaaagatgtctaaaggaaactgccctgcacttgccgcacttgatgaactcatctcttctgcaaagggtttatacactgggattgaggaaattaatttgctaaaagaaattgttgataaggctcgtaacttgaatgcctacttgatgcaaattctggatgattcagactgttatcatggagaagatcttactgtcatattcaaatctcttttagttgctctcaaggcgacatcagcttctggcttgtatgatgacaatgtcagttgcagaattgagtctgttttgagcagatatttgtggaagaaacaaatacataaactattgtatggtggtaaaaagtcatcgattcaagaagtactgtgccttgatgaagagggttcacatttagagatatgtgatcaagatttcttcaagttggagattagtaaaataaaggaaaccagcctgcagtggctggctaaagcagaggaggttgcatgtgattctggtgagcttgcactggatcttgtgtatggacttatagctgaaggggaaaatctctctgtagactttgagaaggaactaaagttactgagggatcgcagtgtcctctactgcatctgctgtaagcccgacgataacagggccatgattgcatgcgaccagtgtgatgagtggtaccattttgattgcatcaacctgcttggaccccctccagaaagcttcttctgccctgcttgccatccaaacaatggtgaagaatctgtatcacttgcacgctcagaggatgatgaggatagatcaagcactggagccggagctcacacgccgccggacagagtggtggagcgagacttaataaagcttcttagctgccatagcggtagctcatggagcgagagcagaagggctcctcatcgaacagctagaaggcgtagtagtttcgtcggattgttatgatgtgcaggaaccttcttagcaccgtgaattgattctttttagttaggttagaagcaggaacgatccatcatctgctgttgtaatttgtagctgttgacaggaggtagatgtagcaaggcagagctgtaagaacccattattattgatcttgtagcagtctgaggttttggaaattgtatcatatactaccgccgttcttgaatatttgtcgcctattgtttcaaaaaacgacaaataaaaaaattaaaaaagaatggagagtatttttatgctgctgctatgcacggc

SEQ ID NO: 19591 - DNA, 3055 bp, Zea Mays
gatagaaggacctctgaaaaaatataaaaaagtgcatggaaaaagaaaggaaaaagaggaaagaagtaaaaaacggataataaatatcataagttagatgacatccttggcgaagcaaaagaagtcagcacagagctgctgtctacactcgggatgggactttttgactggagctggcatggcggcatctgatgtggttcgtagctgctggtccactgatatcacctgggtggtgcgtaagtatgacatgtaagtgtaacagtagggaactttaatcttgactctattctttgctgtttctgaacttgtgctctggctaccttcctaccttttcccttttattcgcatttcacctaacaggtgtacagttgttttttatcagatcatgtagttatcacttctttctctttctaacatgagaataaatgctgcctggtattttgatgcatacgagcgagtgcagatccactaaagaaatcaacaatggttatgaaaatggatttgcacctccttgatggtttgaataaatgatgcctgatattttggtgcatgctagtgacatgcagattcactgtagaaattagctgtacaattaacacctatggatgctacaaggaaaaagaaaataatgactatggtggatccttctttcctttgcattctagcattagtttgtaacttaaaataacccagtgctaagttttagactcttggtatagtggtatgataatccttccggtcacaacatgaacatacatttgactttgcatggtctttaatgcgtatctttgaccactaattacttctataatatattcataaaatgcttcaaatataagatattttgcatgtgctttgaacacaaatcgacacatataactgaataattatgataggaaactatggaagcactgaaatattggatggaacaagatcatgtgtcggagcttttctgcaggctgttaatagtagtttatggtatcctctggggctttagtgctccaggtccaggagctgatcctaaggtcacccaccgtgctcaattaatccttctatatagtggaggtgctggtagccgttgtttgtagtgtttgatggctcatctttagctaatccttcgctaggagtgtatgtgctgggtgtctcatgcttgttttattctccttttcatattattaaatgacttgcagctcttctgcacagcttgaggacaaaaacaaattgacacatataaatgatatgcttccagaccaagagtctctttatatcattctgtattgataggaatagagattttggtgaaaaatgtctccgacaactttaatttctctattctggatttctcgctcgccaaaaatggagattgggggtgcagctgtgtgcacaagatatagagaaattgttgtgatggaaagatatagggaacactttttattcaaattgctctcctaatgaggatttagggagtgagtttaagaaagacttctcgagatgctctaatgtgtgtaatagttattggcgtttgcattttttatggtttggtcaaatgttgtcctaaatatcgtttttgtgacctgatggagtattaagtattgattttttgtgtattttctgttgattatcttcaacatacccttttctatgatgtttgttttacacattagttaacttggcgtgtcagttctccattacgaacctgcaaaaaatggtactctatagtgtcacccagacctaaggttcaatgccatttaaaatgcacattgtttctcacttcaacagattcttgtactttgccatacttgtgccttagaaaggaagtctattagagagccaacctttaaaataaataaccttctaggactgcaggttcatttatggaaggaacacttgtgtcttaaagcgtttcaatgttcagcatcaactaatttgcccctatactgtggtcactgcttaagtgacgttttttccccatatatacaagactagcatcaactatcaattactcgactcagttgcattttctgttgtggtactttttcacctgtctggtctttggtgcttagtatcaattactcttactccagtccctggttgttggttaatgggacacatagtttctagccttacatttctgtgtctacccagagcagtccacactaagttaacaccatttgaactgatacaatcatgtactgcaggtggattatgcttgcaccccagaagaagtgcaacagcatttccaagcttgtggaactgtcaacagggtgacaatcttgactgacaagtttggacagccaaaaggttttgcttatgttgaatttctggaacaggaaggtgttcaggaagctcttaacttgaatgaatctgaattgcatggtcgccagattaaggtcgccccaaagaggactaatgttcctgggatgaagcagcgtccaccacgtgggtataatccataccatggctacccttatagatcatacggggcaccgtatttccccccatatggttatgggagggctcctagattccgccgccctatgcgctacagaccttacttctgaagtacggggtagggtaatgaagttcaatgcaaaaccagcccatggtcactggtcagtcccgggaataatcaactgtatcgtttgcactgttgcggctcaatgctcctgtatcagctgccttttctgacctttgtttcaagtgccgccataagcgacggacatgttgtattggcttgtaatacaggacgtagtaagtgcacacactttctgtaagcgtgctttcccacttcccagggttactactgtttgcaatttctgtagttctttgggtcggtcggttaggacatgggagtggatcgttctatgcccatttgaggtagattagttatatgaagagaaagcttcgcatgcggggctgtcttgtttgcagattgccactacctcagtacggttccaggttcctcaaggtatccgctgagcatctgttctggtgtcggattccgagttcaggtcttgtaactaataaaaaacggaaattataatgtctctcttta

SEQ ID NO: 19592 - DNA, 1261 bp, Zea Mays
ttgagatctgtggcttagttgctgttcatgttctggttctgagcgtcgtaaggggtggaagtgttccacctgccaccaattctcgtctctcacctctatcacatgaaccggctgatttctacaatgtggacattcctctcgagtcgtcaaaggatctgaagaaaaaggagaaagaactccaggctatggaggctgagctaaacaaaagagaacgggaattgaaaaggaaggaagatgcggcatcccgagctggcattgtgatagaagagaaaaattggcctccctttttccccctcatccaccatgacatttctaatgagatacctatccatctacaaaggatgcaataccttgcattctcgtcatttttgggattgatagcgtgcctcttttggaatatcatagcaactacaacagcatggattaaaggggaaggtgttatgatctggctgcttgccattatctacttcatatctggtgtgcccggggcttatgtgttatggtatcggcctctttataatgcaatgagaactgagagcgctttgaagtttgggtggttttttctattttacatgattcatataatcttctgtgtctgggcagctgtggctcctccatttcctttcaaaggaaaatctttggctgggattttgccagcaattgatgtcataggcaagaatgctattgtggggatattttacttcgttggattcggcttgttctgccttgaatcacttatgagtatcggtgtcattcagcaagtatacatgtatttccgtggaagtggaaaagctgcagagattaaacgtgaggcagcacgtagtgctctaagttcagccttctgatgaacatctttttgtaaggtctggttacagccagtcgatggatagaagggaacgagatgtgccgattgagccacgggacggtgtcttgtacatcactgcagtacgtggatttggatctctgaaagcgtacagctgatacctgataatctttttgcacttctgtaaaatatgaactatcctcatggatgcgtcagtgtgctggtgccatttcttgtcatggtttaggtgtggttgatagggaaaacggtgttttttttttagtggcgaatataatgtatcttcacgtgagtgtaatagccagtttatttttgtggcatgaatgcagttcgctgtgttttttggccaagacaatccacatgtcaggacacttctctgcccgcacctgtacctgaggcttgcagtcctacagttctagc

SEQ ID NO: 19593 - DNA, 96 bp, Zea Mays
ttattttgcctcgaacactttagtcgtggaattctgattaatttgttcgggataaaatcatctagtgggtcgagcttccgaattcgtgttcgcgcg

SEQ ID NO: 19594 - DNA, 2466 bp, Zea Mays
catgccatccggtcccttgtggccttctcctcgcccgctcgttcccaccactctgctctgctctcctcactagtctgctctccccaaaccccacagaaccctaccgtccccgccgcgccgccatggccgccgccggccggccgtggcgcgtgataccgcgtcctctactggagaccgtacttcacaactatgcgctccacccgcgcgtgccacagccgctccttttccacgggccacgcggcgtcggcaagtccacgctactcctccaccgtctcctcccgcggtggtccgaccagccccacgccgtcgcattcatcaacttcctccacccctcgccgagttctcccgccgcagccccgtggtcccttctccccgccgacccagcgtctccccactcgctgcacgacctccgccttcgcctcgagtccgcgcttgagggcctcgcccgcgccgccgtcctctgcggtgctgtgggctctaaggacgtgctcgccgcgctctcccgcaaccacggcgtcagtaccgcgctctcccgcctcttgatccccccggccacacgctcctcggccacctctgtgccagcccgccgctcttcgtcgacctccgttccggcgctctggtcgagggccgtgctcgccgcggtgcacagggacgacaccgcgttctgcattggcgagggggaggcgactagctgctccatggaggagaaggcatacatgcaggaggcaatggcagccttgcgagtggctaaggaggtgcttgggatgcaggaggggtggaggaaggaggcaattagggagatgaacagaactgggcgattctcgcgctcattggccaattcggctactgactggccgtgcctgttgctggatgttctgtcacgtgcggcagaggaggaattcttccagccaaagctgatcctgaacaatgtggatgtgttgaggaaggcaatttgtgaggatgagacgatggtgcctgcagcgatgtaccatgatagcttcatttggagggtgattgcacttggcgccaatgaaaagtgcttgccagttattatgtcgacttcagatgggtactattcttctcaagcattcgttgattttggttttccgaacatatttatttctcgtgagacatttggttggacgccacaagaagctaagctgcatatggtttctgaattcttcagtgaacaggagtggaaagttgtcgatgaggttcttgggccaaacccacggcagttatctgagatatatatgctgaagcaaaaggcgaatagcccagaagttcttcatgacagaaatattgaggaaattattgatacatacctggcacacttgcaagtctctgtcgttaatccagccatggagaaggcattaaaaatgctgcaggagtttgcctcagatgtccgtgagggtaaagtaccaaagatcagatcgtcctttggtgcaccctggagacatccacctcgtgatgacaatcctgacttgtcctataaatgggcgaagattcagctaatggattttatccaatcttttgtaaacactgagtttggggtgaactacctagcagatgacagcttggaaatattggatgatcctgctgctgttgccatgatggaggttggtttactgtatcaacaaagagaaccatcctttatgcgaccaatcactcgagggattcagcgttgtcttgccagatggcttgctgaacagagattacaattgaacattcaagaaacactagcattcttttggcaacgtttgatacggggtcgaagctaccgccacttgatgaaagaagttggctacaaataaagaggtgatttccatggactaacattttgacatgatatctgcataagaatgtttcaagggtacaataattttctggccactcattttctcatctgtttaatacagccagcgtggtctggaagtttggaatcaaatcaatctcagatagaggtggatgaccagttttacatgttctgttgctgacgaaaagaatcaatcattttcttaattaataagcgaggaatgcaaatgtttattgtttggactagagtgaagttgcatcagaagttgatgctgaagcctgaaggcactcgaaaaatgttgcagatgcatttctacctgtatggcaatatttagggagtcgaatatctgctgtatgtcaatgagaaaatgggttttcacgtattgcaactgcatgagttaatcttctgggtttccatgtctctggtaaccaacccgtacattggatagtggcccggcaccgcgtctcatacttgctcttccgatcaactgtacatttgtactggaccttgctctgtgattcaacagcacgggtcatgcacggtcgattcgagctgaattatttaaggatccaaacggggccttactttttttttggagagtaataattcaattgaatcagccaatcaaaagcgcttattcagattccagt

SEQ ID NO: 19595 - DNA, 819 bp, Zea Mays
cagcaatcaaatgagcaagatggatgtcataatcatcaacagaccagatttacgtttggaagctaaacctaatcttcctgcactcatgacgacaccgagttactgctatcatgcaaaaaggccacgatggactggtgtggtgttcgcttagcaaatggagatctttatcatgcactgtaatcaagctgtccacttcctccgacacagcaacatccttacctgaatccatcaatcctctaggctgagatcgcgaggcaggaggcgaggctgaaggtggagagggagaacctggagaaagagaagagcgtcctcatggggacggcttcgagccaggatagccaagacggagcgctggagatcaccgtcagcggcgagaagtacaggtgcctccggttctcgaaggcgaagaagtgagaggttgaaccaggacgacacagtcactcagggtcaggggggggtagtggtacaccgaaatctcagtttggaggctagtgtaagagtatctgtcaatctggcacacaggctgtcgctgtacgtgctggtttgatgctcactgcgtcgtgcgtcctcattgatgatttaacgatagggtcattgaaccagcgcacaacctgagaaaatggttgcgctgtccgtcctggggtcacggtagcatgaacctcagaactgataacctctgtttcggacggatacaatcgggttgaatgggagcctttcgtgtgcatgtggaaggtaaaatcctgcggtctctgtgtctggaacatgcttgttgccttgttggaacgaaaaggggagtttcggcttcactgcactggcaac

SEQ ID NO: 19596 - DNA, 1412 bp, Zea Mays
ccgcaaatgaaatgaagtccttcctagggcgcccccttctcatccttgaaacgtaaggaacgtgtacactaaatcctccaaaggtatcctttctagtaggatagattgtgcccagagaaccagtctcattgaaaggtgctactcgcgggttcattaacagttcatcatgtgcaggcctttttgctggtgaagaattttttacagttgagtcatgagtctcaatgtctgatagctcctctatgtatctttttgttggctttctagttcgcttgtcagtgcattgctcgcctagcagatttccttgtggttcatcattatggatcggcaccctcttggaagaatcttcctggtcctcgctctgatagtaagagctagatggagagtccccttcgtttcctggatatataaccacagaagtagctctaagcccagtcttagctctttcatccatgtctgacatatcatttttggcatccttgccaacaattttgtagtctttaactacacaacctgaacttggaacatcgtaggaattagtcaagcccattgtaatccgtcttttgagccatatcttgtctttgacattagtctgccggccaaacgtggctctaaacgcctcctgaagttctctaatagtaagatcatccaaacagacttctcctcttaatatggaaaaatcaggcatggaactattaactcccgaaacagatggatctgtagatgtgtcgcatacagatcttgagcaggcatcagccttatatttttcagcacagcaagagtcatttaacactgtcgattttgtagtctcagttgaagcattgtcctgtcgagtgacgtttgccccttgttctgtaagcaatttatctgaatgctgactatgaattctaaagtctgagggaggactaagggaatcatccaatgactacaaacaacatacctctaagttggcacccaatttttgtgtgtgtgcttccacagtctccaatttggaagatccatctgcacaatcaggcttcttcagtaacatgcagtcattgttgaaaaactcttccacatggtctgcatcttcaataggaggaagatcaaccttctcgttgtgaaggaaatgttcaaactgcaaaacatcatcctctgtagcaggaacaagtgttccatcaccttcaacctgaacatatttaaagcatttctcaaaagactcgagtaagcatctaagtttttatattaacatgtggccgacaaatcataaaattaactaagaacttacccgaactagctgataaaccacaggatcagaagtgcctttcttttcaaagtcattctcttcacttttattaaccatggtgccatgtgagtcatccatttccatagataagtcaaacgtgatcagcggcagctcgatgcacgcagcattg

SEQ ID NO: 19597 - DNA, 2381 bp, Zea Mays
atggagctcgccggggacgtcctccatgggggcacaccagatctggccatggacacgccggatccgggcatgggctcgccggaattggcctccggcgacccacaaagacgacctggccgccatgaacggagcaacccgtggggaagccaaccacgcagagaggagaggagggccccaccgccgtccttgcaccgacgtgagcttcctggccgcgtgctcgagcggcggcgaggcggagtgtctgatgctgggccagttcttgacatgatggctgttatgctagaaaacattgcgagcactcctgttgtagctagatcaactgcagctgctgtttatcgcacagctcaaataattgcttcggtgccaaatttgcaataccagaataaggtgtttcctgaagctctgtttcatcagttgctgttaacaatgatacaccctgaccatgaagctcgtgttgctgcacaccgcatttttgccattgtcttagtcccatcttctgtttccccttcgattcaagccagtccatctagccgaccaaagaaacatgacatgcagaggacactctctagggctgtctctgtattttcttcttcagctgctatctttgacaagatgaaaaaggacaagaactcagaaaattcacaaggagaaagcaaggacaatagtatgcatagcgttggtgaagggaccggacaatcaaagagtcaaaaccttcacgtgtctcaaagccgccgtagcatgaaagctccgaatttttccatgaaaagaggtccttcaatggccatgagagctccttcagtagcgatcagagctccctcaatatctctgagaggtccttcaatgtctttgagagcatcttctatgtctgtaaaggaagaccaaagttcctcaaacaagtcagatgaggaaacggaatctgtgttggtgaagctgagcgcacgtcagatcacacttttgctgtcatccatttgggctcaatcaacatcccctgaaaatactcctgtgaactatgaagccattgctcatacttacagtttgcttctgttgttctctggatctaaggcatcaacttttgaggctcttactcagagttttcaggttgcattttctttgaggagctattcactcactgaagcagattcattacaaccgtctcggcgccggtcattgtttactctgtccacagccatgattattttctcgtcaagagcttacaatgtcttgccactcatcccgatctgtaaacaaatgatcaatgatcgtgcggccgatccgttccttcatttggtggatgagagcagacttacagctgttaaggattcttcaaatgatccttcaaaaatatatggatcaccagaggacaacaataatgcactgaagtccctttcagaaatagaactatcagaaagtcaatctcgagaatgcatagtctccacaatcatgaacaacatcgcaaatatgctggatgcggaattgcataatgtgagaagccaattgctaagtgatttcactcccgatgacatgtgtcctacaagcactcagttctttgaagtgcatgctgataacccttcatcagggtcttatgagactggtcaccatcaagagggcttgctgattgacctagggaatgaccatgatgcttttggggaagcttcagaaagcgcagaagcttccgcatcttctatacctgcatcagatcttctgagtatcgatcagcttcttgaaacggttggtgcagaaccagcacctcaggctggagtagtgtcagcagacattgggttcaaggatatgactagccactgcgaagccctgacgattgggaaacagcagaaaatgtccgccttcatgagcttccagcaaagcgtgcaagcggcagggctgccgagcagccagcccaaccagatggagctggacctttcccaagacccgcagttgcctcagtacacgaaggggcccaacggcgacaacgcacagccaggccaggacttccaacaacagtccctgaagttaccggcggcgagcccatatgacaatttcctcagagctgctggctgttagaggtccagcttgcagcagccaaaacatcatttacatggacgatggcaatttcaagatagccacgaactttccattccgcaggaaatcaaggaagaggtatgtccgtgtatgaggtcttagctagagactcaaccggattcgacacccattctttatgtatagctgtatatatgtataggttggctctttgctgctgctgctgctgctgtttttgccaatgcaacgagtagagggactgggggggagcagtgccttctatcacagactgtacatgtaaacatgttgcagaaatatatgaagaaaaaaaatgacgtttgaagaaa

SEQ ID NO: 19598 - DNA, 1661 bp, Zea Mays
cctgtcttccccagatccaaattgtgcagggtaggcagctcgtctcagcgattaccagccgcagacacaagagcaccttgctgtgaacttgtaacaggtttgaacttcgaaggaaaagataattttggtgctgtgattgatttcactgtgaggagtgaaatgaggctaagtattgggcaagtccatcgaaatgttcttgcgctggcatcttctcggtcatgttttgttctgggagatcgtgtttcgttcaggatgctgtcccaaccacgggtagctggatttcatcagactgcttggcgtggtagtcaaattttggaagataacaggggaggaccattgactcttgctagcctagaagtgcaaagcagggttgaatatggaaaaaaggggaaaatggaacgaactggaggtccaaagccaagttcaagagcttcttccctctatgtgaaaccaaaggtttcttcaaatgtcaaaccagcaaagagtgccttgatgaagccagctgggataaagaagacactgaaggtagatgaggctctgttttcggccaagtcatttgaagaacttggtttgccacctttgcttgttgaccagttgaacaaggaaggccctctgaagaggactatggaacaagaccattctgagaaaagatcaggtatagaagcagtcatcgttgctccttcgagagaattaggaatgcagattgtgcgagaagtggagaagattttgggtcctaatgacaaaagactggtccagcaacttgttggcggagctaatcgttccaggcaggaagaagcattgaagaagaacaaaccaatcattgttgtcggaacacctggccgtatttctgaaatttctgcagcagaattttggagcatgttggaaggagacctggaggcacatctagggatattcttggcccacttgcgagacgatctgagcgtcagactatcctggtttctgcaacaataccattttcagttatacgagcagcaaggagttggggtcatgatccagttctcattagagctaaaagtgtagttccacttgattcaatcactgtgccaagacctgcgttatctcaaagtgacgctaaccccagttcgtcatcgcagtcagtgaaccaagctgctgttggcagcttgccgccatctttggaacactactattgtacggccaaggcgcagcacaaggttgacacattacggaggtgcatccatgctctggaagcacagacagtgattgcatttatgaacaacaccaagccactgaaggatgttgtgtttaagttggaggcccgtggtatcaaagccactgagctacatggagaccttggaaagcttgcaaggtcgacagttttgaaaaagttcaaggatggtgaattcagagttctcgttacgaatgagctgtctgccagaggactggacgtgccagaatgtgaccttgtggttaatctggaccttccaactgactccacacattatgctcacagagctggaagaactggacgtcttgggcggaaagggatcgtggtcacaatatgcgaagaaagcgagggatttgttgtaagaaaaatgcgcaagcagttagatgtggccatcaagccatgcgagttcactgaaggcgagcttgttgtccacaaggaggaagatgtggaataa

SEQ ID NO: 19599 - DNA, 880 bp, Zea Mays
gattagcaatgtgtgcaccctatggaaccaaccataaccgaatgggatgaaactaagatttcaagggccttctagtctggtttgttccatggctatcacggatgagatgctgtttgctggtactggagatggtcgcatcatggcctggagatttcctgctaaggaaagtaacactgaaccagtgttgatcctcagtggccatcaacggccagtgatttcactgtctatctcggcaagaagactttactctggctcactggacaagaccatcaaagcatgggaccttacaactcggcagtgtgtccaaacactctctgagcataaagctgctgtaacatctgtgctttgttgggatgagaagttattatcttgctcccttgacaagactgtaaaactctggactctgtcagagtcaggaaaccttcaagtcaaatatacccatgctgaggagaatggtttgcgcacactcttcggcatgcaccgagttgggaagacgccagttctcttgtgctccctccacaacagcaatcgcgtccgcttgctcgacttgccatcgttcgacgggattggaacactgttgtccacgaaggaagttaggaccatcgagcttgcggctggtgggctgctcttcaccggagactgctccggcgagctgaaagtgtggaggtgggcgcccaaggactaggaggcagtagctgatgtgcatcaaatagtgtagctgtagcctcattgaagaataatagccactgacgtgctccatcattgtattcgtttccatgtaaattatggctgctccccctgatgatgtagcacatacggccaattttgtgaggatgcaaccctggtatcatgttcccatgcgtctccctttaactgccct

SEQ ID NO: 19600 - DNA, 321 bp, Zea Mays
  misc_feature (320)..(321): n is a, c, g, or t
aaaaatgtaaaataatgacggatccgaccgtcccggccagcggcgacggcgagctgccttggggcctggcactccggcagagtcgcagagaacaaacggctgccacagtgccacggcttgctctgcggcgagccttgggcaccgaggcgcctcccatcctctaagctccagttccttcttctcggggaaatcgatccggagagaatggaagagccggattgcccagaaggttccgttcccgaccgcggaggagagcggcggacggcttccctgccgctgccggccgccttcctcgagttcctcagcgagaacggcctggnn

SEQ ID NO: 19601 - DNA, 1819 bp, Zea Mays
cggacagcgaagaggcaacacgcgaacgagaacgacgaagccaaagcaacacaccagcgcgcacgcacgcgcagcgtccggcgggcatcaccacctcctgtcctcctccctcctgccccgatccgccctccccgccgctcgccgcacccgatgtcggccgccgacccttccgcggctccggccgcggccgccgacccggacggccctgactccgtgcggctcacctggaatacctggccacggtcaaaggtcgaggccagccgctgcgtcgtgccgctcgccgccaccatctcgcccactcgcgtcccggatccctccgcggcatccccgccgccgctcccttaccctccgctccgctgcaagcctccctgttccgcgctcctcaaccccttcgcgcgcgtagacttcgctgccaagatctggatctgcccgctctgcttctcccggaaccactttcccccgcactatgctgccatatctgagtccaacgtccccgccgagctcttcccgcagtgctccaccgtcgactacatcgtcggcggagccggcatccctggggtaggcggcgcgccgccgcccccgccgcccgtatttctcttcgtcatcgacacctgcgtcatcgaggaggagctggagtacgttaagatggccatgcggaaggccgtcgcgctcctgccggagcacgcactcgtgggcctcgtcaccttcggcacgcaggtgcacctgcacgagctcggattctccgatctcagcaagatctacgtcttccgggggaccaaggagatctctaaggaccagattttggatcagcttggcctggcgggtgctgggcggccgggcttccccaagatgccacagcaaccgggcgggccacaggtgaatgggatgcatccgccgtccacggccggggtcaacaggttcctgctcccggtgtcagattgtgagattgctctcagcacgttgctggacgagttgcagcctgaccaatggccagtcgaggctgggaaccgtgcgatccgttgcactggtgttgcgctcagtgtagctgctgggttacttggtgcttgcatgcctggaacaggtgcaaggatcatcgcattgctaggtggtccgtgtactgagggacctggaatgattgtttcaaaagatttgtcagaaccagttagatcacataaggatcttgacaaggatgcagctcctcacttccagaaagcagttaaattttatgatggtcttgctaagcagttggtcagtcaaggtcacgtgttagatgtttttgcttctgctctcgatcaggttgggctagctgagatgaaggttgctattgagagaacaggtggccttgttgtcttgtctgaaagttttgggcattccgtattcaaggattctttcaaacgcatttttgagggaggtgaacagtctctaggactttctttcaatggcataattgaaataaactgttcaaaagatattaaagtccaaggtattattggaccatgcacatctttggagaagaaaggagccatgtgctctgacacagttgtcggtcaaggaaatacatcagcatggaaaatgtgtggtctcgatagaaatacttctcttacagtattttttgatgtctcaccgagtgaacgatcgagccagccaggaaaccaaaatccccatttgtatatacaatttgtgacaagttaccaacacccagaaggtcaaatgaggataagagttactacgatatgcaggaaatgggtagatggttccactaataccgagttttgtgtgaatatattggactttcttggatgatatgcaagaagtggta

SEQ ID NO: 19602 - DNA, 2009 bp, Zea Mays
agctactatacaaaaccagccgagcgccagaggagaagagctccgtcttgccttctcttctctacctgccgcacccgcacagccacagccaaccacacaccccacatcacaacagctccctctgcatctccgcctcgtcgccgtcgtctgcctgcacaaccttcttcttcctcatctctctctctcttcttccgctgccaccctcccagcaccgagggaagggaagcccaggaatctccgtcccgctcccggccgccgtccttctcataacctcatcggatctgtattgggttttcagtaaggagcagaaaacgccttagggaatgcagaaagatgtgcttgcacgtcgaagagctactttgtgagggacttggcaggaaagcacgccatactcttcattctctgccacctcttgatgacttcgaagctcaagagtacacgtatctccacctcgtgctttcgcacaatggggttcgacgtggcggctcaaccgtcttcttagatcaccatctcggtggagacggttgaagtcttcacaccctctcgacctctttgctgtctcattttttttaactgtcaaggataagcaagtgacctctgtgtgcataccaccaccaccatacgtagcatacacaggcacagatggcagagcataaagggaacgttctcttgcacaagtatgagatggggaaattgcttggccaaggcacctttgccaaggtttaccatgctcgtaacacggcgacttcggaaagtgtcgcgatcaaagtgattgataaggagaaggttatgaaggttggtctcattgatcaaatccagcgagaaatttctgtgatgaagcttgttaggcatccaaacatcgtacagctctatgaggtcatggccaccaaaaccaaaatatactttgtgctggaacatgttaaaggtggagagctgttcaacaagattcagcgaggaaggctcaaggaagacgcagcgaggaagtacttccagcagttgatctgtgcggtggacttctgccacagcaggggtgtctatcatcgagatttgaagccagaaaatcttttgctcgatgagaatagcaacctaaaggtatcagattttggtctaagcgcacttgctgaatgccatagacaagacggcctgctccacacgacttgtggcacgcctgcttatgttgccccagaggtgattaacagaaagggttatgatggtgcaaaggctgacatatggtcttgtggggtcatcctgtttgtgctattggctggttatcttccgttccatgataagaacttgatggacatgtataagaagattgagaaagctgacttcaaatgtccaagttggttttctaccgatgttcggaggcttttgcaaaggattcttgatcctaaccctagtagaaggatctcgatggaaaaaatcatggagaatccatggtttaggaagggtttaggtgcaaagctacttaggtacgatttacagaataagaatgcccctcatgtggacaagaatgcagattttgattcactgagcgccaacataacaactgagagcaagcaacatgaagaaaagaagcctatcaacatgaatgcatttgatataatctctctatcaactggcttggacctctctggtttatttgaagaatctaacaagaagagagaatccaaattcacatctaccaacacaagctcgacaatcatatcgaagatcgaagatattgcaaagaatttgcggttgaatttgacaaagaaggatggtggtttgttaaagatggaagcttcaaagcccggaaggaaaggggtaatgggtatcgatgccgaagtatttgaggttagccctaactttcatcttgtggagataaagaagacgaatggcgacactctagagtatcaaaaggtcctgaaccaagaaatgaggcccgcactcaaggaaatagtgtgggcttggcaaggaatgttgacgctttttcggagcgccaaacactcaacaagaaccgtggcggt

SEQ ID NO: 19603 - DNA, 3552 bp, Zea Mays
taccctcgcttcgcgtcgcgtcttccttctccctcctccgcatccggctgctgcccctgagcctgcccccaccccctcggcgcccccgccggagcgccgcctctacccttcgatcccggttccacgatgcagccgccgatggggagcgagaggaggacgccgcccggccgccctgtttcagccttcgtgccgggcgccgctgtcccgcctccaccgtttgccgccggtggcccgttcgctccgccgccgcggcagggagtgccgcctcctcagtctggtgctgcggcgcctgctttcggggctgcaccacccgccgcaatggggggtgggttcaggggtccaccgccgtcgcagggcccctacggtgcgggcacactgccccacggcccttttgcttccgcgccaccgcctcagggctctttcacctccgcgccaccgtctcagggctcctttgcctccgctccaccgtcccagagtccctttacttcccctccaccgtctcagggccccttcgctgctggaccaccgcctacgggcccttttgctgctacaccagcaccttttcgccctccaccgtcatcccttgcgcagccacaatctcccacgggaggcgctttgcctgcaccaccaacatatgcgaggccgccaccgccactacagtcacaagggtattaccctggtgcaccacctgcgaaccctcaatactcaatgtcaaggccagcatttcaacaaccaatgcagaatatgccacctcctccaatgggaccagctaccacatttggtaatcaggcagcttatccaagtgccgggcctccagtcggaggcacacttcagagcttagtggaggacttccagtcactgtcactgagctctacgcctgggtcacttgaccctggtgttgatgtaaaagggctgccaaggccattggatggtgacgaggaaccagttaagcttatggaggcatacccattgaattgccacccgaggtacttccgtctgacaacccatgcgattccggcatctcagtcattggtctccaggtggcatttgcctcttggagctgtggtgcacccacttgcagaatcacctgatggggatgaagtcccagttatcaactttgggtctgccggtgtcattcgctgtcgaagatgcaggacgtatataaatccttatgcgacatttgcagatgctggaaggaaatggcgctgcaatctttgcgcgttgctcaatgacgttcctggagagtacttttgtggtcttgatgctagtggcagaaggtacgatactgatcaaagacctgaactctctaagggaactgtagagtttgttgctccaacagaatatatggtgcggccaccgatgccgccttcctatttctttattattgatgtgtctgtatccgcagtacagagtggattgcttgaggttgttgcaaagaccatcaaatcatgccttgatgaacttccaggctttccacgaacacagattggattcttaacctttgacagcaccttgcattttcataacttcaagacatgttgtggaatcatttcttgatagcttgccaaatatgtttcatgacaatgtaaatgtggagtctgctcttggtccagcacttaaagcagctttcatggttatgagtcaaattggggggaagttgcttgtcttccagagtactttgccatctcttggtattggtcgtttgaggttacgaggagacgatgtccgtgcatatggaacggataaggagcatactctgagggtaccagaagattccttctacaaacagatggctgctgaattcacaaaatatcagattgcagtggacatattttctttcagcgataagtactcagatatagcgtctttaggatctttggcgaagtatactggtggtcaggtgtaccactatgcatcattccagacacctacacatggtgacaaacttaaacttgagcttagtagggaccttacacgagagactgcatgggaatctgttatgcgtatcagatgtggaaaaggagtacggttcacaacctatcatggtcatttcatgctacggtccacagacctgttagcccttccagctgttgactctgataaagcttttgcaatgcaactgtcgctagaggagacattaatgaccacccagactgtatacttccaagtggcgttgctatatacatcatcctctggtgaaaggcgtatcagggtccacacagcagctgcacctgtggtcacagatcttagtgaaatgtatcgtcaagcagatactggtgccattgtgtcattgttgggtagaattgcgattgaaaattcactgtctgataagctggacagtgtccggcagcagttacagttgaagctcgttaaaagtttgaaggaataccgcaatttatatgttgtacaacaccggataggcgggagactgatttttcccgaatctctaaggtttttgccattgtacatcctggctatctgcaaatctcttgctcttcgtggaggttatgcagatgtttctcttgacgaacgatgcgctgctggtttctgcatgatgatattgcctgtaaaaaggctgctcaattttatctatccttctctgtacagagttgatgaagtactcacaatggaaccaaacaaggttgatgatgtttcattgaagcgattgccattaacgtttcagtgtttagatactggaggtttgtacctccttgatgatggcttcactttcctagtgtggttaggtaggatgctcccgcctgaacttgtgaacaacattcttggagtgagcttggcaaacttccctgacctatcaaagattgtattgagagagtgtgacaatgaattgtcaagaaatttcatgaaaatactaagatccctgcgggagaaggatccttcctatcaccagctatgccgtgtggtgcgacagggtgaacagccaagagaaggctatctgcttctatctaaccttgttgaggaccagatggctggaacaagtagttacgttgattggatacagcaaattcaccgtcaaacgcaaagctaatgacgaagaaccaacaggaagtgatgcttggaatttttgccttagtgtaaactgctgcaggatgtagattcagctgctgccggttccaaatcaatctcgcaaccccgtggcagatcttgttcagaagccagcggcccaacatgccggcttgtaagcagcatttgtctggcaaaaaaaatgctgttaatatctgtccatgtgattattctatttttgcacagtgagaatacagctgttgtatcggaataagtaggcaacaataccgtgggtattatacaactgggttcgtgtagtggcctgtgcgtttattaatcgcgttctttcctcatctggattcagttacttgccatttgggttataaatagttcatcgtgtaaactaactttttggctactttagtctgtttgtaatgggatatctcatttaatttaactgacattccattattcggacgttcctttatccgtggtttatttgtataaccactaaaacttgtagctttagag

SEQ ID NO: 19604 - DNA, 672 bp, Zea Mays
ccgccatacacgctcacgggtgcgccggctcgccttgtgcatctgcggtgtgggcccggaccagttagagggtcttcttctttccccgcacgactcgctcgcccgcacaccggccacgggggaatccgggggtggttgtgctagtcatgcataccggacctccccttgcccctccgattcgctccacgccagcacctaggaacttgggccagagcttggtgttccgctattcgcaaccgcaaaggagagcttgaagacaccaccgcacccgtatttggtctgtggtgccgttcggctccccggatgtgggtagagcgcatcgtttgcgagtgagggacctggacagggcgactccaggggcggtgaaccggtgagtctctgttaattgctcgctgacgacacatcgccaccgcgggtctgcgctacaccgtggatagggcctcgcatcgcgtgattcatggagaagaacaggtggttcaagaggagccacacaacgaggagttcgattcgatctaggtggtgtctcccagttgactttctggcgccaaggatggattttagatcctgttatatttatcttttattttgtaagacttccgctatgtaataagtactctgatgttattatgacatttatctctatacactttgttattatatatgttgtcttct

SEQ ID NO: 19605 - DNA, 978 bp, Zea Mays
ctgcaaaaaaaatcccagcagtcttatcttcctagtcgctcttctatccccagccgatgagctcgatcctccctcatctccctcctctcggcgccctgctcggccctatcatattccctggcgcccgcgcgtgaaatttctcgcccagctcctttgttctccctgctcgttctccagtggagtcttctctgcgcggcgagctctctgccgcggcttcctttctccctcggctcgccccgatggcgctccaccgagcttctccatcttcctcggtcgcctctctctgcgcgccggctgccagctcggtgttccagccccacgcgcgctgccggagctcgctcctgcgcatccatggtacgttgattaaccacgagatgcggagaacttaagtcaagtcgaccccaagcgcggactacttcgcagaataatgctgatggatgaacctgcctgatcaagtgctaggacaaggatgatcgccaaatggacgtctaacaaacactaacctagtgtttattccaggcaagccccggtgtattttaagtctagtgaaatgtgcattaggtttataggagttgcttgaaaccctttgatgcattgccttccttgatatccatacctgttatagatacttctttggaagtatcaaaatttgatttacaaaaatgcttagccctgcttagatcttgtggatagaggttgtcttttgcgttaaggccttgctcaggggttatcctgaggaaagatgacttctacctgcaaggttatattttcattgggagcatggtgggatcttactgcaaagttccctatgatgctcttttcatcctaaggaaaacaaacaatcctaagggtggaaatacttaaatcgggacttgggttagtaacgggtgatgttctacccaggttgattaaggattgaacgtgtatgtaggtgtgctgaccgcggaccctttaactggtcacatgcctcgtcatggg

SEQ ID NO: 19606 - DNA, 756 bp, Zea Mays
cctaggcccacggccaccagcccaccacgacgctcccagtttcaccttctccagtcctctctgctggactctcggcagattccgctccagcgcgcaccgtcgcccaccgtcgcctttcaaaaagctagagggttcctcgagagggagaagcgtacccggcagctccgctccgtcagtccgtccgcccccaagaatgtcagacgaggccaggcgcgggcccgcgggcgccgcgcaggtggtgcttcgggcctcctccgaggaccgcaagccggtgggctcggggtctccgccgccggcagcgaccgcgactgcggttgcgcacaagatccagctcaagagtgccgacatgaaggaggagatgcggcaggaggccttcgaaattgctcgcatcgcattcgagaagcacagtatggagaaggacatcgcggagtacataaagaaggagttcgacaagaaccacggccccacctggcactgcatcgtcggccgcaacttcggttcttacgtgacgcacgagacaaactactttgtatatttctacatcgactctaaagctgtcttgctattcaagtctggagtcgtctgcagccaagcctggaagccggtaatcttatgagcctgcatgttgatgtatcagcaacggattattcttcgcatgccatagtgtgagatcaggttgcatcttatttatgtctgatatatcttggtgttgtgagtacattatcttgttgcattatgattgccggacaactggaa

SEQ ID NO: 19607 - DNA, 1208 bp, Zea Mays
gttctttctggctcatcagcttatcagtagggcactaaccattccaggcacatcggtccattgagatgcggaagcaaaggaagatgggtcatattacaattgtggggccttctaagataagtgtaaaatcacgcttggacaacttgctgcaaagaaactcgtctgatcccaaggaagccctcgtgttgctattataatggggtcccaatctgatcttcctgtgatgaaagatgctgagagggttttgaaagagttcgacataccttgtgagctaactattgtttctgcacatcgtacaccagagcggatgtatgattatgcgaagtctgctaaagacaggggtttcgaggtcataattgcaggtgcaggcggagcagctcatttaccagggatggtggcttcattgactcctcttcctgtaatcggagttcccattaagacttcaacactatcaggatttgattccctcctatctattgtgcaaatgccaaaaggtattcctgttgcgactgttgctatcgggattgcagaaaatgcaggtttgctggcagctaggattctggctgcaagagatcctgagctccaggacagggtaactaagtaccaggatgatctgagggacatggttttggagacagcagaaaggctggaggaccaaggcccggaggaatttctgaagggaatggattgaccccttttgaagccctggctctggggcctgggaggaatacgaatatatgggtcggcgataactcagtccactcgattatggtttaagatcgggagtcatcaaaaagatactttaaggactagttccggagctacaaaacctgaggggattgggggctagaatctccgtgactcttagagctgttttgatgaccaagaatcacgaagggatccataggcttggctgccttattcagtgattttagcctctctaatcccatgcggttttgtggttttcaaactagcactaataggcttggctgcactcgattttccttacaattcttttttgataattgtgctatcttaacccatcgcaacatgtccttttccccttctaatatagggtatgaattgggtttagaggggaaaaaagaacgggagtaaacgttgtacgtacgaaaagtaaaacggttgcctggatttttcagccgcacaaggtgctttgagtcaagtagttttacatattccctccgtaa

SEQ ID NO: 19608 - DNA, 2700 bp, Zea Mays
ggagaagaaaaaaatagcggtagcgctcggatcccttcttcctccagatcacaccaccgtcgcctccgcctgcaaatccattcctagactcgagctgttgctgcgagcgagctcgggttggggctcaggtctctagggtttcgcctccctgctcctggtgctcatcgccttggaccttggtctgtcgggttagggttgtcgcggctgcgggagccgtgggtcggcgggtgcggccgatgcggcgatcgccggagatagggaggctgtagcggcggcggggcaggggatctcctgggtggattctccggcgatggccgcagacgcactatccatcatcccgggcgccgtgcttcggaacctttctgacaagctctacgagaagaggaaaaacgccgcgctcgagattgaggggattgtgaagcagcttgcaatggctggggagcatgagaggatatcagcagttatctcgctgctcaccaacgatttcacatactcgccacaaacgaaccatcggaagggtgggttgattggtcttgcagcagttactgttggactcaccagtgaggcagctcagcatcttgagcaaatcgtgcctcctgtgcttaattctttcctggaccaagatagcagagtgcgttactatgcttgtgaagcgctatacaacatagcaaaggttgtaagaggggatttcatcatctacttcaacaaaatttttgatgctttatgcaagctttctgcagattccgatgctaatgttcaaagtgcagctcaccttcttgacaggcttgtcaaggatatcgtaaccgagagtgaccagttcagcatagaagaattcataccgcttttgagagagcgcatgaatgtgctgaatccttatgtaagacaatttttggtggggtggataacagtgttagacagtgttcctgatattgacatgcttggtttccttcctgattttctcgatggtttattcaatatgctgagtgattccagccatgagataaggcagcaagctgatgcagcactttctgagtttctgcaggagataaagaactcaccaatcaacgagtttgtgaagcttggtggggaacaacttgttccttactatgcagatatactgggtgctatcttaccatgcatatctgacgaggaggagaaaatccgagtggttgcacgtgaaacaaatgaggaactacgtgctataaaagctgatccaactgagggatttgatattggagcaatcctttcaatcgcaaaaagagaattaaacagtgagcatgaggccacacgaactgaagcattgcattggttcttcactttgctggatcaatatcgtgctgagttcttggcgtacctgaacgatatttttgatccactccttaatgcactttctgatccttcagacgtggttgtcctattagtattggaagttcatgcacgtatagctgaagagtctcaccacttccatcatcttgtatcctacctaatctgcaccttccacaacaaccattttctactggagaagcgtggtgctttgatagtccgtcgcctctgcgttcttctgggtgctgaaaaagtatatcgtgagttctccactattcttgagagtgaagttgaccttgattttgcatccgtcatggttcaggctttgaatttgattttgctcacatcaactgaacttggtgagctccgctctcttcttaagaagtcgttagtggattcctgtggcaaggacttgtttcagtcattatatgcttcgtggcgccactctccgatggctacaataagtttgtgtttacttgctcaggcatacagtcatgcgagctgtgttattcagtcgctgggagaagaagacataaatgtgaaatttttggttcagttagataaattgatccgtctcttagagactccagtatttgcttacttgcgtttgcagcttcttgagcctggaaagcacacctggcttctgaaaactctttatggtctcctgatgctgttgcctcagcaaagtgcggccttcaagatcttgaggactcgactgaaaactgtgccattcagtgaaaatattaagcgcacatcttcagcaaatccatactcccagattctgcaagtgacagaagatggcaatagaaaccaagatacacagaactatagtgcaatcaatttcccgtcccttctccagcaatttgagcacatgcagctgcagcaccgtaaccatttgaaggatcaactgcaatcccgcaaatctgcttcagctctaacgttatctcaggagatacaaagatacgaagcagcacattcctcttcgctatcagagattaacaggcccccttcaagaacatccaaaggcattttatgatgcatttgattattgcgatgtatgatatgtttcccagaagcatcatcacaaatatgttggggctttggttagtctccttgatttttccaaaggaggttgcatagggtacatagagtgtaatattttttgtttcgttcctagattttgtcaagagatggcaattatttattggagaaagctcgtttctgccctctagtcattcttttcttagccgtttcactgctcatctggtttctgtaatttttcaattgaaggccaaatgagcaaagtagtaattggagatatgttactactgttctgcttatccatctctaataaattagcgttgcaatgtaaagaaa

SEQ ID NO: 19609 - DNA, 372 bp, Zea Mays
  misc_feature (371)..(372): n is a, c, g, or t
gcagttgcagtggttaacaaccctctgccagagcgcaagaaggcacatcagtggcaggtaacaaacaccacttagcagcaggctttgcgtccgtcttgcccttttgtttccgcctcctgcccttaaaatctctaccgtcgcggtcaaatttgcgatccatacttggggagggccaagaaaccgagctctctttccaatgcccaccaacgtcaggtgaaatcggtggctggcctctttgaagttgaagggtttatgtgattccgcggtgggggtaattttcaggtgattgaggaacgttggtgtttctggacaactggagatgtactcaggccagcaatctgatcaaggtcctagtgcaaatagtggcagann

SEQ ID NO: 19610 - DNA, 2493 bp, Zea Mays
gattgtgaaaaccttgaagcagcctttagctttacccaccgcataaacacgactacacgaggtaaacaaatcagaggaatttgacgaggccaccgtcaccaccatggcggccgccgccaccaccgcttcgccctcggcctccttccctgcggcatccctccgtcgcgacgcgcgcaggacctcatgcgtagccgccgccgccgcggcgacgacggccgctgaggcggggctcgcggccgtcccggcgccgccgccaacgccgatggttcgggtggtgccggagtcactgcagcgggaaagcgggtgcctcgtggagggatttagggcgcgcggtgcgtgcgcggcggatggggaggggtttggggacgccgcgggggaaggaggaggccccggcgcgatggagtacctgaccagcgtgctgtcatccaaggtgtacgacgtggcaatcgaatcaccgctgcagctcgcctccaagctctcccaccgcctcggggtcaacatctggatcaagcgcgaggacctgcagccggtgttctcattcaaattgcggggagcatacaacatgatggcaaagctctcccgtgagcagttagagaggggcgtcatctgctcctctgctggaaaccatgccccagggcgttgctctttctgctcagagactgggttgtgatgctgtcatcgtcatgcccgtgacgacaccagaaatcaagtggaaatcagtggagcggttgggagcaacggtggtccttgagggggactcatatgatgaagctcagtcatacgcaaaattacgatgtcagcaagaagaccgcacattcatacctccctttgaccatcctgatgtcatcactgggcaaggaactgtcggcatggaaattgttcggcaactgcaaggtccactgcatgcaatatttgtacctgttggaggcggtggattaattgctggaattgctgcctatgtaaaacgggttcgcccagaggtgaaaataattggagtggaaccctccgatgcaaatgcaatggcattatccttatatcatggtaagagggtcatgttggagcatgttggtgggtttgctgatggtgttgctgtcaaagctgtaggggaggaaacatttcgcctgtgcagagagcttgtagatggcattgttatggtcagtcgagacgctatttgtgcttcgataaaggatatgtttgaggagaaaagaagtatccttgaacctgccggtgcccttgcattggctggggctgaagcctactgcaaatactataacttgaaaggagatactgtggttgcaataactagtggggcgaatatgaactttgaccgacttagacttgtaactgagctagcagatgttggccgaaaacgggaagcagtgttagctacatttctgcccgaggagcatggaagcttcaaaaaattcacagaattggttggcaggatgaatattactgaatttaaatacagatatgattttaatgcaaaggatgcccttgttctttacagtgttggcatttacactgacaatgagcttggagcaatggtggatcgcatggaattggcgaaactgaagactgttaatctaactgataatgatttagcaaaggaccaccttagatactttattggaggtagatcagaaataaaagatgaacttgtttaccggttcatttttccagaaaggcctggtgcccttatgaaatttttggatgcattcagccctcgttggaacatcagtctttttcattaccgtgcacagggtgaaactggagcaaatgtattagttggtatacaagtgccgccagtggacttcgatgaattcaagagtcatgctgataatctcgggtacgagtacatgtcagagaacaacaatgagatatacaggttgctgttgcgtgacccagaggtctagtataataggtgccgatgggttcctttgctcctataatttggtgtcacttttgaagtaaggttccactccaaggtagaaggtgcaagtttcttcttcagttggaatgcagtcattgccaaatataccttcaatgtgccatctcaccatctgtttactcagttagattttagcgtatcagtcgtgtatttttgttgttgtgcttcgtgaactcacttatccgtttgcggcacctagagtgtgtcaaataatgataactaatatgatatcgaaatgtctgataatatatatgtatttgtgatttgggcagcatcgttgttgtaaagtgtaaacccttgtccctttgcaatattgagttcttttaacaaatttgagatatttgaatttgtttgtttatagtctaatacgagttgtaaaagtagatgaaggcgtattaaacctcgtttgtgccgttagctgttgtctagagttaaaccacgaaaaaatcttccattttattaacatactcgattaaagtaaaccgtgtccgggagagtgccagttttattctagagggatgagcatcatgtgactaaaaatc

SEQ ID NO: 19611 - DNA, 1728 bp, Zea Mays
atactgcatcataccgcaccggcagtggcggagaaaagagatgagccagccggggccgggagccatcgccgcctcatgcctcccgactccgtgacggcccgcagccacaggccaccggataacgcacacagcggaaccatccaaaaacgcgggagctttcccccgtcaaagcccccaccctaatcccccgtctcgcgcgccaatcaaccagcaccgggagcaggagcaagagcaactcaccctcccctccggcttccgcggaactaggagctgccatgcagcccgacgccaacgctccctcgcaccgcctcgcccgcgtcgccgcgcacctaaacccccagcggccgcagatggaggaaggcgcgtccgcactgaggctcgtggtgtgccgcgccaagggcggcgcgccggggttcaaggtcgcgatcctgggcgccgcgggcgggatcggacagccgctgtcactgctcatgaagatgaatcctctcgtgtccgtgctgcacctctacgatgtcgtcaacacgcccggggtcacggccgatgtcagccacatggacaccagcgctgtggtccgcggcttccttggggcacagcagcttgatgccgcacttacaggaatggaccttgtaatcatacccgctggactccctaggaaaccaggaatgacaagagatgatttattcaacaaaaatgctgggattgttcgtacactatgtgaaggcgttgcaagatgctgtcctaatgcaattgtgaatctgatcagcaacccagtgaactcaactgtccccattgctgctgaggttttcaagaaagctggaacttatgatcccaagcggcttcttggagtgacaacactcgatgttgcgagggctaacacctttgtggccgaagtgcttggagttgatccaagagatgtcagtgttcctgttgttggagggcatgctgggataactatattgcccctcctctcccaggttacacctccgagctcattcactcaggatgaaaccagatatttgacagaccgcatacagaatggtggcacagaagttgcaaaggctggatcaggctccgcgactctgtcaatggcttttgctgcttctaaattcgctgacgcatgcttgcgagctatgcggggcgaagctggaatcgtggaatgctcatatgttgcatccgaggtgacagaactgccgttctttgcaacgaaagtgaggcttggccgtggtggagccgaggagatcctcccgcttggccctttgaatgatttcgagagagctggtctggaagcggcaaagaaggaactgggcgagagcattcagaagggcatcgctttcatgagcaagtgaaagcggagcggtacggagggatcgtccctgagtcagatccggaccatacgtagtaacgtagatgtagggtgttgtgatatagtgctcctacctatacttgtaaggccacggtaaaaagaaggctaattaccctttagcaactgtgaccatctacttggcataatggcatggaataaatctttcgtcttcggtggcggacaagggccgtgcctgctctgtgctttgctggacggtgggtgagccacagcggggccgcaggaacaacagaatagcattggtttggagaccggtgttacatgagcgcgacttttttttttcggttcggtttttctgttttttttataactttggtttctgaaaaacagtaaccggaatcttctgc

SEQ ID NO: 19612 - DNA, 1175 bp, Zea Mays
cgttgcccttgtcctgcttgagttcattgtgaagctgaggtgagtatataggcataaagagagcatgaacactgttagtggtacaaagcgtgcaccaaggagacagtcgcaagatgggtctggtgataaactagtggtgatcgtggaagcaagctcccggggggtggggagccgtcgtggaccacatgcccctattcctggcgccctaaactcacccattgatgtggaggccatcgaagatgaagttcaggcagtatctccttcgcgagtgcccctgccaaggaggaacaggagaaccaggagggaacctataacagtggttgacttggaggttgaagctagccgggaagggagcaaacgccagagggttgaaccagtaggacgtcacctctatccagattggggagcaaggtctagcttgcagtcaaatgccgcacaaaccagcaaagagcctgccaaggaggtccccgaggaaccatcttttacctgcccaatatgttggaataagatggaggagccttccacgacgacttgtggccatgtcttctgcgacacgtgcatcaagcaggccatcaaggttcagaagaaatgccctacttgcaggaaggggctgaaaatgaatagtgttcatcgtatttaccttccgaacggttctagttaagctgagcagctttacatatctgatggcttgtaactttgggggcaattagcttaacctctgttatccgatacatgccgactggctttgtcaaagaaacttctggtaacgtaaggctgtgcaatgtactgtgaggatcagaaattcttagcctgaacaacagatagatgtttcatcccagtctgtattatttatcggcatcaccaggagttcatcatgagaacttcctgactagggaagtcgatatcagcctcagttttactctgcatccatggttcccagaatgttttgttaggatgtgaccataagatgatgcatataaccgtgcaaaacattattttgcaccctattatgtattatttatatcctattatgtattatttatatagtagagttgtaaaatataaatgatgagtaaagctgctgaagatagccttatatatattgggttattgtcttgggggattattgtaactgggatttgcttcgttctaaaacgataatagcgagttgaaat

SEQ ID NO: 19613 - DNA, 198 bp, Zea Mays
agggagggcgggctcgcggggatcgacaacgcacaacagagagagaggtgcgcacggacggtctagatcaccggaaggcagaacgccaaaaaggcaggctactcttagaggcttaataagtaatagagattagctgttattatggttattctctgcagctgctgttgtattctttagattgccagttagcaatttgct

SEQ ID NO: 19614 - DNA, 1305 bp, Zea Mays
cgcgcatctttataggcaagcggccaccccaagcagccaagctcgtcttccattccagtacaccgcacgcacgcactcgcctccgacagcgaccgcgcaacgtccttctcccgcgccgcccggccggccggtccctgttccctctcctcccctcggagcagcaggagcaggagcagccgcgttcgtcctctgcgctgcgcggcccgccggcctgaccaagcaaagcttatcggccggagccggacgaacgaacgatgcagcaggacctcagaaactcagagagaagaaacccggaacaggcgcatccagtgatgtcggcgagctcgaccaactccgcggcttccccggccgtgtccggcctcgactacgacgacacggcgctcaccctcgcgctcccgggctcctccgccgagcccgccgccgatcgcaagcgcgcccacgccgaccacgacaagccgccatccccaaagctcgtgaaggtggccgtggacggcgcgccgtacctgcggaaggtggacctcgcggcgcacgacgggtacgcggccctgctccgcgcgctccacggcatgttcgcctcctgcctcgttgccggagccggagccgacggggcggggcggatcgacaccgccgccgagtacatgcccacctacgaggacaaggacggcgactggatgctcgtcggagacgtccccttcaagatgttcgtggactcgtgcaagaggatccgcctcatgaagagctccgaggccgtcaacctatctccgaggacatcatcccggcagtgattgttgttggtgtggacgccatatgccctacgcggcttatctctccgaattagttcacagagtgtgtgctggaagaggcttggctgctcaggtcctccatgcacacgtcatacaccgtacgtagggtgagggttcagtctgttgctgtgtgttctgtacaggccacaccacacacgcccccatggaaaactttttcagtttcgagtgcccctccctctcggccggacggtttggtttttggacgacgccggcgaggaggcggcgctagcacactagtagctccgtttccgtgtgttctttcatacttggctttggtttccgtttcagtcttcggccctcggtcgtcttgtctcgactctcgagggatccatgtatacacgaacatggtacatgctgtgtgctgtttccattgtataaggtcaaagaatacaagtacgatctgtctctgttcttgtagtttcggcggcagcctgatcgtctggtcgtttggctttaatttataccgacttctattgattat

SEQ ID NO: 19615 - DNA, 1188 bp, Zea Mays
ccgtccgcgtgataaagcgccggcgcctcttctcgcgtggcctcccgaaggttctaggctcgattgaacaaattggagcggcactacactcctccacgcctccacctccagcctcccactgatctggcctctctcgaggtgagcgcgcctttaatcctagatcaatatgagaaggggctacagttacagtccttcaccaccaaggggctacaggagaagggcgcgcagtccaagtcctcatgatcattatggtggtcgtggtagggatctcccaaccagtcttctggtcaggaatctccgtcgggactgcaggccagaagacctccgtcgcccatttggacagtttggtcgagttaaagatatatatcttccaagagattattacactggggatccccgagggtttgggtttgtccagtattatgatcctgctgatgctgctgatgcgaagtactatatggatgggcaggtagttcttggtaggcaaataacagttgtttttgcagaagagaacagaaagaagcctcaagagatgagagctagggacagagtcaggggtcattcttatgatgacaggaggtattctcgctctaggtcgcctcgttattataggggccgctctccttcacgcagccaaagctactcgaggtctccacctcagaatccaagacacagacttagagagaggtcctactccggctcacctgtggacagcagatcaagaagtgggagcccttatgaggatggatatcgcaaatcatcacggagagagaggtctctttctgtcagcggatgaagcagttttacggtctagagctattgctgtgaatctgcgcatggtggcctacttgctatgtctttctgaaccatatatgttctgtctagattatcattcccagtaccagagaagtatcgtgagactgtttgctgtactttctagtcttgaggatacagaagggggtcaccgattctctcagtagatggactattgaccactagctacgccagttccactgctttgtgtatttacaggcagctttgcggtttgaataaaattgtttgcatcgtgaaagctaattggtaaaaagactgaatcatgaaacgaacgttttgcatccctgttccctgatggcatttggatacgattttttgttctttcgacgaacaatttggcaaatctgcatctta

SEQ ID NO: 19616 - DNA, 841 bp, Zea Mays
cttgtatctgaagcctgcttactcttggaagaggaagaagaagctctaagacaactgaggaagaacttggtcgtccgagcgaaacccgtgccgagcttctaccaagaacccccaccaaaggttgaacttaagaaggtgcctccaactcgtgccaagtcaccaaagctgacgcggaggaagagctgcagcgacacgcctcacacaccagagggaggaaacggcggcggcggcgcagtgtgctgccggctgcaccgccacagcatcgggaactccaaagacatcggcagcaaggcacaatgctctccaaagactggaccagctgctaagtccagggcgcccccaaatccagggaagacccgagggcttccatgaagaaagcgggacagcagacaagcgccgccgctgtacaaacctgacccgtgaagcatccattgccatgccgtttttcatcttaatccatataccctcacatcacccggaaagatggcctcatgccccggcaacagacagcgtgcctggtgctggattgtttttttttgggcgttgcccttgtaagaacctggctgcctgccagagaccgtgcgctgtgtccgtgtctgtaaatttgctgcaagttttgtatggggtgaccgagtcggtcctgtgtgagaaccaaacggccgggcatattgtcattgcgtggggggcagcattcgctgatactatgtaatgtacctgagtgagctgtaacctgttgtgggcatattggcaaagcgattctgattgatgtcgaaaaaaattgaccaggtcatgcatgattcttttcttttcttcctgtgaacataccagttaatcaatcaag

SEQ ID NO: 19617 - DNA, 2817 bp, Zea Mays
aatccgattcacaaaggagattgctacacctgatttccaaaggagccctaacttgtagtgtgatttaggggcgatcttggccctaggcgtgagatctcaccagctccggcactggtgccttgcacagctccatggcaagaacacaggggtcttgaaactggaacaggccccaaagtcacagtccacgctcgcctcttcggtcccattggagaatcatgttaacctccatgacgctactggcgcctgccaagcgttcgacgaaattccccacaaggacaccctggactatgcccttctcgacgacatggcagggtttcgtccaccaggcgctagaccacttcttggatgcgcaccgccgccagggcaggtgtgttggcggtggggcactgttaggcatcatcaaaatctgtgggtcagtgccagacagagtactggggaagcagctgcatgccctgtgcgtcaggtgtggacatgatcatggcgacatcagggtcggcacgtctcttgttgacatgtacatgaactggcacagtgttctggacggcaggaaggtgtttgagggaatgctcaagaggaatgttgtcacctggacatcgttgctcactgggtacatccaggctggagtgttattggatgttatgtcactcttcttcaggatgcgtgctgagggggtctggcccaatccgttcacattttcgagtgttctctcaatggtggcgagccagggtatggttgatcttgggcagcacgtgcatgctcaatcaattaagtttggttgctgctccactgtgtttgtgtgcaattctctgatgaacatgtatgcaaagtgtggactggttgaagaggccagggtcgtgttttgtaggatggagaccagggacatggtgtcgtggaacacattgatggcgggccttgtgttgaacgggcgtgatcttgaagccctacaactgttccatgattcacgatccagtattacaatgcttacagagtcaacatactcaacagtgatcaacttatgcgcaaatcttaaacaccttggcctggcacgtcaactccacagtagtgttcttaaacatggttttcattcgtatggcaatgtaatgacagccctcatggatgcctacaacaaagcaggtcaactggataaggctctggatgtatttttgttgatgtcaggatctcagaatgttgtttcatggactgctatgattgatgggtgcattcagaacggtgatatacctcttgctgctgctctttttagcagaatgagagaagatggtgttgctccgaatgatttaacctactcgacaattctgacagtgtcagaggccagctttcctccccaaattcatgcccaggtgatcaagacaaactatgagtgtacaccaactgttggaactgcacttatggtctcttactctaagctttgcagcactgaagaagctctttctatattcaaaatgattgaccagaaagatgttgtttcatggtctgcaatgttgacttgctatgcgcaagctggtgattgcaatggtgccacaaatgcattcatcaagatgaccatgcatggcttgaagccaaatgagtttacaatctctagtgctattgatgcttgtgctagtccggcagctggagttgacctgggtaggcagttccatgctatttctatcaagcacagatgccatgatgcactctgtgtgagcagtgcacttgttagtatgtatgcaagaaaaggaagcatcgagaatgctcagtgtgtctttgagaggcaaacagatagagatttgctgtcatggaactcaatgctatcagggtacgcacaacatggttacagccaaaaggcccttgatgtatttcgacagatggaagttgagggcattgatatggatggtcttacattcctttctgtgattatgggatgcgctcatgctggtcttgttgaagaaggtcagcaatactttgatttgatggtcagagactacgggatcactccaacgatggatcattatgcatgcatggttgatctctatagccgcgcaggcaagctggatgaaacaatgagcctcattgaaggcatgccattcccagcaggtccaacaatatggcgcgcattgctaggagcctgtagagttcacaagaatgttgagcttggaaagttggctgcggagaagctgctgtcacttgaacctcttgactcagctacgtacgtacttctctccaacatttattcggctgcagggaagtggaaagagaaggatgaagtgaggaagctaatggacactaaaaaggttaggaaagaagctggatgcagctggattcagatcaagaacaaagttcatttctttatagcttcagacaagtcgcatcctttatcagaacaaatatatgcaaagctcagggcaatgacagctaagttaaagcaagaaggttattgtcctgatacaagctttgtgcctcatgatgtggcagaagaccagaaagaagctatgctggcaatgcacagtgagcgcctagccctcgcatttggtttgatagctacaccaccagcggcaccccttcacattttcaagaacctgcgggtgtccggggacggccacacagtgatgaaaatggtctctgaaattgaggatagggagattgtaatgcgagattgctgcaggttccaccacttcaaatcaggggtctgctcttgtggcgatttctggtgaatggattttgaaaaaaaatggttgtgcattcaatgctcagccagtgtcccccttgaacaatatcactggggcgtaccaattgtgaggtcgctacaccgtggaatcccct

SEQ ID NO: 19618 - DNA, 4017 bp, Zea Mays
atggctgcggaggcactgggagctatgcgttcccgttaccgcagtgcggctattgagccccttcgattacgattgagcaacccatctgattctggttgcggaagatacgtgtttcgaaatttgatttccgctatgctactagcatatatgcatatggaaagtggcgaggaaaacctccaggagaaggtgcaggaaggtggcaaggtaaacctcacggagaaggtgcaggaaggtggcgaggaaaacctcacggagaaggtgcaggaaggtggcgaggaaaacctcacggaaaaggagaatgaagggatagtggaggtctcaaaacccccccaaaggcgtcggaaggatcctgttgcagacccctcttctcttgagtctagtggtttcatgcgatttcgggagaggaggaatgcttcagcggttcaggagcaggggcctaagaagagaaggattactgaggattcaaacatgtgccatcagtgccagaggaatgatagcggaagagttgtacggtgccaaggctgtgtcgtccgaaaaagaaaatacagatattgtgtgaagtgcattaaacgctggtatccacatttatcagaggatgattttgcgaacaattgcccagtttgtcaaaataattgcaattgtaaggcttgtctgcggggagacataacccgagccaactcgaggaaaaaaaagaagttactgcaaataaattctggaggatatagtgtgtctgaacaagataaaattaaattctcaatgcgtatcgtgcactttttgcttccttggctgaaacaattccatcaagagcagatgcaagagaaaagtgccgaggctgcaactaaaggtattgatgcagacaaactggaggtccctctaaccatttgtggaaaaaaggaacgtatatactgcaacaactgcaggacatctattgttgacttccacagaacctgcaataaatgtaactatgatctctgtctccagtgctgccaggagcttcgtcgaggccttgtttctggtaatgatgccaaggttgatggtggaggcaagcaagattttctatcgggagttagtcatgataaaatcataagcaaagggccatccgatggacagaatgacatgttgatagatagtgtagttcctggtgaaaacaacacttctagcttgagacagtggagtgtgaataaagatggaaccataccttgcccaccaaatgcatttggtggttgtgggagctctcttcttgaactgaagtgcttgtttaaagagaagtttattgctgaattactggagaaagctaattcagcgctcaataatgaaatggaggtgaagatagaaggatcaaaatgtccctgcttcactgaatccggtgacatggatgatggtatatcacggaaatcatcttgcagggagaattcctgtgataactacatatattgcccaaccgctacagatgtccaaaatggaagtttagaccatttccaggagcattggttgaagggtgaacctgtaattgtccgtgatacacttgcgttgacttctggattaagctgggaaccgatggttatgtggcgtgccttacgagaaaagaaagagaaagttgagaggctctcagttcttgctcttgaatgcttgggttggtgtgaggtcgatgtaaatattcatatgttttttgcggggtattcaagtgggcttgttggtccagacgatttgcccctgttgcttaagcttaaagattggccaccacatagttcttttgaggagcggctcccaaggcatggtgcagagtttatgtctgcattgccatttcgtgaatacactgatcctaaatggggacctcttaatctggcagtaaagcttcccgataatgttaataagccagaccttggtccaaagacttatattgcatacggtgtttccaaagagttgggaattggtgattctgtcaccaagcttcactgtgatatgtctgatgcggtcaatatcctcacacatactgatgaaataaaactcaaagcaaaaaggattgccgcggtggaaaagaagaagcggtgtttaggaatgaagattctatctaccaaggaagcaagtggaggccttcaacggtgtgcagattattttggtatgccaacagctcccagtgaatctaacaaggagccaaggcctgaagagtgtgtaaatgaactgggcattaaacaaccagtacagcatgttgcttccgaggagcaggaaggagttcaagatgatgccaaggcagatgcaaatgttatgaatgtttcttttggtaagggaaaatcagaagattcttttggtacaattaatggtaccaacagtggagataaaatagaatctcctagtggtttagcagaaagaacattgactcagcctaccactaagggttgcagtaagcagcgtggccgtagttctaatggtagaggaaacaggactaaaaaaatagaagaggggaatgcgtctggactaattgctgtggctcccgagtcagaagatgatgatgatgatgccgcatttatagatggaaaccaagcagagggtggtgcactgtgggatatttttcgacgggaagatgtgagcaaactgcatgattatctaatgaagcatgcacatgagtttagacattgcaactttgagccagtgaagcaggttactcatcctatacatgatcagtgtttttatctaacaattgagcacaagagaaagcttaaggaagaatatggagtcgagccttggacatttgaacagaagctaggtgaggcagtatttatcccggcaggatgtccccaccaggttagaaatttgaagtcttgcataaaggttgcactagattttgtttctccggaaaatgtccgagagtgcatcaggttaacagaaggtttccgtctgctgccgaagtggcataaggtgaatgaagataaactggaggttaagaagatagctcttcatgcattcaatcaagctattaaagatatcactgatgaatcatctaatagcaatgaaagcaaatggatccggagataatgaggatcatgaaggccattgaatccatgcttgatgtcatggaagttagcaccacccgcattcgacatcttgctatcgagaacctgaatgaaaaccgtagtggcttatcggatgccgacaagataacaaaacctgattttagtgtactatgcatgatattagtaccttatataatacgtagcttggagaaaaggccattcaccgtttctcattgttgggaggttctaaagaatgaagccaaatggttacacttggagcagggctcacaaaatattgatgtgctggtgaacaaaggtgtagggttttctccaagatgtcggatttgacactgaagaagattgagtattggaagaggtccgattgaacatttggcactgacattcaccaacttgttcaaatagaggaaaagaatatggaaatggagaaagagcgcatgtatgcatgtgtaggtcagggagtggctcggatcagccttgagtcaatttccactgcgttttcttcggttatggatgagcacgaggagtaaaagaaacagaagaaggctgagtgtgattctcatatgcttattttcttgtcctgtgtaatggatgtgtgtatgtgaaccatatgcgaacttaaacgtctttgtttgtaccggtcaggccattctgagtgagggttccgtctcttctttttaggactccactgcgaggtgtcggtgtgtgagaaatggtgcaaacgtgtgtatgaaactctacgaggcatactcttatctagtattgtgtctagtgaagaatgggacacatccgatgctactgtaaactcacttgttgcactcactttttgagttggatttttctttcaaacttttttgtatgctctcttgagtttatctaacactagatttcataagtgtgcaccattgtccataactagactcacttaggtaaagctatccattccatgtcctctttataatgtgacataaataaggattttatcact

SEQ ID NO: 19619 - DNA, 1905 bp, Zea Mays
atgtcatccgaggcggtgaaggtgacaatgctagaatcgatgttccgcagacggaagcgtgaggagcagtgggctgtcaagaagaagaaggccatgcccgagaagaagaagtccatcgagagacgcaagctcatattcagtcgtgcaaagcggtgtattccggggtcaatcggactacagtgctgttggaggaagggaaccggacaaatcaccccgtcgtctcgtcccgtagtcactcgcagagtcgcagtcgcagcccctgcgcccaccgggatcgtgatggagagctgggtccgcgcggtggtggaggccatccactcctctcgctcccagacagtcatctacctcgccggcggtgcatcccaggcgctcggttggctcctctccgtgcccggcgcttcgggcaccgtcctcgaggtcgtcgtgccctactctagggcctccatggcgcagctccttggcaagatgcccctgcaattcactagcaagcaggctgcagaggacatggcactggccgcatacaatcgagcactcaagctttctggaccagcaatgagtcggagtatgtgtaggtctgcaagttatgggtgttggatttactgggtcactggcgagctcacgtccaaaacatggtgaccacaggttttacgtgtcaacatggacacataattgtctcaggacatcacatgttaccttgtcgaagggtttacggagtagggaggaagaagacaaggtttcaagctactttttgcttaaggcaatagcagatacctgcagagtttctgcaaccattcagtcagacattcacaaatctgaaattccagaagaaatcatggaacaatttgatgaagatcaagaactccagcaagttattaatgggcaagtttgcatgaaagtatataattttgctgctccggcggaaagtaacttgaacagaaaaataattctgcctggttcgttcaaccccttgcacgatggtcaccttagattgctagaagctgcagtaagcatgtgtgatgatgggcttccattctttgagatatcagcaattaatgctgataaacctccactatctattgcagaaattaagaggcgtgttgagcaatttagaaaagcagggaagaatgtgattatatctaaccagccatacttctataagaaagcagaacttttcccaggaagcgcttttataattggtgcagacactgcagcaaggcttgttaaccctaagtactatggaggagattacaacagaatgctggagatacttctcgaatgtaagagcatagggactacttttcttgttggtggtcgaaagattgaaggagatttcaaggtccttgagaacttagacattccagaagagctgagagaaatgttcatttctattccggaggaaaagtttcgcatagatatttcatctactgaaataagaaagagccaagggctctgatgtatcaagtggtcgtattctacagcagatttgggatgattctccacgactatagaaggtacatttggatgctagcagtcaagtctgaattctccaagcttacttttttcacatttgtggggttgtattcacgcattctattgcagattatgataggtccattcatgcatccttgcaaaggaactgttgatgtattctcagggagaatattttatttaacttttgtcttgactgggccccttggtattttgttcagcaaattggaatcaatcctcttgtagaacctcttgatgtcttcactaccccttgcggctaggtggtcaacctctgtctcatatctttggtacaacgctggcaaagtgtgggcgcagagaaatcctgtggatgaaatataagaattgttaaatgaggaatttcttcagatccttcccgcatgcaatgtcataaagagc

SEQ ID NO: 19620 - DNA, 2848 bp, Zea Mays
ctcctgaccacggccccgactggagactgctgttcccctcgaccctcgtccgtccgtccgtccgtcacctgacggctcccaaaccctaccccgcagatccctccccttcctctacccccgcctcgccgccggtcttcgtcacccgtcgccgtgcccgtcggcgcggtgttaagggtccgctacgctgcacctcgcggggagaaaggggtgggcctcggggacctccgccctccgcgcaaggtcattgaatgaccttctatacgaatatggatttgaatgcatcaccggtgcctgacgatgatgagcaacagccttatgatgattcagttgaggttgggtatgctcagacggaacatgttgaatctgctgttgcaacattgcgccgggagcgtgaagagagacgcaagagactaaagagagagcagcaggatgatgggtcaaggctacattcccagcagattaggaatgattatgctcctcaacccaaaagacatagtcgcattaaagaggcacctcagggctggctggactgccctgcatttggggaaccaatagataaaatcataccatctaaagttcctcttgacgaaacattcaatgagtcagtgcctcctgggaagcggtactcctcaaagcaactagttaacaaacaaagaaaagctggccgcgaaataggtctggtgattgatttgacaaataccacccgatattattcaccagcagaatggacgaagcaaggtactaagtatgcgaagattgcatgcaaggggagagatgctgtacctgacaatgaatctgttaataagtttgtctatgaggcaatgatgttccttgatcgacaaaaacaatcaaagaatcctaaatatattctggttcactgtacccatggtcataatcgtacaggtttcatgattattcattaccttatgcgcacacacgtctcttgtgttgctgaggcgattagtatatttgctcaaaggcggccacctggcatatacaagagggactatattgaagcattgtattcattttaccatgaggttcctgacaatatgatgatagcatgccctccaacaccagaatggaagagaccagatgatctcgatttaaatggcgaagctaagcaggatgacgatgatgacaatggtgatcctggaccactgcataatgaatcagaggataaagtcatcaccaatgacgatgtgttaggggatgaagtgccatatgaccagcaagaagctttgcgtgtcctatgttatcggttgcttgaaatgcctcttggaagggggcatgcacactttcctggatcacatccagtttctcttaacagtgaaaatctgcaactacttagacagcgatactactatgctacatggaaagctgacggaacacgttatatgatgcttataatgagacatggttgtttcttgattgatcggaattttagctttagaagggttcagatgcgctttccccataggagcctccaaggtctgcaagatatgaccttgattgatggagagatgattatagacacagtaccagattcaggcttgaagagacggtacttggcatatgatcttatggcgcttggctcagtgtccaaaactaggttgccattttctgaaaggtggaaaatgctggaagatgaaataatacagccgcgtaataatgagaaaggccttgagcgtggtgctaagagcaatccgttgtacaaatatgacatggaactattttcggttaggagaaaggctttttgggtgctattaacagtaaaaaaggttcttaaggtgtttattccatcgctatgccatgatgctgatggccttatatttcagggctgggatgatccatatgtaactcgtactcatgaaggtcttctaaagtggaaataccctgagatgaattctgttgactttctgtttgagcttacaaatgataatcgtcagctggttttcctatatgagagaggaaaaaagaaacttatggatggtgctcggatatcatttactgatgatgtagatccatcttctgtcgctgggaggattgtcgagtgctcttggaacaaggaagaacagtgttgggcatgtatgcgtattagatctgataaatcaactccaaacgacatcaacacataccggaaggtgatgaggagtatcacagataacattaccgaggagaagcttctcgaagagactgatgagataacgctcctgccgatgtatgccgataggatgaatgttcgtgttcatacaaagatggcacaacacaggcgaagattgccaccacagtgctagtctcgttgctagagtgctgggtcgctctcctagccagcggctggcttctgtagctgtgtaattagtagaggtttcagtagcccccccccccccccccccctatgatgatggccagccaactaattctttgcacttcatttgtgtcttgtcccctgccctcacacctacctgtataggcttccctgtaaattgtgtgctctatgttcctccatattctcccctatggttttatttttcatgggtgtagaatagcgtttaacaaggcgggtggtgttctatgtaggcgttgccatctctcggtgctgcctcgtgctagaataatgtagggtgtactggcgataccatgtggttgcgatatatggcttggttttagtgttttggtttgtgcgcacctgatccgatcctttgtccaacgaagattttttccccttatttttgggtaaaaaaggacgtcaatgttaccactctatggtatagtgcttttttgttcacatggttagatcatgtactgcgtggtccattttttctctttagtgtccgccactttgtgg

SEQ ID NO: 19621 - DNA, 2014 bp, Zea Mays
gctaccagtggcatcctacgcggcagaggaatagccacgccaccacgtcccccgcgcccgccgacccacccgcaaacgcaacgcaataataataggctaggcagccagcagccaccatccccaccagcccagcaccaggaaggaaatagcggcgagcaagagctggcggaaagaagaggaaagccaggcacgccgctcacccaccgcgccaccaaccgcagatcctaaatccgatctctctctccctccctccctccctcccgctcgaggttttcggtttcgatccggcaagcgggcgagatcttcatggcgacgtcgttcgaccgctgggagaaggaccccttcttcctcgccgccgaggaggtccaggaatccgccgatcggatggaatcggtttatcgggtatgggtgcaggagaggagcgggggcgattccgaggcggcaagcgtcactggaggccctacagctgcgcagcttcgccgcgagctgcacacggcgcttggtaccgccaagtggcagcttgatgaactggcgcgggcagtcagatcgaacgatctggttatgtcagcaggaaaagacacaagggctaggcatgatgattttgttacagcaatcggctatcgcatattagaggtcgagaactacttgaaagaatccaatcttgcggacgggagggggccattgagctgggttcacttggatgaggatgaaagggacgaccttgcagcttttctatctgccagtccttttcaacagaaagacaaagtggtcacaattccttcagcaggtgacattgaagtgggcagcaatgcagcaaggatgaaaaatgatatatcaactgacagctccaaggattcagctggttccacggatttgatttcaggcacagcaaagcaagatttgcatcgtgggcacagaagagcagctagtgccagtgctgatataggctcatggagcatgtcaatccctaatgaatgtgaaggaactacagaacagttatctgatggctcagacaaattgcctttgcataagatagtgaaaacatgtgctttgacaagtaccttgcaatctaagactagaacgaagtggaaaaatggagctgttaggtgggcaggcagtaaccaacaggatgttgaagaggctatccctctgaatacttctcagttgagtcagggcttagaggaatgctttgaaaggaacaagagttgcttaagtacatgtgatgagcatacatacaataagaaacttcatggttggctcggagcccttcgtagacaacttcaaaggtctcagtaccaaattcaatatgggcatcatattcaattgattgttttggcacttgctgcccttgtaatcattgtatgcatagtgaggacaatctggtgactatatttatttgctcatgattggatttctagcctcacaagatcagcagcttgtatggtaaattcactggcagttaagttactcttggtcaacttgatcctgaagcatgcatatgaggcaactatggtagaccattttggtagtcaaggttcaaaatcacgtataatgatctggttggggccacttatcttgccacatgttcagggcaggctgcctcgtccttggaagaacatctacaggacaatccttgcagcacggttgcttcgccacacttggatatgctcccgaatggtgccttgaacaattgatgcacctcgagaactcaatcctccgtggtgagttggtgactgggtggcacctatgcaatggcccagtataaattagtggtgcagtgggctggcgatcatgctgctagcaaccgaaattgcaagacttgtatcatacatcaacgctattgcttttaccgcctgacacggaagggtggtgatcatgcatcaatgctattgcttttactgcctgacacagaagggtgtcattttttttttgtaggagttgccatctgaactgtagagctccataggggatagggagcctgacgagatgtgtgagctgtacccataacttgcgg

SEQ ID NO: 19622 - DNA, 990 bp, Zea Mays
cggggctcaagcgctcctccgacggccacaacatcacatgaacagggcgccaaaacctctccgacagccatgacgcccggagggaggcggagccttccccgggtctcgaagatggcggcgccgccggcgagggcccgggccgactacgactacctcatcaagctgctcctcatcggcgatagcggtgttgggaaaagttgtctccttttgcggttctcagatggctctttcaccactagctttatcaccaccattgggattgacttcaaaataagaacagttgagcttgatggtaagcgcgtaaagttacagatatgggatactgctggtcaagagcggtttcgaactattacaaccggggtgcaatgggaattttgcttgtctatgatgttactgatgagtcatctttcaataatataagaaactggattaggaacatagagcaacatgcttccgacaatgtgaataaaattttggtaggcaacaaagctgacatggatgaaagcaaacgggctgtgccaacttcaagagggcaggctcttgctgatgagtatggcatcaaattttttgaaacgagtgcgaagacgaacctgaatgtggagcaggttttcttctccatagcaagagatatcaagcaaaggcttgctgaatctgattcaaagccagaggatcgcacgatcagtattaacagacctgagggtggtgaggcttcagcgtcacaaaaatcagcttgctgcggatcgtgacggggttacatgcgataccatactttgtaatttacccttctacgtaccttttatctggctgtcatcgttctcgtctaacttttaaatgcaattgcttggattcaggtttctgtgttgtaatgtgaacaattttagttgtacccctggtagaaatgcatgtgctcataagtcattgcaccttgttttgatggaaatgcttgcaaaatcgttcacagtttaggcgcggccgtactacctgttgctt

SEQ ID NO: 19623 - DNA, 1699 bp, Zea Mays
gttcccaagtcccggcccaacccatctgtagcactaggcaacagcgaagctgagctgagagctgtcactgcatctgcctcatctaccagatggtgatgatgtcgggacttgctgcctacggttcactaagtatgacaacgaccgggaacgcgccgttatcatggaatacacgggcaccgccggcgcgactcgctttccagaggcggcggcgcatgagtacgatcacggccacggtcacgtgcaggcgcgaggcggcgatgacggccccggagaaggcggacgtgctgcggtcgctagacgggtgggcggagtcgaacctgctgccgctgctgaagccggtggagcgggcatggcagccgcacgacctgctgccggactcggcgtcgccggggttccgcgaggcggtggacgagctgcgggcgcgggcgcgagagatccccgacgactactacgtgtgcctggtgggcaacatggtgacggaggaggccctccccacgtaccacgccgccctcaacagcttcgtgggctacgacagcccctccagcgccgacgcctgggcgcggtggtcccgcggctggaccgccgaggagaaccgccacggcgacctgctgaaccgctatctctacctgtgcggccgcgtcgacgtccggcgcgtggagcagaccatccaccacctcatcaacgccgggatgcgcctcgcctccgacaagtgcccctacaggggcttcatctacacggcgttccaggagcgcgccaccgccgtctcgcacggcaacacggcgcggcgcgccatggcgctgggcgacgccagcctggccaggatctgcggcgccatcgcgagcgacgagaagcggcacgaggcggcctacacccgggtggtggaccagctgttcgcgctcacgcccgacgccgccgtgcgcgcgctcgagtacatgatgagggagaggatcctcatgccggcctactacatgttcgacggccgggacccggacctgttccgccactacgccgccgtcgcgcagaggctcggcgtctacaccaccgccgactacgccgacctcgtccagttcttcgtcgacaggtggggcgtggcggacctaggccccggcctcaccggcgaggggaggcaggcgcaggactacgtctgccggttgcctgagagggtgcgcaggatggaccagctggacgcgcgacgaaggctgcagccccagactcgtcaggtccccttctcttggctgttcgacaggcacgtggagctgctgacctgacttgattggtcggcagtctgcagcccagctagcggtccttttgccccctttggcagagcccagagctatcaattctgttactgcgtctcctcctctacttctacttcctcctcgttggccactccgtagttccgtatgtgtctaccgtcaagtgactgactggaaccatgtactgtgtgtcagtcatcattcaatccatttggtgccgcagcgtgtcagaaaaattaaaagcaagcagcccaatgtcagcgagtactgtggctccaacgatatcccaaacttttacctcaattccttgtgtaccttcgcagatcaacctgtgtctggtggtacaaactgaaaaatgtagctttacttttcacttctatagtagaaagaagctatgtgttgatccagtttcgataaaactaaaaacgtttggtaaaacagag

SEQ ID NO: 19624 - DNA, 1531 bp, Zea Mays
ggccgagtttctggaggcttcctgcgtcgcgtggaggcagacagagctcagggagggagggaggggaagaacgaagcagcagcaacagcgccatccgctcgcttccttccccttctctccctcctcccccaccgccggcgtcgcctctacgcgcgcgcgccccgccgggggctgccgtcgctgcacccgtggcccgtgggcggcggccgcgtacctgtacctacgtgctgccgggggggggggggggggggggagctacgcgtctcctctcgccatggacgccggtgtagagaagtgcggcgacgcggcggcggagggcggcggcgacctctacgctgtcctcgggctcaagaaggagtgctccgacgccgacctcaaggtcgcttaccggaagctcgccaagaaatggcacccggacaaatgctcctcctcctccatcagcgtgaagcacatggaggaagccaaggagaagttccaagagatccagggcgcctattcggtactctccgacgccaataaacggctcctctacgatgtgggagtatatgatgacgaggacgacgaggatagcatgcaggggatgggggacttcattggtgagatgacccagatgatgagccagaggcaggaaagctttgaggagctgcagcagctttttgtcgacatgttccagtctgatattgattcaggattctgcaatgggactgctaagggccatcaggttcaggggcaagccaaaagtagaacatgctcaccacggtcccctcctactactatagtaaaggaggcagaggtgtcatcatgtaatggcttcaataagcggggttcatcagcaatggactcaggaaagcctccaaggcctgttgaatgtggtgcaggtcagagccaggctggattttgttttggggtgagcgacacgccaaagccgcgaggtccgaacgccaaccggaagaggaacggccggaaacagaagctgttccccaagcactacgttacatccgaagatgatacggccggttcctagcatcagcagcacggtagcagtttgaccgttggctttggtgatgtcagcagtagggagggcacatcatgtcgcctctgccagctgctgtgatctgaagaggcgtttagctcatcatatgcctttagtcttttgagaggtctttagggttgaaaggtacttcgaaaaccgaaccagcgtctacaggcctaagagggatttccattgaaactcgtcgatgatactacagttttctttccccatctgtgccggttgtgttgtactaccactaccagtgacagcaatcgtgacttgaaagcggtcgaggtatatcttgttattttgtttccctccgatttttcaatatccgattgattttgttttgaagcaaatagagagcatgtccgtgagaatagtcatgaagcaaatagagaacatgtccgtgagaattgtcggttaatataatttttagtttttaatttgtacatgccactcttgagaaagatctctctcaagcttgtccatgtgcgt

SEQ ID NO: 19625 - DNA, 3997 bp, Zea Mays
ggcaggcaggcaacgcccaccccccacagaggagagagagagagaaagaggcagcagagcacataaccaaacgacacccatccgaaaaccccgaaaggaggagggaaaagggtgagagaaaaccacgcagtcgcttgtccagacaaaacaagaacaagaacccaccagtacgcacttcctcctcctcctcctcctctctgcctctctctcctccctccctccgccagtccgctcccccctggcccatcagatccaattccttcccccgacccccgtcccggatccgccgcaattccttcctgcgtcgagctcgactgctccctctccctgcccgcaagaatcccgccgtggccggcggcttagtgggactcccaagtcgaagccaaggctggtggggggcgcgctcctgccgggcgtagcgggccatgggcgcgctgttgccgttcgtgcgtcgggtaaccagggccgtcaggctcagtccgctgcagcgcagcgccgaggatcggtgagttttgcaacaagaatgggggcaaaagtagaacgggaaagttatatgcctggatattatgccacgggggatctcaatttggaaccaaatggtagatggtctccatactatgaggagatgacatcaaatgatcagttatgcaatggcttcacaacaaaaccaacaaatgactattcagaatttgacaaagaaatactcaagcatcaaatacttgaacatgaagctgtgtttagacaacaggtgtatgaactgcaccgagtttacaaaatacagaaggatatgatgaaacaacatcaaagcaaagaggtatattcatacccaactttggcagttgcatcacatacaaattcaccatcacaagtgccacaaaacggtgcaaagatgatgtggcagatgccagttcctccaatgtccacaacatacaggaaagctattggagagcataatgatacaaaccagtcctccatgaagttccttagagaaggcagtgtgcagtcctcaccaaatggatttatatcaagtgatgttggtccaagaagcagacaaggcacttttgaccttcaacttccagctgatcattatatagatgacgatggcacatcagataacaagcccatagatttccttggtttggcatcagatacaaaaccccggaatgatgctgagcttacattagttagtgcagaaggcttgggcaagttcagtgataatagttcatcctcgggtttgcagactacaaataatcttggaccccggcaggttaccgacctgaatgaatcaaatactggcttccatatgggtagagcaaatggatcagtttccagaggccttccgcgtacccttgagaactcatggaaccaaccaatattgagagcaaacacaactaatttcagtttcagtaaaaaacactccaaagaaaagcacacagatgaaggtacaagctcaaatttctttgacacaagtgtgaaaacaatacatgacgacaaaccatcaatcaataaaggtaaacaagtcagcagtgtaacttttttagcacccagatataatgatgctgaccccccaaaatacttcaaagctgttgatgggaggcctgccactgccagttataaccactttgtttaccaaggtcagaatagttcagttggatggattgcacaaagtcctctggaaccttctgttatcaataattttgctagagttgaccgtccacatcatttgaatatgggtacatttactgcccccgtctctattcctcaaatagacaatccttcaattgtctccccgatgggttcttgcacagcagacccaaggagcagcgttatcaataatcctgctttaattccaagattcaatgggttctcaactgtgaattcgtacaccagtcttagtgctgtgacgcagagcattggaacttcaatcccaaagctgataaatgtggataatgtagataaacgctatcgtggttttccacttgattcgttttccgtgtctcactcacgacatcaggtagcagtttcaagtaacctggagcaaaagaattcccagaagttggaagattcagatcaacagtcccatggcaagggtatgaagaacttcaatttgaatgagacactgtcagattgtcaggaagatggtcttgtagaacaagatgggagatgtgcttccagttttcagcatgataaagatggggggtcagtacttgggatctcttggctcaaaaaaaaacttatgtctgctgacccaacagctgtggagaagccagggaagatttttggacattcattgggaactgcaatagagctgaaaaatactaaagaccagaatgaaccagctgtgactattcggaatttgtcagattctgcttctacatctgttggctgtgcaattaagaaggataggccttcggataacattgttaccggaactctgcctgtctgtaataaagcccaagagggtgctacatgtttacctctttcgtgccagaagcatgtgcctaaagatggacaagccgctgaaggagccaccaagaaaagtggcgcccccatcaggaacttcatcgatctcaatgatgatgtaccaaatgatgacaattctgaggaatcagtagtgtcacacgaatgccacgtggaaccttcacggaacaaccatcctaaacgagcatttgtgattgatttagaggtgccggcctgtgaagaggacgcttcgtgggatattgatcaagaatgcgcgcagccgaaacctgatgcgtaccaggaagttgacgacggatctgatacatccgctctagctgcagccgagaacatcgtagcgttgtcaaggaatacgccaacagccgcagaggcatcggacgatacgttgcagtggtttgcagatctcgctgtattaaacatcaacgaccttgctgagcaagctgaactccaagcttgtacgaatgattccagtaactacgagtcggattcattcgagtccttgacactgaagctggaagagaccaagatcgacgatctctggagcaggccactggaacctgaaaccgcaaccgatgaacagacagtttcagctgctcaccttctcaccaagcccagaaggggccagcaaaggagacggcggcagaagcgagatttccagagagatgtcttgcctggcctttcgtcgctttcccggcctgagatcacagaggacgtccagttgctcgaggggttagtccaggcttccgggggatcctgggagtcgagcttgactaggcgaggacgttgtggtgggcgtgctagaggcaggaaacctcggaaaactgtagtaaccgtaattgtagaggaggaggaagaggaggaggtagaggttagcccaccgccaaaacctgctggcactggggaattggaagccgatggcaggggtatgatcgggtggggcagaacaacaaggcggtgtcgcagagcgagatgtccgtcaggtaacagcatggctactgcgtcttgagtgggagggtatttcttggcagcaagcattggacctgattaggtactgggtggttcacaattgttgtattgactccgatggatgggctggtggtataaggtgatcacactcatatgagtgtcggcctactggtctcagcacaactttcgtgcttttgggtcgaaacatggtttacgttcttataataagttcggtaaattagctggcgagacatttctgcgacagcattgtactaagctgttccaggttatgaggcccggtgccccggtatatattcattgtgagaaaaactgcaatgcatgtaaaccaccttgatctctgaagaatagctcatcacatgtgtaacaaaagggtgtgaatgaggctctgagcctgtattctttttgtagctgtatgccctgcctaattggcgctagtatccagcatgcgaattgctaatttagttttataccgtggatattgctcatatcgtgtcccaacgcttttcttccctatgggaatgcatatgccact

SEQ ID NO: 19626 - DNA, 2882 bp, Zea Mays
gtggcctcagcgattttgctgccccccatctcctttttttagcacatcgcttgcgttctctctctggtttcctcctctgctctgcgctccgcttcccaccgctcctcccctgccgtctctcctaccacaaagccgtggcccgtgggcgctgttcgcggcggcgacgggtctctcatctcctctaccctctctcgcgcgcaacggcctaaaaaaaccctagcgactcggtcggcgctcgacttggatcgtgccggggggctaggggcaggggcagctctcttctctcgtcgtcgtccagtgacaatactatcggccggtactcctgctggccaggcctagattggataacaacgacattgttgataacttgatactggattttcttccttctcgaacctgtagagggctctgctttatttgattagaccttatatggtttgagtgccacaactgaaactttgcacctaaaacccgaggccaagttcactactttattatatccttccatacacagaaagtggagagacatggatcgtgatgatatagctggtttcgtcagtggaggttgctatgagtcctgaatttctaacccagtatatataacagagttatgatatccagaaggcagacaattgtttcttttcgttttctagttggtttgcatttgatgtttcataattggaatggatacaactactcaaggccttgagtttggtggtggtatcaactctccgaagccatattgctattggagcacaactcaagacactactgtgcacaaagatagtacaccagaggcatattccaccttttctatttccaactcaaaagcgtcaaaaaggaagcaaggtgccatgtctggagcaaaaggtggaaaccctttactcactttgggtctaggctgctcaccaagttcatcttataacagcaagctaagttctggcactgcttgcataacatcatcatctttattaaaggagattgatgaagagtcttcaatagatcttggccttaaccttgggttgtatattggaaatgatattggacactgccaacagaaatcccatgctggttttgaaaatgtgctctcgacaaactctcctaaactggatcttcagttgagtttgtctaccagttcgcctgaatcagttgtcattgatgcaaataggtcaccagatggcttggcgatgccgatggccaattcaccactcgccattgtagaagaaggatcagtaccacatagttgggttttcgagcattcaattgtttcatcatcacatgcttctaaggcaacgcatggctttccattatcaaagaaaaccaatggaggcaatgcctctgtgccttctcatgtcatgtcatcaactatgtttacaagtgtgaaaggtccagttgcctctgcttctgagacaactaactcccaacaacgcaacagtaacgctaaaagctgtcagtttccaggatgtgtgaaaggagcaagaggggcatcagggcgttgcatagcacatggcggcggtaggcgttgccagaaacctggttgtgagaagggcgctgaagggaggacaatctattgcaaggcccatggtggaggcaggagatgtcaatttctcgggtgtacaaagagtgctgaagggcgcacagaccactgcatagctcatggtggtggccgccgctgcagccatgaaggttgctcccgagctgctcgtggaaaatctggcctgtgtatcaagcatggtggtggcaaaaggtgtcagaaggagaactgtaccaaaagtgcagaaggccattctggactctgcattgcccatggtggtggaaggcggtgccagtttccagactgcacaaagggtgctcagggaagcacaaagttctgcaaggcacatggtggaggaaagcgctgcacattcgtcggatgcaccagaggggctgaaggcagcacttcattttgtaagggccatggtggaggcaagcgctgtgcctttcagggcggtggcgtgtgcccaaagagcgtgcatggtggcactcagtattgtgttgcacatggtggtgggaaaaggtgtgctagctttggttgcactaagagtgctagagggcgcacagagtattgtgtgcgccatggaggtggcaagaggtgcaagttcgagagctgcaccaagagtgcgcaggggagcactgatttctgtaaggctcatgggggaggtacacgatgcctgtggggccaggcggacacaagctttggtgctggtgcacagcaatgcgataaatttgttcggagcaagaccggtctctgctcagctcatagtgctttgatccaggaccactgtgttcatggcggtggtacattaggttccgctatctaccagtctgtgcatgtcaaaccgactgagatgatcaatggtgataaaactttactggatccggctatccctgttacaaacagtggtgttcatcctcctgtcctagctcagtctatgatcgatccgctgccagagggcagagttcatggtggtggcctgttggctttactttcgcggggcggaagcagaacaagcgctggtggctcagaattgtgcttcgggcaagatcgtgtggatctgaggctatcaggatctccatgaaactgatgactgcctgcagttttgatccaaattgtgttgctcatgctcgggttccataggatctacccggacgtgtactgtgaatctacccagacgtgtactatgaaaataagagggtagctcctagagcagatgtgttgttttattttagttaattgtttcagtgcatgtaatcacttactttaatgctcatgtttggacttgattaactctcagcaacttaaggttgaaatataatgtgcattttgctgcttattctgctga

SEQ ID NO: 19627 - DNA, 1401 bp, Zea Mays
gtctgttggcatctatcattttgcaaatttgcaccagcaacagaacatgtacatggcgaagacaaatcattaggtggcgacttttttctcaccacggtaacactgaatttcattatggcagcaacaaagttacaatattcaggtttcattaggtggtgttttttactaatatttgaagagtttgagttgggcgacaggggggtattgccagcaactggttaatgaactgttatggctgaagtgaaccattaatatagagtttgagttattctgtgttgtcacagacaaccgtatttacacacacagtatctcgcccgctcctccaagtctccctctctcaatataagcctatttctgaattctatttgtggtcgctttctttgatttgctgattgtcaccactggtttttagggctcaatatgactttgtttcacattgtaacatcctcaacaatgattttacttcttacaacaaacactactacggatgtcctgatgataagacattccagcacatggcatctgtgtatagtcggtctcactataacatgtctttgagcaaagaatttgaaggagggataacaaatggagcattctggtactacgtaggttgtgtatttgttggctttgaatcaaacaacatcattgcttgtggtccagattgcaagaacgggactgctaagcaagctaagatttcaatggcctattccttcatacacaggccattgagcgacgaggaacgccgtgtcacttgcaatgaccagagacgggaggtcttcgttgcccaggacatcgctaacaaggaaattgaccgcaccgttgcattcgacaaggtaagatggattagcaaataatattgtttgacatttaggtttttatattttatataatacactattaggtgagtgcctgtgcgttgcaggcctgggtttctctttgatatcattacggacgactcgtgaatattgtcatccatatcataatcgtataacacatatgtatatataagttatcgagatattatatgtccccgttgcaacgcacgggcactgacctagtattcatatatggactaatagtaatatggtcaagccaattcatggttcctcatatcttattcactttggcttgaccaatcctcgtaatcacttcaacctctattatgatcatatttatgcatagtaatttctcaggtcttgtccatacatttaaaccaatatagagatcatattatatccatttgcattgtctcactggttatttaaccttgtgttgaacctttgttcactgtcattatacactattcaagtatgttcatcatactgaatttcctgttcaacacttaccaaacttgttagtcctttaaatgtgttgtcatccaaatcaccaaaactcacaaaa

SEQ ID NO: 19628 - DNA, 1951 bp, Zea Mays
cacgttacagtgtaagaataggggaaatctcgtgtccattgtctcccaggcaacagttttgtccattattattacagaaaattgcgctaactaacctataatttccacgtggctggtcaaaaatcatccacagcccggggccctgcccctgcctccccccccctcgcagtcgctgcacggcaccctcgggccgcgggcctcaccttcacacctcattgtcccagacgcaccctcctcacctccgcccgcggccccgggcggtaccctcaccgccgggcccaccgcgccccctcgctgcctcgcccccacaaacagccgaccgccccgcgcccagacacacacacacgagcgcagcgcacgcagcctgcaggcagaggactgctctcctctgcgcgaagcgaggcggcgctgggatctgcccggcaaggtggccgggaacattgcaatggggaaaattgatatgtctactgacgaagaatcagattgtgtagctatatgtccacctaacagaaatgctggtcacgaggaagttgtgagtggcagccatgatgaagattcttcaggaaagcaagagaacccttatgctgtgaactcacatatggacagcaatggccaggaagatgtgtctgtaaacctagacctgctcaagctgattcatcagcaggaatcttctgtcagcaattcaccaacaaagcctgcagtagctagacagcaagggtctggccatactgtccttgagccatgcgctgttgcacctgaaagaagatcatctggagcagggaatattgctcgaattcctcatcccaccagcagcggggaaaaactttcggataaaagtagctcctcaccaagaagcatggcaaagaagagtccatcattcacacccaggaagcctctccaatctgacaacacttctcacagtcaagatgatgactcatattctgtcacttcttcaactgtaacttcagcaagagctgggaaaactaagaagacaactgttgctgttgcacctacattcgtctgtgctaatcgtgctgagaagagaggagagttttacacaaaattagaagaaaaacgcaaggctttggaagaggagaaactccaagcagaggccagaaagagggaagaggaagaagaagctctaagacaactgaggaagaacttggtcgtccgagcaaaacccatgccaagcttctaccaagagggacccccaccaaaggttgaacttaagaaggtgcctccaactcgtgccaagtcaccaaaattgacacggagaaagagctgcagtgaaacccctcatacaccagagggaggaaatggcagtgcagtatgctgccggttgcatcgccacagcattgggaacgccagagatgttagcagcaaggcacaatgttctccaaagagcgcctcaaaggctggatcagctactagatccagggtcaccaaatccagggaagacctgaaggcttccgtgaagaaagtgggactgccaagcgccgcgaacttcgctgtacaaacctaactcatcaggcattcactcccatatgccatttttcattttaatttatacctcacatcaccaaaaagatggcctcgtgttatttttgcattgtccttgtaagaacctggctaccagagacctgcgctgttcccgtcctgtaaatttgttgaaggttttgtaagggggtaaccgagtcagtcctgtgagaaccaagcgggtgggcagctgatgggatattggagtgacatattgtcgttgtgtggcggcattcgcgcgttctatgtattgtatctgagctgtaacttattgtggacattggcaaagcgattctgattgttgtcgcaaaatttgatcaggtcgtgtttcgaacttttaatcaggtatccttatgaattggaaactgggttgtgtttttttttcctgtccgaaacttgaaacagtaacatgata

SEQ ID NO: 19629 - DNA, 1178 bp, Zea Mays
ttctattacaacaccgatgagaacccttgttctacctcccaaagtcgggttcccacccagcgtgcccgccgccgaccgcctgcacaagcctgcggcgagatccggcgtcgccggcgagcttcagcaccggcacgtgctccggaaggaaatagcttccggtgacgtacgctaccctctccgcggcgtcccggggagcggggacggggagcgctttttgctgtcacccgcacacgagcgacgagctccaccacctgcccaggctctttatcacgaatactatggagataaacagggtgcactggagaatttgattcagtgtggcaactggaagaaagctcacactattttcgtgacttctgttgctcattctatgtttctgtcatctaaccatcaggaggtctggaggatcacaagtgccttggagaaccacaagtatgaaattgctgactgggaccttggtgccggaatatacatagacttctacgttctgaagaactcaatgcaagaaagaaatgccatggatgattcggattcactcgaggagatgagtgaatcatgcagaagtttctttggtcgattaaacgaatcgttgttagtctggggaagcaaattacctgttgagtcaagggcatgctactcgaagatggcagaggagctatgcgcgcttctggtggacaccccaagcgagacgctgaacctacccatggggtgtcttctgacgatgctcaacgctccagttccagacgagagcaggtcgtcgtacctgcaggatgcactctccgtcttcaccgaaatcctttgcagcgatccgtaggtgaaggggagtgaagcctacaggcaacacgccgaagagtttgtacgtctcatgtttgatacttgtagaaaattaggaatgtataactatgacctgatgttgctccggtgaatttgtaacgccatctgaagacatgtgtcgggatcttcgttgtatgtgagtaccaggtcttatgaaacgttgacttgcgagctgtaccaatggggagtgatttcctgggcttcattttctctgtgtgtgtgtgtgtgtttattacagggaagggcagcgtcacggcgacccgtgcttcggtgtacattggagattactgaggccttcgtttcagccgtaaatcacatggatcgaagagtactttaacttggaa

SEQ ID NO: 19630 - DNA, 1865 bp, Zea Mays
ttttgactcatgttattgaggatacatgatatcgggaagcctatcctttttttcatcgttccaagtgttagctggagcagcagaccagcaaccaacacggcagtggagcaacatgcccgaccttgtgaagctatgtcccccatcaacttatcgagtacttgagcctttgcattagctgcatcctgcctcaattgtctactgggagaaatgatgccagagtttgtgtgggtgaagggacagtgtaatcagattgcctagcattattctgtgatgtcttggctactatactgagttgggagaagactgtggattgctatagtcctggtcaagggttgatgcctgctagtttcaaagttagatctgtacctttagatggcaatagcgaagcatttgaggaggttcttgacccagattttggagagtcagctattggacgtgtagcacctgttgactctggtctttggtggataattctgttaagggcatatggaaaaattactggagactatgctctacaagaaagggttgatgtgcagacaggcatcaggctaatactgaatttgtgcttgtctgatggatttgacatgtttcctacattgcttgtaactgatggatcatgtatgattgatcggcggatgggaatccatggtcatcctctggagatccaggctctgttctattctgctttacgctgtgcccgagaaatgattggggtaaccgatggatccaagaacttgatccgtgctattaacaacaggctcagtgctctgtcatttcacatcagggagtattattgggttgatatgaagaagataaatgagatttatcgctataagactgaggagtattcccatgatgctattaacaaattcaacatctacccagagcaaattccatcttggcttgcagactggattcctgtgaaaggcggttaccttataggcaatctgcagccagctcacatggatttcaggtttttctccctagggaatctgtgggcgattgtctcatctcttgctactcaaaggcaagcagagggtattctgaaccttattgaagccaaatgggatgacatagtagccaacatgcctcttaaaatatgttaccctgcactagagtatgaggaatggcgtatcatcactggcagtgatcccaaaaacacgccctggtcgtatcataatggtggatcttggcctacattgttatggcagttcaccttggcttgtatcaagatgggtaggcgtgacttggcacggagggcagttgaggtggcagaaaagaggctctcagatgacaagtggccagagtattatgacaccaggacaggaaggttcattgggaagcaatcacggctatatcaaacttggagcattgctggatatcttagctctaagatgttattggactgtccggagatggcatccatactagtatgcgatgaagacttcgagctgctggaaggttgtgcttgcagcttgaataagaatgctcgcaccaaatgctcacgtcgtgcggccaagtcgcaggttcttgtgtagttccatgcctgttcttgacccaaaagctgcaacgctccttcaacttgttgtaattgttcgtcacagaagctggcactagttactagttacttaagcagaatgatcacaaaccacctatgccgatttttttggcgagttcgtggttgatccatttatacaggagtatatgttgttgtctgtacattttatctaatggattttatgtatcctgctggtcaactcaagttgattggtagttttttttatgtaagcagacagcatgtaaatatcaccgctcgttacaagtgtactaaaagaaaagttagagagacataatgacggaatgag

SEQ ID NO: 19631 - DNA, 2547 bp, Zea Mays
catcacacaagtctcctgttcggctgtccccacttcccagcaacgcaacccagccatggcgacaccgccgccgcgaccgggaccggccgccgcatccgcggcggtctccctcctcgaccacctcgagcacgcgaatttcgctccaccccctccccctccgccgccgccctcccccaccaccgtcctcaccgcgtggtcgcgcctccgcgaccctaactccacctcccccgctgacgcactcgccgcgctagagacgctccaccaccaccgtcgcgcgctccgcctctcgtccgcgcacgcctcgctcctgctcccactgctcccgctacacccccgcctcgtggccacgctgctcgccgctgccccgcacctcggccccgcctccgtcccggcctccctccccttcgcccctcgcctcctcctcctcggcgcccgcgcctccgccaaggatctcccgggccgtgccagcttcggggaacccgcttccaccgcgaagaatcccgccggcagcggtgagcctgccgatggccaggacgacgaccctgttgtagctgtgggccgcattcttgaagatgtggagcggggcggtcagagcatcgatgatgtcgaccacctcgcccttgcaggggttggttacgcgctggcgtctgctgacgaggtgcagttcagaaggatcattgtgcccttgcttaggatctgtggcaggactgggaatctgtctgtcggtgttcgggtgcttaagctgatggaatggctggtaatgggattcatcgagtccaggaagatgaggaatgctcaggtgctctttgagatgacttcaccggaggagtgtgagggcgagaactattgtgtgctgttaccagcggtgatgttggcctgcggtgggttgcgggcactgagggttgcttcggctaggtaccggttggactttgatccacggctgaagcaggcgcctgagcggacaattcagtttgcagctgagcgggctgttttagaagggaggccggccgatgaccagcatatccttgttcagtgtgtcgcattggggctgtcacggtgtgggcaggtcgcgtttcacgaatcggtgttacggtgtgtctgtatgggattgctaaaggagctcctcccacttcctgattttcttaggaggtcggtccaaaacgcaggagggaactcaaatgaggttatcaaggctcaggtcaataaacaccttgatagtgttcttttcaaagaggcaggcccagtgactggggttctttgcaaccagtattcatatgccaatgacaaggctaaaagctttgtcgaaacttgtgtatgggagtacgcacaggagatttatcgtcatcttcgtgcagcagtgttgctgcaccgggggaagcaggatggcttgattacggcgattgacaagaatgctgaggcctcatttcttatggttgtagtctttgcagccgaggtcgctaaacacaggctaaatgctaagtcctccgaggggttccaacctgaggttgctgctagaatcttggtggcgttctcttgtgtggaacatcttaggcgactgcgtctccctgagtacactgaggcagtccggagtgctgtgcttgccaatcaagagaatgtagcagctactgctttgttcatcgagtcaataccttcatatactgaactgacaagtgaaccagatttactggccttggatagaccaacaacatataactggtacagagatgaggttcagacatcacgcatgctgttttacttgcgggttgtgccaacttgtgttagcctcattccagttcatacgatgcaggataaactggcctcaatcatgttcttatatctacaacatccaaatgagaaagttacaagtgcttcacactctgtgatggtatcgttcctgtcatctggcagtgatgctgatcaggatgatcgagcagctttgaaagagcgacttgccttttactacatcaagagatctttggaggcttatcctgggttaacaccgtttgacggattagcatcaggagttgcagcacttgtacggcatcttcccgcaggcagtgctgccattcttttttgtatccatagccttgctgtcaaggctaaagatctttgtgagactgcaaatgttcagaacaaatccttgtggaggtcatgggaagagagcacagatccatgtaagaaaacattggatctgttgctgagactaatcttccttgtggatattcagtcattcccttacctgttgaaggagctggcacagttggtgaccctgctaccaaaggaaggccaggatgcggtccttgatgacatgcacacccatgtcgcggagtctgacgatgtcactcggaagccggtactcgtgtcgtggctgcagtccctctcctacctaagctcacagtcgagccgtgaatctcacagcaaggccaagagtgctactgcatccgtagcaagcgatgagctgctggacagagccgtggcacgcttgtgataccatcttgtcggtaaattggatggatgcgtgttgcaaaccttgtttggttgcatagg

SEQ ID NO: 19632 - DNA, 3321 bp, Zea Mays
cgagcagccgagctgagtgaagaggggtttggacgtttggtagacacggagggttttgctgggggaggagcattgcaagtaggactgtaggagtatttctccgctctcttcctgcttgatccatccctttctcctctagcctcgcaaagtcgcactctactgggcgctctcgcttcctccttgagcggcgcagccgcgggcgcgtagtgcacatctctctctctcccccctctccccctcgccattaatttgctgcctgccatcccggtagcgcttcgctgcgcagcctgcgcctgaaggttcgatctttcactcccatgggcggtggacgcaactagtctttctttcttggtgtttcttggcgcctcgtgggaggtgagcgccgaggagcttcgagggaatgagggtgacgcggagggatgagcaccgggccgccgccgccgcgttcctgtacgcggtgacggttcttggggtgttggcgggcagcgccggcgtccgcgctttcgatgatggcacagcggtgtacattgtcaccatgaagcaggcgccggttttccacaggcgccttaacttggagaagttcgggagcagcagggttgctaatgctgccggccgcggcggcggcgggggaggaggaggaggaggaggaggaggaggaggaggagcaggagacaccccgaccaccagcgtcctcaggaagccgagacagggttcacccaaacctatgaattatggctcttatattgtccacctccaaaattcattattgaagaggactctaaggggagagcgttatataaagctgtacagctaccgctacttgattaatggttttgctgttgtcatcactcctctacaggcagataagctatctaggagaaaagaagtagcaaatgtgatgctggattactcagttaggacagcaacaactcatacccctgaattccttggactgccgcaaggagcctgggtgcaagaaggtggtccgcaattcgcgggtcagggtgtcgtcattggcctcatcgacacaggaatagatccaacccaccctagctttgcagatgatctatcaactgatagttatccagtacctgctcactactctggcatttgtgaggttacaaatgatttcccatctggatcctgcaatagaaagctcgtgggggctcggcattttgcagcatctgcaataactagaggagtcttcaatgcgtctcaagatcttgcttcaccatctgatagtgatggccatgggacgcatacggcatccattgctgctggaaatcacggaattcctgttgctgtgtctgggcatcaatttggaaatgcaagtggcatggctcctcgtgcacacattgctgtctataaagctctttataaaagctttggtggttttgctgctgatgtagtagctgcaatagatcaggcagctgaagataatgttgacatcataagtttgtccattactcctaatcggaggccacctggactcgcaacattcttcaatccaatagatatggcactcttgtcagctgttaaagctggcatatttgtggtgcaagctgcaggaaatactggcccttcccctaagagtatgtcttcatatagtccttggatatttactgttggagcttctgcccatgacagggtatacaacaactacattgtacttggcaacaatttgaccattcaaggagttggtcttgcccctggaacggatgatgattgcatgtatactttagttgctgcgccgcatgcactgaagaacaatacagtcagtcctactgaattgtcctttggggaatgccaagattcgagtcgcctagatgcagatttgataagaggaaagatactagtgtgcagctattctataagatttgtgcttggtctttcttctgtgaaacaagctctagatacagcaaataatgtcagcgccgcaggagttatattctatttagacccatttgttcttgggttccagctgaacccaactccaatgcgcatgcctggacttataataccatcatctgatgactctaaggtatttctcgcttactacaatgactccctagtgagagatgagacatcaggccaagttgttagctttggcggagttgctaaaatattaggggggctaaatccagattatggaaattctgcaccaaaagtaatgttctattctgctaggggtcctgaccctgaggacaatacactgtcaaatgctgatatcttgaaacccaatctagtagcacccggaaattcgatttggggtgcttggagttcacttggattggattctgctgaattttctggtgaaagtttcgcgatgctctctggcacaagtatggctgcaccccatgttgctggcctggctgctctaatcaagcagaagtttccttcttttagcccagcagctatagcttctgcattgtctacaaccacaactcttagtgacaggcaagggaaaccaatcatggcgcagcgaacatacagcaacccagactcgacgcaatctccagcgacagcttttgatatggggaatggttttgtaaacgctaccgctgctttagacccggggctcgtatttgattgcagttatgatgatttcttctcctttctttgcggcataaacgggtctagcccagtcgtgacaaactacactggcaacagctgcgtggcctccgccatgacaggagcagatctaaacctaccatcaatcaccatagccgtgctcaaccagacaagaagcataacgagaacggtgaccaacgtggcggccgacgagagctacaccgtcagttacagcgctccctatggaactgcaatctccgtggtaccgatgcattttcttattccaagcgggcagaagcagcttgtgaccttcgttgtgaacgccaccatgaacagctccagcgcaagctttgggaacgtcggtttctatggtgacaagggccacagggcgatcatcccattctctgtgatctccaaggctgtgtacagttcctgacgactgatgagccgagctgatgcagtggatgcaaatgcaatgcagaccagggcctgactgatccagccagcgtatgcagtggtgacttaactgcatggagccatggaggtggagcttacctttgactaggatttttttgttgttggttgtggtgtgtacactctgaagcatgttgatgtaagtagctgagtgattaaccagtaactgtaaaaagaatgtactaccagaatgttgccatgaatgggaaaaccttctgccaccagaatgttaaacagcactctgcttgatttaccgatgtgaatgtgatgtttgtg

SEQ ID NO: 19633 - DNA, 3434 bp, Zea Mays
cgaaaaacggtcaccttccccgtccgtcctccgttccctcgacggcacctgtgcacttgctgcagtgttgcacggccgcactaccccgacaccacaaataataagcggtccgctacgccgccccgccccgcttcccgcccagccgccgccgtagcctccaaagtacccaggttacctggcccgccgccgcgcgcgggggcgtgctatggacccgtccactgccaaggcggccgcgccgcccaataatgcggaccacgtcctccacatccagcccgacaacctgccgccgccgcacccgagcaacaaccagcagccgaacccaccgccgccggagaccccaaagctctcgcagaaccccgagaagccgccggcctccagcccctcgcgcccgccgctgccccccgcgctcctccgccgccgctcctccatcgccaagcccaagtcgcgcttcgtcgagccgcccaccccgatgcacccggactccgcccacccctccccggtccaccccgccgccaccgccgccgcctcgctgaccgccaccccgacccatcgcgccgcgagcgtctccaccccgcacacccccgcggaggccgacgacgacgaggacatcttccgcaacaaggatggctcccgcgcgccggcctccgcggcgcggtgccgccgccgggtccgccttggcctcgagctctgcgtgctcgtcctcttcctcggcctgctcgtcgtcagcctcgtcgtgcgccccctgcagggccgcgtactgtgggggctggagatctggaagtggtgcgtcatggtcaccgccgtcttctccggccacctcctcagccagtggctcgtcacgctcatcgttttcgtcgtcgagcgcaacttcctgctgcgcaccaaggtgctctacttcgtcttcgggctcaagaagagcttccaggtctgcctctggctcgcgctcgtgctcatcgcctggtcccagctcttcgacagcgaggtcggccgctcccgcaagaccgccaggaccctcaactacgtctccaggttcctcgcctccatgctcatcggctccgtcatctggctcgtcaagaccttccttatgaaggtggttgcgtccacgttccaccgcaagaccttcttcgaccggattcaagagagcgtgttccatcagtacgtgctgcagacgctgtcgggcccgccgttaatggagctggcggagaatgtggggcgcgagggcagtggccttgggcgggtcagtatcggcagggccaaggaggacaaaggcgtgccggaggtgatcgatgttgtcaagctcaggaggatgagtcaggagaaggtctcagcatggacgatgagagggctcatcacagcaatccgaagctctaggctgtcaaccatatctaatactatcgagagctttgatgatgtagatggcatggaacagaaggataaagaaataaatagtgaatgggaggccaaggccgcggcgtatgccatattcaagaatgtcgcaaagcccagctataagcacattgaggaggtggatctgctgagatttttcaccaaggaggaggtgcacctggtgattccaatgtttgagggagcaccagagaccggaaagataaaaaagtctgcactaaagaattgggtggtgaaagcatacctcgatcgcaagtcactggcacattctctgaacgacacaaagaccgcagttatgcaacttcacaacctcatcagtgttatagtcatcattataatcatcattgttacactactattgatgggcattgcgacaaccaagattcttgttgtcatctcgtcccagcttctggttgcgggattcatatttgggaatgcatgcaagactgtatttgaggcccttatatttgtattcatcatgcatccatttgatgttggtgaccgctgtgttatcgacggaacacagatgatcgtcgaggaaatgaatatattaaccactgttctcttgaagaatgacaacgaaaagatatattatccaaattctgtgttgtccacaaagccaatcagcaacttttaccgaagccctaacatgtatgacacgattgattttgcaattgatgtttcaacttcagttgagagcattggagctttgaggtccaaaattaaagggtacttggagagcaaaccaacgcattggcacccagtccacactgtaaatctcaaggacatcttggatgtgaacaagattaacatgtctctctcagtgcagcacaccatgaactttcaaaacatccgggagaagaacatcaggaggtctgagctcgttatggagttgaagaaaatattcgaggagatgtccatccggtaccaccttctaccccagaaagttgaactcacctacgtcggctcgaacccactgcccatgggtccttctcatacaagatagaggatgggtgaagacttttaagtctcatattgacaacttgatccatttcatgggatctgacaactgatggctagctgtgcagtctgttctgaagttagtaaaactctgcatagtagatattagctcgtagaataatttgtcagataatgcatttgtaagcggtgatggtactggtgatcaatgctttgggattggccattacaccatttgattatctacaccgtttggtgcatcacaatcgaaactgttgcgaaatagccactaataaagaaattcagctgggagattgaagtgggcctgtcgaaatgggatgctgaaggaaatgttgtagactgctcaagcagcactgcagcagtgggatgggagaagcactgtcaattcggtcaacagtttatttgggccatagtgcagggaatatgaacaatcgtcatggacagtgcaaatgttttcatgctacatttgtcatcgacagttgatgtgggctgctcttattaggcggcttctatgggatggtgagatgcgacaagaagtgacagtatctgaacagctgctgtcttctcgcataatggttttcgccttcttgctgtgtcttcttggtgcaggacgatggaatggcttttctctaaataatgcaaaatatttcgagctccgcacaaaacggaacagtctctcgtcaaagctgccaagcctggcatggattggtagggaatatgaacaatcgtcatggacagtgcaaatgttttcatgctacatttttcatcgaaagttgatgtgggatgcttttattaggctatcttaagtagaccccctatcccatcttctatcttattcactatttcaattttcgctctgtaaataatgtcaaacattgttatttatagttccacgttctctattttatcctatctactgaagacacttttagggctatcttgagaactcattttccaaagagatttttattttccaaaggaaattagttaattttccgttgggaaaataaaattctttagggctagttttg

SEQ ID NO: 19634 - DNA, 148 bp, Zea Mays
gaccggtggtttggttgctttgcttggcggcgaaggaaggcaggggcagcggaggaggaggaggagagagagagtaaggaaggaaggaagggtttattcgggcgtgggaaattaaagagggaagaagcgaacgagcgagagaagtgag

SEQ ID NO: 19635 - DNA, 232 bp, Zea Mays
attcttgctaaagccttttccttgattcctatttaaccagcatatccttgagagtcatttttccttagtcgggtaagacttgcgaaagtacactccgtactcagggttttcgaacccatgttgttgtaggcgatgaggagtactctaagtgttcctgtggctggaaggcgtttccagttctggtggaggattagttaggattgtgtataagctttggagggttcctaccttc

SEQ ID NO: 19636 - DNA, 2396 bp, Zea Mays
ctcgactgctaccggtaccggggacgacggcggaagccgcctgtctcagtcgcggccgtcccccggcttcttggactttgtcgccgcacccgcacggcgctacgcaacaacaaaagcagtgcgtgcgtgggggcgggcgtgagtgactggctctcctcggcgcgcggacccaggggcggcggcgatggggaagaatatgcgcatcaagacggcgcccaaggcgaaccgtgtccccctcctcggcgacggggagacgtcaagggcgctctcggacctggaagagggcagcgacgtccagccagcgaacgtcggcttctgtcgggtcatcaaacttgcgaaacatgacgccggaaagctggtcctcgccacagcggctctgctcgtcgcctccctcagtaaccttctcgttcccaaatatggtggcaagataattgacattgtgtcaagagatgttcggcgcccagaagataaggcgcaagccctggaggatgtgaagggcacaattttgtacattgtgacaatcgtcttagtcggttcagtttgcacggctcttcgggcatggttattcaattctgctagtgagagagtagtcgctcgactaaggaaagacttgttcagccatctcataaaccaggaaatagcgttttttgatgtgactagaacaggagagctcttaagcaggctttctgaagatacacaaataataaagaatgctgctacaaccaacctatcagaggcactgcgcaatgttactactacagctattggtcttggtttcatgttttcaacttcatggaagttaacattgctggcacttgtaattgtcccggttatatcagttgctgtgcgtagatttggacgttttcttcgtgagctttcacatcaaacacaagctgctgctgctgtagcttcatccatagctgaggaatcttttggtgccatccgcacagtaagatcctttgctcaggaatatcatgagatttcacgctatggtgaaaaagtagaggagacacttaaacttggtctcaaacaagctaaagttgttggcttgttttctggagggcttaacgctgcatcaaccatgtctgtggttattgttgttatttatggcgccaacttaaccatcaatggttacatgacaactggctctcttacatcattcatcttatacagccttacagttggttcgtcagtatctgccttgtcaggactatacacaactgtaatgaaagcctctggtgcaagccgtagggtttttcaacttttggaccgtgtttcgtcaatgacaaactctggggacaaatgtccaataaatgaaaaggatggggaagttgagcttgatgatgtctggtttgcatatccttctcgcccatctcatatgattcttaagggaataactctgaagctagcaccaggttcaaaggttgcacttgttgggccaagtggtggtggtaaaaccacaatagcaaatttgattgagcggttttatgaccctctaaagggaaggatcttgcttaatggagtaccgttggtagaaatttcacatcaatatcttcacagcaaggtaagcattgtcagccaggagcctacgctcttcaactgcaccatcgaagagaatattgcttatggactagagggcacaacgaactttgctgacgttgagagtgcagctaaaatggcgaatgcacacaacttcatatgcggctttcccgaccaatataagactgtcgtcggcgagcgggggatcaggttatccggcgggcagaagcagaggatcgccattgcgagagctttgcttatgaacccacgagtgcttctcctggacgaagccaccagtgccctggatgctgaaagcgaatatcttgtacaggatgcaatggactccttgatgaaagggaggactgtccttgtgatagcccaccggctctcgaccgtcaagagcgccgacaccgtcgccgtcatctccgacggcctaatcgtggagagcggcacgcacgacgaactcctggaccgcgacggcatatacacggccttggtgaagaggcagctgcaggggccgaagtttgaggccaccagcagcatcagcgaggcctccgaaattgaagcggaacccagcagtaatgggcaatagcggccccgattattaggaagaccacagttgatttgaatccacacaagtgtatgtaaccctgatgttgacgtatgccactgcgaatcacgcgaaaccattggatatcacatgatgctacggttgttgtaggagtaatttcccacttggttaatccaacacatatggtccagttttgtgtttatgctgttgggattattgggccaagcccgtttgaaattctgaaatagtttctagagaaacacaaaggcccattcataaattcgtg

SEQ ID NO: 19637 - DNA, 1867 bp, Zea Mays
gagacgggagacgacaagcgcgcacgtcccaaagccaaactcccagagcgaggaggtggaggacggacgggaggaggagaggagagagcccaccacccgcgaccgcgaccgcgacctaacccggagacctccctaggctagctcccctcccagaccccaggctctcccacccacctttcccctctccctccctcctccccgtcccacgccgccgcacccccgcctggctgcttgggtggcaatcggccgtagaggaggagggtgtaggagcttgatccgggccacctgccccctgcgccgtcgggatgtacgtgccgccgccgcccaccggcggcgccggcgagcagcctagggtttaccaggtctggcggggaagcaacgaattcttcttgcagggaagattcatatttgggcctgatgtgagatctgtgtttctcactatgttcctcatcatcgcaccagtggttgtcttctgtgtgttcgtcgcaaggcatctcataaatgatttccccgatagctggggaatctcagtgatggtagtagtggttgtcttcactgtttatgatttgacgctgcttctttgtacctctggtagagatcctggtataatacctcggaatactcatcctcctgaacctgaatccattgatgggatcaatgatacaggtgttcagactccacaacaatttcgtttgcctcgcacaaaggaagttgttgtaaatgggatcagtgtacgggtaaaatactgtgatacttgcatgttgtaccgaccacctcgatgctcacactgttccatttgcaataactgtgtggaacggtttgatcatcactgtccatgggtcggccagtgcataggactgcgtaattatcggttcttctatatgtttgtatcctcgacaacattgctctgcctgtatgtatttgccttctgttgggtgtatgtgatcaagattagagcagctgagcacttgtcaatttggaaggccttgttgaagacaccagcatcaattgttctgattatctactgttttctttgtgtatggtttgtgggtggtttatctgtcttccatttgtacctgatgggcactaaccagacaacatacgagaatttcaggtatcgctatgaccggcgcgataatccatataacagaggtactctgaacaattttctagagatattctgcaccgctatccccccttcgaagaacaatttccgggcaagggtgacagtagagcaagggctgcagcaaacacgctcacagtctaggggtttcatgagccccagcatgggcaagccaaccatcggagagcttgagatgggcaggaagccagtagtaccttgggacgagccaaggacggcagctgatatcagggacttggaagcagggttcgggggcatgtttgacgagaaagagggcagagtagcccacgcatccccagatctgagcagagatctcccagcagagtttgtggaagggcgaactggcatgcactcgaggcagtcaagttgggttcagagaggaggcgatgcgagtgaagcgtcggcgctgcaaatggctactgtccataccgccgaagatagcaaccatgtcccctggagtggcacacgttagcctgacaaaaaggcgggggaaaaaaaaaaggagaggaactacggtgtgtttcggttgtgtctcgaggtgggtgctggtggcgatgtcgtctcgaagtgaactgccatgtgtttattaccacgtgtgccagggcaaggccctggatcattttgtaatccgaaacacaagcttgctgctgtagtctcatctcatgcctggttgcgacgaatgctgtgcttggtttgccacaacgctgctgtgctttgggtgaaagc

SEQ ID NO: 19638 - DNA, 2686 bp, Zea Mays
cgcgaggccgacccacgccacgctcctcctcagctacagtccctcctccaccgctgctgcgctcacgctcctcgacctcccacactcactgtcagtgtaaagctcacgccggaggccggagctagctgccccctgcccgtgcgtgttcatcctggctgctcatctatctctcttgctccgatccaagatccaacaagtgagctagtcactcacagcacaggtgacagggtggtggtgggcggcgggattgcggttgcggcagtagggttcaggctcggataccagcctcctcctcctcctcctcctcctccgcctccgtttccagaagggggcgagcgctaccggggagctcgacagacgccgagccgcaatgcccaagatgttcgggttctctcggcgccggatgaagctgggcaggttgaagggccatctgcacgaccatttccatggccctcgaagcccgtctcggaccaccaagcgttccagcagtcatcacaacgcagaggatccattggctacctcagtgagtgggcgcgccgacgacctcgcctggcgctgctcgtccgacactttcgatctcaatgggcgcgatttcgagagctccgagaactgggcggtcctgtccaccgagggtgacaagccagctcctcgtttcgatcatgcagcagccatggttgggagcaaaatggtggtgtttggtggcgactccggtcaatctttgctagatgatactaagatattgagcttagacaagcttacctgggattctgttgctcctaaagttcgaccaccattgaacgggcgttctctgaagctgaggccatgcagaggtcattgcctggtttcgtggggaaagaatgttattcttgtgggagggaaaagtgatcaaccttatgacaagatatcagtatggaccttcaatacagagagtgagctctggtctcatatggaagcgaagggtgacattccggtgtctcgaagtgggcatacggtgattagagccggtcctgttttaattctctttggaggtgaagatgccaaagggaagaaactacatgaccttcatatgtttgatctgaagtcattaacatggcttcctctgaactataagggtgctggaccttctccaagatcaaatcatgtagccgccctttacgatgatagagtcctattgatttttggaggtcagtcgaagtccaagaccctgaatgatattcatgctctagattttgaaacaatggtatggtcaagggtcaaaacccatgggcatcatccatcacctcgagcaggttgctgcggagctctttgtggaactaaatggtatattgcaggaggtggaagcaagaaaaaacggcaccctgaaacatgggttttcgatgtccttgagtccagatggtctgtttgtgtagtgcctcctagttcctcaatcactacaaagaaaggtttcagcatggttccattgtactacagggacaagatcgtgcttgttgcttttggagggaacaaaaaggaaccatccgacaaggttgaagtactagtggtgctgcaaaacgagcactgtttcagctggcggtctgcgcccgaggtggaacccttactgtacgacgagtctcctccaggctcaagggaactcgccgaccatctcagcagctgcgctccaccgtatcctactagctccgcggcgaggagcggtctcgccgccacagcggagaactcctgcgggaggaaacccctcccggactcactgctacggacctcgaacctcgggggctcgtcgctccgcaggcagttccgtcaggaagaggagtgcagcagcctggcgcaaaagctgcagaaaccgatcgacgacgacaggtacaaggacgccgccgacgagtgctccgagcatcaaccaccctcggccacgaaccctaaaccgcggaacgacgcgcggcggtcgtccccggaggtcgtcgtcgacgcaaaagcgaggaggctgctgggcaggagctcgtcggacatgaacaaccaccaggacgcaagggtggccgccctggtcaggaggaacgtggcgctggaagagcagctgtcggcggcgctggcgagcaaggacgaggcggagaagaacctgtccctggtcatcgacagcaaggacggcctggagaagaggctggccgagaaggacagggaggtcgaggcgctgagggagaaggcgacggggttggagctggcgcaggaggaggccaacagcctctccaacaccgtccacgccgacaacgtgcggctggagcgcgaggtggcgttcctgaaggccgtcatggacgagacccagaaggaactgcactcgactcgcggagttcttgcaggagaacgcgcacgggcattccagcttcaggttgaagtctttcatctgaagcagcgcctgcagacgatggaagggaggtcacccgcagcaccaagaaagcctcagaatgcgtagggtagggtgcaggcgtgtagagtttttgagcgatagatctgctgtagattcattcagtgatgtaatgtaactgtagtaggtgccggagctactgtaatttgtaatattattcgacgcgatgcgatgcaaacgtatttcgcaactgggacgtacgtaattgtgtagaatgagttgcggtcgactatatatgcaagatgtcttttatctaagagttctgagttattggtc

SEQ ID NO: 19639 - DNA, 2905 bp, Zea Mays
agcgccgcggcgtatgggtcctcgtcggcgctttcgctcggccagccaaacctcctgctggacaaccagcagctccagctactgcagcagcaacacctgctggaccagatcccggcgacgacggcggagagcggcgacaacatggggcgcggcggcggcggggtgtccgacccgctgctgggcgacgagttcgagagcaagtccggcagcgagaacgtggacggcggcgtctccgtggacgagctgcaggaccccaaccagcggcccagcaagaagaagcgctaccaccgccacacccagcaccagatccaggagttggaagctttcttcaaggagtgcccgcacccggacgacaagcagcgcaaggagctgagccgggagctggggctggagcccctccaggtcaagttctggttccagaacaagcgcacgcaaatgaagaaccatcacgagcggcaggagaactcgcagctgaggtccgagaacgagaagctgcgcgccgagaacatgcggtacaaggaggccctgagcagcgcgtcgtgccccagctgcggcgggccggccgcgctcggcgagatgtccttcgacgagcaccacctccgcgtggagaacgcgcggctgcgggaggaggtcgacaggatctcctccatcgccgccaagtacgtgggcaggcccatggtgcccttccccgtgctgtccagcccgctggccggggccggggcacgcgcccccgcgttgccgccgctggacatggcgccgccgtatggcgctgccgctgacatgttcggcggcggcggtgtcgtcgctgctgctggtgctgccggtgccggggacctgctgctgaggggcgccgccgtgcagtcggacgccgacaagcctatgatcgtggagctggccgtggcggccatggaggagctggttcggatggcgcagctggacgagccgctgtggaacgcgcccgcggggctcgatgggtccgctgaggaggagacgcttaacgaggaggagtacgcgcgcttgttccccggcgggctcgggcccaagccgtacgggctcaactcggaggcgtcgcgtgacagcgccgtcgtcatcatgacccatgccaacctcgtcgaaatcctcatggacgtgaaccagtatgcggccgtgttctcgagtatcgtgtcgagagccgcgacgctggaggtgctatcaaccggcgtggctgggaactacaatggtgcattgcaagtgatgtcggtggagtttcaggtgccttccccactggtgccgaccagggaaagctacttcgtgaggtactgcaagcagaacgccgacggaacatgggccgtcgtcgacgtctcgctggacggcctgcgccccggcgcagtcctcaagtgccggcgccggccgtcgggatgcctgatccaggaaatgcccaatggctactcgaaggtgacctgggtggagcacgtcgaggtggacgacaggtcggtgcacagcatctacaagctgctggtgagctcggggctggccttcggtgcacgccgatgggttgggacgctggaccgccagtgcgagcgccttgccagtgtcatggccagcaacatcccgaccagcgacatcggtgtgatcactagcgcggaggggaggaagagcatgctgaagctggcggagaggatggtgatgagcttctgcggcggcgtgacggcctctgcggcgcaccagtggacaacgctgtccggcagcggcgctgaggacgtccgcgtcatgaccaggaagagcgtcgacgaccctggcaggccgcccggcatagtcctcaacgctgccacctcgttctggctccccgtcccgcccaagcgtgtcttcgacttcctccgtgacgaaagctctcgcagcgagtgggacatcctctccaatggcggcgttgttcaagagatggctcacatcgccaacggccgcgaccatggaaactgcgtctcgcttcttcgtgtcaatagcacgaactcgaaccaaagcagcatgctgatcctccaggagagctgcaccgacatgtcgggctcgtacgtcatctacgccccggtggatgtggtcgccatgaacgtggtcctcaacggcggcgaccctgactacgtggcgctcctgccctctggcttcgcgatcctgcccgacggcccatcgtcagggagcagcagcatgctgcaaggcgacggcggcgtcggctcaggtgggtcgctcctgacggtggccttccagatactcgtcgactctgtccccaccgccaagatctcgctggggtcggtggccacggtgaacagcctcatcgcctgcaccgtggagcgcatcaaggcggcggtgatctccggccagagcaatccccagcagcagtagcttcgttgaatccaacagtgttcttatcctttgcattgaagcaaaattttagagctttcgtcagtgggaagtcaagaacgcacctcagactctcctgcttgccatgtggtgctcatagttccctttactttttcgcctagtttcccccaaaatttctggggttatttcaagaaacacttcagtcgccgaaggaaacgagtcaccacgacgcaagggtagttggttcgggtattgacttcctcttcatgttggcctctcggatgctgcttcctctgaatttaggcttcttctcttgtggtgtacaaaaccgttatttagcatgtaatttgtgctgctgctgctgctgcacctgttcagacttgttcagtatccaggattcccccaatagagatttgtgtcccttaatacctctgcacagtgcttgtgtctagccgccatttcagtcccaaaaatgtgcctgtgtaacgcggttgcatgcttgcattattgttcaatgtcttcgttgctattttgcagctttaagttcacaattaat

SEQ ID NO: 19640 - DNA, 2912 bp, Zea Mays
acaatgcagtttgttgcaagattaacagcaggcatcattcagacatatctagaatgtgatcctgagtttaagtactcagaggttctaaatccaaaacgcttcctcaccaatccctctaccccagcccacaatgatgggcttgacaatgcaaattgggacctcatattgtacgtcaacttggagttggttaataagatgtcaaacagaaggtttattgtcaaggaaatgcttgggcagggaacttttggtcaagtagtcaagtgctgggacacagaaactaatgactatgttgctgtgaaggtgataaaaaaccagcctgcattttaccatcaagctatcatggaggtttcactattaagaacgttaaatcagaaatttgatcctgatgatcagcataacattgtccgtatgcttgattatttgtcatttcaaaatcatttgtgcatagcttttgagatgcttggtcaaaacctgtatgaactgctcaaaaggaatcacttaagaggtctgaaattgaaatatgttcaagccttctcaaaacagatattggatgccatggttgtgatgagagaagctggaataattcattgtgatctgaagccagaaaatatcctgttagctcccagcgtcgcaacagctgcagcagtgaaagttattgattttggatcagcgtgcctggagggtaaaacagtttactcgtacattcagagccgctattacaggtctccagaggttctccttggctatccatatactactgcgatcgacatgtggtcattcggctgcatagttgctgaactgtttctaggcttgccattgtttcctggagcaacagaatatgatgtgcttcagagaatggtgaaaattctcggaggccaaccaccagatgaactgctaagggaagctaaaaacactgtaaggttttttaaacatgttggaagtatatatgctggcaatgcggcacctattggtctttctagtgcatacagaattttaagtgaagaagaggttgaagcgagagattccaagaggcaaaagatgggaaagtggtacttcccacacctgaagcttgacagactcatatgtacctatccttggaacaattctgaactggcagagacagagaaaacagatcgtttgggattagttgatttcttgaagggactccttgaatttgatccaaataagcgatggtcaccattgcaggctctacaccatccattcataacaggagaatcgtttactggtccatatgagccaatacccgagactgcaagaattcctgttgctcgtgcagcagcaattgatcacaatcctggaggggggcactggctacattcaggtctttccccgcaggttggaagtgtaaacagatacctacctttgaataatgtctaccctccaaaggttcctttttcttatgggagtagttatggaagctttggtagccatggcagctatactggtaatgctggttttggtaacagctatggaagcattggtgatgctaatgctatcaatatgtattactcacccttaggttcttctggattaacgcaaattggccctagtccagatgttagactaaggatgcgtctctcacatgatagaggaattcgattgagccctggtagtcttgggcctatgtctgttggagccagtccatcacagtttaccccaccgaactaccatatgcaaatcccagctaattctactgggacacatggttctggttctcctgcaagtggagtcattcatggttctccgttaggaaaagctgcagcagtgggcccatacaacatgaggagaaacttgccaatgccaccacatgattatgtatctcagcatggacaagggcgttttagagatggtgtcagctttagtcattctgatgcctgtgctcaaggacatacaggccactctcataatgcagcggtacctagttcttatcattctggttggagaccaaaaataggttcaaggagtggtatttccttggaggcctcgtctagtcatgtgccttcgaaggctccgtcacaatcatttgacttttcagcttcatcgacacttgatcctgctaattgggaccctaattatagtgatgagtcactattgcaagaagacaattcactgtcagctgatctaagcagcaacctccactttggagatgcaactggccaagaccacatctttgctacatctaaccctgtaccgacaaaccaaagaggagatcaattatttcatgtgtcctctcaaggagtgagtgcccattccagtgttctcatcaactacggtggttacaaccctcaaaattatcctcagcaaaatgcccgtcctcgtcatggacagccaattctccatcagcgatataatcaggcaacttccagtccaatgcggccaatgggaagccatcacaatgggcagcctgcgtggcctagtagttttggcatgggcgatggagtgccctggggaggaacaagagggcactcatttacgacaaggaaggattatgggagcatcttttagggtggagttgtggaccggaggaacgtcattgattcattgcaggcgtaaattatttgtatcagcgaaattggagtgcgatgattctggttgattgttttcgatgttgttactccatccctccacttggtcctttgtgaacacactggatatatacactatatgatcggtgacattagcactcctttgtaaccttttttaggaatcagaagtttgggtgttcccctaattgctgactgcattgtggctgtactgaatactgtaccattgtcaccggtgtaatatgaaggcgtgatgtaggtagactaaagggctctttgattcgtggctaaatgtgtcatactttatctaaggttagttgttcgaattaaagaactaaccttagtcag

SEQ ID NO: 19641 - DNA, 4891 bp, Zea Mays
gtggtgcacggttctgcctttgttccgcgcccctgcgtccggaaatctcgccgcgcccctgcgtccggaaatctcgccgcgcccctacgcaatcacctcctcctctcccctcactacgccgccacctcctcctctccccctcactgcgtcgccctcctctcccactcactgcgtcgtcccctggatcctcgccccagcctctccaaccgcctccgcgctgtcccctggatctcgcgtcgcgcgtctgcagcacgcccgccacacacgccgcgattggagattggtggaaagcggtccgcggcttcaactccgacatctccggcgagctcgagcgcctcgctgcaacgacgggggcgacgctcagatccgacgtgccggacgcggccgccgtggatctgaacgacctcgagtccatggatctgtcggcggacgctgctccgctggagcacatggagccgttcgtgctggcatgcgcgcgggtgctgggcccgacgccgggccggacgcgtggcgtcgccgacggccgggtcgtcttctgggacggcaagcggtgggtcccattcgcgacggcctctccgcgctggacgcaggagctctgcggcgggcccaaggcctcgccgctggagtatctccccacgcccggcgatggcgccctgcacctcacgcccgtgctccgcccccacacccagcaggcaggcatggatctcgcagggcagggatctcgcggatcacgccgtgcggggatctcgcggatcacgccgggcggggatctcggccaagcctgatcagaagtttggggccctatcaaagcgattcgcagaagtggaggctgggggatcgaagcggaggtggtggagatgacggaggcgctgaagtccgtctggaatccggtgacacagaaaaagatcagagtttctccttctacttcgtcgggtgaagtcccggtggtggacaacacctcgacgctgatccctctggaagctgcggcaggcattgctggtgccgatgcaacccacatttggcattcccactccaatcgaagggtttttggtgtcgctgaacaggacactaggcttctgctctgcttactaatccattggtttcaagatgacagaagccgtcatcaaactgaatacttcttctaactgaatacttcttcccagctgacagatcagatcaaacttgacgtgtgttaggtatcagagaaaaaaaccaaggcatggtgcacttctaaagagcacatctgcagctgcccgctcgggctccgtttcgataagactagggacctgtacatcgccgacgcctacttcagcttgctcaaagttggccccgagggcaggctggagagttgctgtgaaaactctcaagtgagggaacatgatcatgtgcacgcaagatcctgatgactgttggcagaatcaagtcatagttaaataaacaggcccccacccgacggcgcgagcgaggcacgcggccctcccggcggggtggacgcggcccctggctgtgaggcgacgatggggctggaggctgcgatggcgctgggcgacccgccggcggactacgcatccatcgcgacggtggggctgttcgtggcattcatgtgcgtctgcatcgtcgtcgggcacctcctcgaggagaaccgctggatgaacgagtccatcaccatgctcttcatcggctttgggaccttgatgttgcaatgctgtatgttggggattgcaggggctgggaactagagcagtcatcctgttcgcgtcgagcgagaagcattcacgtgtgctggtgttcagtgaggacctcttatttatttacctgctgccgctgatcatattcaatgcagggttccaagtgaagaagaaacagttctttcgaaacttcattactattacactgtttggtgcagttggcaccttgatctcttttactgtaatatcccttggcgctctaggactaatatcaaggcttaatatcggcgcacttgaactgggagactatcttgcacttggggcaatattctcggccacagactcggtttgtaccttgcaggtgttaagccaagatgagacaccattcttgtacagcctcgtgtttggtgaaggtgttgtcaatgacacaacttctgttgtgttgttcaatgcaatccagaactttgatcatggaaatatcagcggtgccaaattactgaacttcattggcagtttcctttatctgttcggctccagcaccattcttggagtagcttctggacttcttagtgcttataccattaagaagttgtactttggcaggcattcaaccgatcatgaagtttccattatgatgctaatggcttatttatcttacatgctagctgaattgctcgatttgagtggcattctcactgtgtttttctgtggtatcgtaatgtcacactatacttggcaaaatgtaacagaaagttcgagggtcacaaccaagcatgcctttgcaacattgtcgtttatcttcgagacttttctgtttctttatgttggtatggatgcattggatatagagaagtggaagattgtcggtcaaacttataggcatactctctccctctttctctctcttcattgctcaactagaagatctttcttctggatctgtattttctatcatgtgcagcccggtaaagtctatcgctttgagcagcaccattttagccttggtgctggtttcaagagctgcttttgttttcccactatcctttctatcaaatttgaccaaaaaactccaaatggaaagatatcttttaggcagcaggtaagtctttaacttagcaacatcttaacttcttatgttctcttgaaacagttgttatattccttacatgatattggtcatttaggttattgtttggtgggcgggtctcatgagaggtgttgtgtctattgtgttggcttacaataaggttaatcttgtgtttggtctatctggtttgagctttggtctggaattatgttactgcttttgtttcctctatccattccaaaacataggacattttttgttgtcgtaagtcaaaaattctctaactttgacagagtttatagaaaaacaaaccaacatcaacagccttcatttcttaatcttatatagaagttgcagtattttagtctaatagatggacatgttttaaattttgaggcattgaaacaatttgcatcatgaaggcgttcgacttaatgtttccaaggttctgtggcagtgcgaggcattttgggaggtggtgagcgcctcgcttggcaccttcattttcgtgatgatgctgtccttcaggctgcagtgccacacaagttcgtttggtgtaggtgctgcttgatttttggcggtgcatgccgggtgttcgacaatgtttctgaggttttgtggcagtgcgaggcattttgggagggacatcatcatgcccaacttgaagtcgtccgtgaccacaacagcgagcgcggtggagtacatggatgaagtattgaaggcgttgtcgccaggtagtaccttcttcccactcatgacactacctcgtagacaacacaagtctagatgttgctggtgcagctgttcaacacgggcaaggtgctgttttccaatgtggtcgtcgacggcggcatgttcgtcttggccctcctcacctaccgcagcttcttcgcggcgccatcattctccctgtccgtctgattttctatcaggttgctcgatcgtcgtcaatataatccgtgtcaacaaattttaatcttggttcataagtaaagaacagaaaaggaaaacctagatgtctataattatacgtacatcaaatctaatgattttaggtacatattttctgtttgccattgcaaaatctaatcacgtgaattttatagttccaatcggggctatgtctatgtactcttatttttgtccagaacccttatgtaaggggaagtggaaagaaatggattggcacactgctggatggatcttcctcaatacgtttatcgaccgccgccgccgacgacggaggagcagcacctctcgtctgtccaccgctgaccgctcgtttgtcagcctagcaccggggtgcatgaacgcccagtatatgctacagcaccgccgcccctggccctgccgcctgcgccggtcgttgccctgtgcactccgcgggcctcgggaatggccaaccaggacatttatcgtcttattccttgccgaggggagtcctgctccagtagtggtctcagaaggggcaaataccatggatgttggcaggcctgtgcttgtgcagaatgcaccaaggacaagactggatgcagggacatgggggacgatggggattggattgggggcgattctggatttggcttcggtgcaatggaggttgaggtgaacaggggcttcaacagtgatgctgttttagcaatggagacgatccattccctgtcagcttcaaaatcaagttacccaatggctgatctcacccaactcttcatgacagctactcaagaagggaaaagatcagaatcgcaaggccagattcttagggtggaatgctatagcttaatgccctaatctttatatgcctcttcttatatctgcacttccatgggcaccgggcgacactaaattcacaagataccccctccacctcaaggtgtaagaccatagcttccatcgctctttacgttatgtaatatatttgtagtatgctaatttgattcaccataatccttaccattcatactattatgcttgtttttctctcttcagtaatcgtcgaaaatggttcattgttcatagctcaagccaacttaattttaacgcaaaaatgtagcagtacttaaagtttcatctgtaatttatcaatggataagtgagttagaaatagtatttatca

SEQ ID NO: 19642 - DNA, 1385 bp, Zea Mays
atttcatttcatccctgagtggatcagcttgtgtccatctccaaggagcaggaggagctgcgcggcagtggttcgggcggaggtgagcttcgtggacgccgacgaggcgaagaggctcgtgggcgaggagggctacacggtgctggacatcagggacagggcgcagcgcgagagggcacacatcaagtcctccacacacgtgcctctcttcattgagaaccaagacaacgacattgggaccatcgtgaagcgccagctgcacaacaacttcgcggggctcttcttcgggctgcccttcaccaagctcaacccggacttcgccctgacagtcaaggacaagttctcgccggaaagcaagctgctggttgtctgccaggaaggtctcagcagctgctgcagatgcactggagaaagaaggcttccaaaatattgcatgcatcacatcaggtcttcaaacagtgaagccaggaacgtttgaatctgtggggaaaagtgagctgcagaacgcggggaaagctggccttgtgaccatccaagggaagatttctgtagtccttgggactgtattgattagtgcctacctgtttataacattcttcccagaccaggctgagaagctttttgacttggctggcatcagcttgtgatcagagctgatgttcttcggtactccacttcataatcaggatggttgatcaagtcagattcactcagatgtttccagactgaaaaggaatttttgctctgtgtactattagggaattcttgagagattagcacttaaattctttgaaacatcccttttctcgatgtacctcctatatatatcgtatgcttgattcatctacatgtttgtgttgctttttgaagtatctagacctgcagttatgattcaggatttcaaatagaagctttttatccatctaatcatgctcatccacttgagaacattgaccctgaaagattatgtagaccttgataccaattgcagttgcagatgaaatgattgtcttgtgtaatggtgtaataatagatcttgcactttttggggtgtgttagcgtcaatctgggtgccagtcactgggagttgttccgctcggtgggctctctgtggcggcgcggacggtccgcgacttggacagtaggagcagggttccctgtgccgagccagacggtctgcgctgcgctgggctggcggcgttcagcaacgacacctggaatctcgccctccgagagggaccttgtcaggaaggagagatcctagggtttatcttgggatcgataggccacccaatatgtctctagatgatgtagagtcacataggtgaagattgggataaagaagactatgttactggactcctagggcaagaatgtaaagaaat

SEQ ID NO: 19643 - DNA, 1122 bp, Zea Mays
acaacccgatcgcccacgcaaacctctcgacagaccacagctcgatcaaaccgcgaatgaaaaaaccacaaaaaatctcccaattctcgcaaccccaagccggccagcccccacgatctcgaatcccgatgctctcagcatctatcaactcccgagcggtcgtcaccagcgcatgagctttctccgctcgctggcgaactccttctcctcgctgctcttctcgtcggggggcgagacggcgcccatggacgcggcggggtcggcgccgtcgccggcggcggtggtgagggagcgcgtggcggtgaagctccggggctacttcgacctcgccaaggaggagatggacaaggccgtgcgcgccgaggagtgggggctccccgacgacgccaccgcgcactaccgcaacgcgatgcgcgtcatgctcgaggcccaggccgcgcgcgtccctgatgccgtctcctccaggtgcgcccgcgttctcttcctcgcgcccgtcgcggctagggcttctggaatgattcgtgactgactagtgggtggtgccctgcggagcttgagaggcttgcagcgagagggggcaggtcagggtgtaccaggagaagatcgccaagtggcaggcgcaggtcgaggagcggctcagagtgcttggtcagagaagtgctgaaggtgccactgctgcagtagtgcctaagaaggagctactaataaacctcaagagttggatgatgctgttcttcgaagactggtgaaaagaatatatgtgccactacctgatccaaacgtacggaggctacttctgaaaaatcagctcaaaggacaagcattcaaattgtcgagtaagtgctccagggtttctctgtataactacttgattgtggtggttgtatatgtagcacagtctttttatgtttggcacggtagccaacctggaactgatccctggcagaccatgatttcgaaagattagttgtggagaccgaagggtattctggaagtgacctgagagccgtgtgcgaagaagctgcaatgatgccaataagagagctcgggccacagagtattcttgctattaaagcaaatcaggtatcttcacaggtaacatagccttagtattcattgccc

SEQ ID NO: 19644 - DNA, 2442 bp, Zea Mays
cggaacagttggcgcgtgagcgagtttcttaactcctcgccattggaatcggagtcgtgtattctctcacaccatcctgctcctgctcctgctcctgctcccttcccatccggtctccctttcttttcgcggcctcgcctcgcctcgcctcgcctcgccggcggcctggtggtcgcggtctcgctccagcaccgataaagcccacctcgagttctgctctgctccaccccccggcttcagccgcagcttgtggtggaatcggagcttcttatccgagagcagacatggagcagagtagtgatgggttgccaatcagccagcggagggctaacagttcaacaaaacactcaagcaagtcagatgaggttgctgaagacatgttgcagagtaatataccacatgaaactgtgagactgtgccaaggtgtggaatcagaagagatagagggacctcctcacaagaaaattgtccagaacttcacggagagcagtagttccaaaaataaaaaacacagatggtcatcagaggaagatgaggcactaaagcaaatggtaaaaaaatatgggacgaaaaactggcgaactattgcatgtgctatacctggccgaaatgccaactcatgcctttcaagatggaagtaccttctagacccagcaataaacaaagagccttggtcgcaacaggaggaactaagattgatccgtgcgcagcaagtttatggaaacaaatggtgtaaaatggtcaaacatttcccagggaggacaaatgatgcactcaaagaacattggagaagtcctatgaaaagaaaactggattcatatttggcctcaggattgctcgaacatgttccagacctgcaagatgatgtatcatttccacagacacagaacaatcaatcagatattccaaaggactgcaaagctgcatctgatagaaatagattttcatcacgtttatcaacagaccccaaacttaaacaagagctcacagaactggatgaaaatgaaatgagaatggccaaatcacagcagtgtgcaggaacaagaaagaagctggcttttctgtcaactccagtggagctcaagagtgttgtaccgcatgaaaccaccaaacattgccaagatatggaaccagaaaagacagagggcccactgtgcaagagaaattcccactgcatcaaggatggaagtagtttgaaaattcccgaaagtaccaaaggcaaatgatgaaattctcattaaaatggttaccaaacatgggaaaaactggcaaactgtagcatttgctatacctggccgagaagcaaaacaatgccaaatcagatggacacgcagtcttgacccagcaataaagaaacaggattggtcagaacaggaggatctaaaattgattcgagctcatcaaatatatggaagtcagtggcttaaaatggtcaaacatttccctgggaggacaaatcatgcactcaaagaacactggagaaatcgtatcaaaggaaaactgaatttttatttagcctcaggattgctagaacaagttccggacctggaagaaggtggtatatcagttccagagagcagtcagtcagaaattccgaaggacagtcagggttcagctgacaggagtggaccgccaccagttttacgagcacagcccaaatctaaaccggaactcccagaaaacgctggtacatcaggagaaggaacttctgattccattcgtcttaaagggcccaacgcccatccaaccgaagtttctgaaaaggtattggctaaatcaaagcagcgtgccagagccagaaggagattggattttctgtcaaccccagtggagctcaaattgtgcactgctgcggcaagttgtcaaaggcctccccagaaaatggatcaaccgggtccagtggccgagaacatctctccgtcagatgcatgtcaagacatttcacagaatgttccaccagagcgtgcggatgccatcacaccgctggctgctagtaaccaccattcaccagcgacaccagttgatccattctctctcgaaatgcatgaggcgaacgcatcagatcttctggacatgtcctactgtgatggcttgataatcgattctcctcgtgatccacatgacggtagcctcatgtagaagaaaaagttaccaacgcaaaatgacacttttaatagcaagagacgatggactgtcttcctgaaatccagcaactccctgtataaaaatcgtgttgcatgttggatggaacttgtatcttgtcttggcaaaaataattgcattgctgttctgttaatgcccctaactggtttggagagcatttttcttttgcaggtttgaagagcattttgaggggtgttgtaggtcaaattgaacaccatactcgaatgactcgtgttgttggtaactgaatcaataaaatatatgcatgtaaaaattcat

SEQ ID NO: 19645 - DNA, 2192 bp, Zea Mays
accgaaccaaacaacacacgtcaaagcggaaaacctcagaaaaccacaataaatcatcctcgtccaccactgcccccgctctgctgcaactccactcggcccggccgccctttccacccaccttgatcctctgatccgttggtgcttgaccgatccatggacacccatatcggatccgtgaacggggcggcgtcgaaccagacggttggctgcccggcgtcggcgccggggtgcccgatggcgtccacgccggcgcagcccgcggcgaccctgtcggcgggggaggcgtcgctggggcgccacctcgcgcgtcgcctcgtgcaggtcggcgtcaacgatgtattcgcggttccgggggacttcaacctcacgctgctcgaccacctgatcgccgagcccggcctgcgcctcgtcggctgctgcaacgagctcaacgccgggtacgccgccgacgggtacgcgcgcgcgcgcggcgtcggggcctgcgccgtcacgttcacagtcggggggctcagcgtgctcaacgccatcgcgggcgcctacagcgagaacctgcccgtcatctgcatcgccggcgggcccaactccaacgactacgggaccaaccgcatcctccaccacaccatcggcctccccgacttctcgcaggagctccgctgcttccagaccgtcacctgccatcaggcggtggtgaacaatctggatgacgcgcacgagcagatcgacacggccattgccacggcactgagggagagcaagcccgtgtacctcagcatcagctgcaacctccctgggctgcctcatcctaccttcagccgcgacccagtgcccttcttcctcacccccaggagcaacaagatggggctagaggctgcagtggaggcaactgtcgaattcctgaacaaggcggtgaagccagtccttgtcgccggccccaaactgcgtgtggcaaaggcaggaaaggcatttgtcgatatggtagatgccagtggctatgcctatgccgtgatgccatcggccaagggtcttgtgccagagactcacccccacttcatcggcacctactggggcgccgtcagcaccgccttctgtgcggagattgttgagtccgcagatgcctacctctttgcaggccccattttcaatgactacagctctgttggctactcattcctcctcaagaaggaaaaggccatcatcgtccagcctgagcgtgtgatagtggggaatgggccggcattcggatgtgtgatgatgaaagagttcttgtctgaattggctaagagggttaataagaacaccactgcctatgagaattacaagaggatctttgtacctgagggccagccgctggaaagcgagccaaatgagccactgcgagtgaatgtgctcttcaagcacgtccagaagatgttgactggtgatagcgcggtgattgctgagactggtgactcctggttcaactgccagaagcttaagctgccagaaggctgtggtatggttcgattggatggtcagtgggtgcattgctcggatatgctcagggtgcgaaccacaagcgtgtgattgccttcattggtgatgggagcttccaggttacagcacaggatgtgtcaactatgctgcgatgtgagcagaacagcataatcttcctgatcaacaacggtgggtacacgattgaggtggaaatccatgacgggccatacaacgtcatcaagaactggaactacactggctttgtggacgccatccacaatggcttgggcaagtgctggacctccaaggtgaagagcgaggaggagctgacggctgccattgagacagcgctaggggagaagaaggactgcctgtgcttcatcgaggtgatcgcgcacaaggacgacaccagcaaagagctgctggaatggggctctagggtttctgccgccaactcccggccaccaaatcctcagtagaagtcccgcaggctccaagcctcggagtgccagtagtgatagtaagctgtagcacggtgggggctcaaccgaataacgtgaacgcattgccctttctgttacgtgttttattttattgtgtttctgtggtcgtatatctgttttgtgacgtgttccctgcttctcccatgtgaattccagaagaactatgagaaaattcaggttggttgtcactatttgtgctgcgtaaaaaaaaaa

SEQ ID NO: 19646 - DNA, 314 bp, Zea Mays
ccctgccccacgatgcacgcagcagccagcagcgcccagcgctagcgctccgcgcggcctgcgctccccacgccgcagctaggtgccccggccaacgccccctcccaacggcaagccggtgcccctccgcggcgtgcagccatggctgccagcccgcagccgccgcggttcgttaccctgctcgaccggccctagcccttgcgcgcggtcggcctgccagcgcggcggcgcgaccagctagcactatcgtcgtcatgctcgtgtcctcgtcgctcgttcggtgcgtcgtgcacgcaacatgtcgtcgtacctcg

SEQ ID NO: 19647 - DNA, 1211 bp, Zea Mays
caacaggccacctagtccaacgagccccattccaattcggcaattcccatttccccttcccaacaggccaaccccctctacctatctttttcctcagcaaccgtgctcggttcctcctccctcgaaacggctcccacccccgcgccgcgataagaaaacccaccaaaccctaaccctagcagcggtgccacaaccgcccgcgttcccggccggagaggaagccgagccagcaaggatgccgcccgggtcggcgacgcaatttcggtacacgcagacgccgtccaaggtgctgcatcttcggaacatgccatgggagtgcaccgaggaggagctcgtcgacctctgcaaacccttcggccgggtcgtaaacaccatgtgcaacgtcggcgctaaccgcaaccaggcattcgtcgagtttgcagatcaaaaccaggcaatttcaatggtgtcctattatgcttcatcttcagaacctgctcaagttcgtggtaaaactgtatatatccaatattcaaacaggcaagaaattactaacaataaaggcactggggattcttctggcaatgttctacttgtcacttttgaaggtgttcagcctaatgatgttaccatagaagttattcatttggttttttcggcatttgggtttgttcacaagatagctacttttgagaaagcagctggtttccaggcacttatccagtatactgatgccccaactgctcttgaagctaaaaactcattggatggaagaagcatcccaaaatatttacttccagaacatatcggtgcctgccacatgcgcataaccttttctgcgcataaggatttgaatatcaaatttcagtcgcatcgcagcagggattacaccaatccttaccttcctgtgaaccaaacagcaattgaggggattgtgcagcccacggtgggccctgatgggaaggtaaaggagcctgagagcaatgtacttttagcatcaattgagaacatgcaatatgctgtgacagtggatgttctgcacactgtgttttctgcttttggagctgttcaaaaaattgcaatgtttgagaagaatggtggaatgcaggctctaatccaatatccagatataactaccgcagccgttgctaaacaagctttggagggacactgcatatatgatggtggttactgactaatgaataacgaattctgctcaattagtaaaaaaa

SEQ ID NO: 19648 - DNA, 123 bp, Zea Mays
ttggatgctgccccagattggccctgcacagagaagagattgcatgtgttataccaaatgcattaccaacatctaactacaattttgatactcacaggagtatggaacagagcagggtcaatt

SEQ ID NO: 19649 - DNA, 4691 bp, Zea Mays
ctggaatcttctgccgtcccgccgtccctcccaccccggtggcggcggtgggtgtcccagtcgcctttgattccttccccagtcttcccctcagatctgcgatccttatccctcccggttccccgtcctctcctcggccccagtcgaggagacgccgctgcggctctcgactcctgttgcaataattttgtaggcgagaattgggagagtctggaggctgccagccggtctagtggctcggccaaggcgagcggtggtcccagcgccgttctttccgcctggtgccggagtttcagtcttcaaggctgtgctcggagtttctgtgttctaggggccgggaggtgtgtgctggtgtgaatttggctttcttttgatccaattggtgcttaatttcagcctgtcgaaagaggcttctagcttgcaggttcatcgccgttggcgccgaacttgcctgccgtacagtctttctagtgccaaagttgaattttgaggaactgtgaagccgctttaagcaattacctttgccgaactttcctctaaaggcttgaccttttgggttccggagttcattgctgatcgacgggtcttggagtttttgtctactacctgcgttatgaacaggacatttctgcataagaaaagttgtctcctgtgcagatagccagatactcctgctttgctagtatatcaaattgcttcttgtgtttgaacaaagattctgttcagctagaagacagtgctctcctttatatcctgtctgtagctcaatacagtgctccaaatccatttcggcgtactaggtgtggataaggatccttgcctcgacgagtggagcaaagccatggatgtgcctacgcctcccaaccgtgccggctgcaacagtaacatcggcagccccatgcaatcttttgatgatccctttggtgttgctgccatgacgagctttgatggatactcggagctctgcagcccatcagttgctgatcacatattctccctgctgaatgatccctccgctgcgcaacagatggttgccatgtggtcatccttgggctcatctccgcgtgcttcagctgtgagagaagacatgtcgtttgacacctttcctgggcctgtggacgggacatcgtcacttgctcaaaggttcaactcagcagcagcatcgagtccaactggagtcgacagagggctaaaagagtcagatgggcttgttcttccaagtaatggctcacagcaagggagtagcatcattccgaggtctgttggcaacgctcttgcagacaggatgctcatggcgctatctttgttcaggaagtcattgagtgatggtgttcttgcccaagtctggatgcctgttgagcacaatggtcgtgtcgtgttgagtacatctgagcagccctatttacttgaccaggatcttgcaggttacagagaagtttctagaaatttcctgttttcagttaaggaggagcctggtctgcacctagggcttccagggagggtcttcatatccggggtgccagagtggacgtcaagtgttatctattacagtaagccagagtatttgagaatggagcatgctcttcttcatgaaatacaagggtcacttgctatgccagtttacgatcccagcaagggctcttgttgtgcagttcttgaacttgtcacaaacaaggagaaacctaattttgatgcagagatggacattgtttgcgatgccttgcaggctgtgaacttgcagacaacaacagatcgcagcaatcagaaggtttactctgaaaatcagaaatctgcttttactgagatattggatgttctaagagctatttgtcatgcacacatgcttcctttggcccttacatgggtccctacatcaaatggcatcgctaatggtttttgtgttggaaagaatattgggatagatccgcaaccaggaaaagcagcacttcgtatccatgaatcagcttgctatgttaatgatgcaaagatgcaggggtttcttcatgcatgtgctgatcgtcatcttgagaaggggcagggtattgcaggccgagcccttaaatcgaatctgccattcttctcacctgatataagagagtacagtatcgaagactacccgcttgcacaccatgctcgtaagtttggtctgcacgctgctgtagccatacggctgaggagtacgtacaccagttacgatgactacatactagaattctttctcccagtcaactgcaagggctgtggagagcagcagatgttattaaacaacctttccagcacaatgcaaagaatatgcaaaagcttgcgaacagtctctgaggcagagattgaaaatgttagtgctactgcagcaatgtttgagaagactagtggaacttgtttaccaactggtaactctgaaagttcctcacatgatgaccagccaatcacagaatctgcactccaggatctatctttgggtgacaaacaaggagacagagaacctgacaagagaagctcaatgcgagttgcagataaaaagcgcagtgcatctgaaaagaactttagtctggatgttcttcgcaaatacttctctgggagcctgagggatgctgcaatgagccttggtgtttgtccaacgacattgaaacgaatatgcagacaacatggaatttcccgatggccatctcgaaagataaacaaggtcaatcgttcattgaagaagatagagaaggtcattaaatcagttcacggtgtggatagatccttgcagtacgatcctgctactgggtctcttgttcctgcaacctctcttccggaaaagatgccattctctgcttgcgatacattgcctacttcatctcttgggagagcagtggaggaaacatgtagcccaaaatcagaacaagatttctcttcgcctgatgggtggcaaagagaaactagccaatttcatgtttctggtatacctaaaaggggaggcgatgaagttcggacgttggcaaacaacaacaaaggcagaagaaactatgtttctggtattgcaaatatcacacagcattcaaactctgaaggcacacatggtccttcatatcccaatcccattggtgctgttaattctctgcatactggagaaacaggcaacatcgattctctgacctccctccacccaagcatggatggcattgaaggccaaacaacagtaaggaactcaccatttgtgcaacaagcagatgtcactatggtcgatggtcatgacaccaaggagcagacactcccttccacctctggcatgaccgattcttcgagcggcagcgcctcaagcgagcctactttcaaggggaacccaggacgtgccctcaaagaccgaagcagccctgcactgaccgtgaaagctacctacaatggcgacaccgtccggttcaagtttgtgccagcaaggggctggtaccacttgctggaagagatagcaaagaggttcaagctgacggctggagcattccagctcaaatacaaggacgatgaggacgagtgggtgatcctggcgaacgatgccgacctccaggagtgcatggacgtcctggactcgatcagctcacgcaacatgaagctgcaggtgcgcgacctctcctgccacgtgggcagctcgggcagcagcagcagctgcttgcaggtggaagcgcatagctcgtgacagaacagaagcctaggttaccgcccttagcctgttgtagtaggcccagtatcctgttgtcgccatagaggttccttgtccatgttcacgccatgttgtcgtatggaatgtacaaatggcgagtgtagaaaaggaataaagtgtcatactcttcgcacggttgaaacacgaaacgatgccgtgaaggtttttgtcataatctgttgttggtttcaaaagtcctggcaataatctgttgtcatgaagatgagttcatggcttaagctgcgatacgaagtttctgaacttgctgtgttccaaaatttcagtctggttcttccggtccccttcggtctgtatcattgatggtttgctggtggtaccctgtagtgttacagaaccatgtggacgtgatgcagtttggagtcgacttccagaaatcttttctccgatctcctgcaagtgacaacctgacattgtggctttgattgcccgggttggaggttgctttccagtcgcagcgagtgggttgggcgtgctggtgccgctgaaggcgtggagcagctggtgagtctggacgggagagctactgtttgtattcatgcatcaggctgatcagaagtcgtccagctgggaagaataacagctcgccctcgccgtcagggaagggcaagctcggcgtcgagtggaatcaggcttatctgctaccaatggcgcgacttgcagaatgcttccctggtagggaacggctgggctgtcaattcgcctggaagtggggaagctttatgctactgtgtgtgaaggtggtagtgcatgcgcgcccagtctcctagatgtagcgagccaaatatgtaactagtagtttggctcaaaaaattagaaacggcgagaagcattgtatatttttaaagggtcaatgtttttttaatttttatataagtttcaatctcttacgggatggacttcgaagttgatacatgttcttacataattgatctataacttatcatacgagaaaaccagttcttaatagccgtcc

SEQ ID NO: 19650 - DNA, 396 bp, Zea Mays
aaatcacactccgatagcaaaaaaccaatgttgaacggattataataataaaactccaattacaatgttcaggatactattttttagaagcccagtcttgtcttgatgatacctggttcaaaaagctcgtcgggaagaggagcaaaacaaaccctatctaaaccgcggcggactcttcgtccagcaaggtttcccatccagatccggccacgccacttgctcctcttctccgccacaccgatggtgtacgtggattcctgggacgagttcgtggagcggtccgtgcagctcttccgcggcgaccccaacgccacccgctacgtgatgaagtaccggcactgcgaggggaagctcgtgctcaaggtcaccgacgaccgcgaggcctgatgcgcagtg

SEQ ID NO: 19651 - DNA, 1490 bp, Zea Mays
gttttttttttgttgttgaagggaagatctggtgcagcggcgagagctatctcattgagtcatcaagtcgtgggtgccaagcagtttctctgcatttgtgggggaaggaggattgtcacggtttatccctttcccagaccccactcatgtgggagcctccaacattgggtttgcccttgctgtaatttttttgttggaagtccatatcagtggcgagagctatctcattgagtcagcaagtcgtgggtccaaagcagtttctctgcatttgcggggaaatgattgcctcggtttatccttttcccagaccccactcatgtgggagcctccaacattggttcctggagtggaatagtcaaagtatggagcatgccacaaataactaaggttgcaaccttgaaaggtcacacagaacgtgcaactgatgttgtcttctctcctgctgatgactgcttagcaacagcttcagctgatagaactgcaaaattatggaaaccagatgggtcacttttgatgtcttttgatggccaccttgatcgtcttgctcgccttgcttttcatccatctggaaagtaccttggtacagctagctttgacaagacttggagattgtgggacatcaatactggcaaggaactgctactccaagaggggcacagcagaagtgtatatggagttagctttcaccctgatggttctttggcagcatcttgtggtcttgatgcatatgctcgagtatgggatctgagatctggaagattgttctttacactcaagggccatgtgaaacctgtcctaggagtcagcttctctcctaatggttatctggttgcaactggaagtgaagacaatttctgtcggatatgggatttgaggaaaaggcaaatgttgtattctattccagctcataagagtattatttcacatgtgaaatttgaaccccaagaagggtattatttagcgacttcttcctatgacaccaaagcagccctgtggtcagctcgtgattacaaaccaatcaaaagtttggtgggccatgagtcgaaggttactagtttggatattagtggagatggacagaagattgtgactgtgtcgcttgatcgtacgataaaaatttggtcatgcagaagtagcacacaagataatgagatggaactggattgagacaattgggttcattgttgccagccccgcttctctattcatcagctagaagtagatattctccctttttgctgatcagacattccaatcagtcattggtgctattgcacggaactatttcatagcatgtataaacccttggcttgagaaatatgttctgcacttactttgctgatattccttgtcatatactagggctagtttggctaccccattttttaagggattttcatttttctaacgacccgtttggatcattagaatttaacaatagtaattttggcatatattaattaagctaattcagttttatacaaaatata

SEQ ID NO: 19652 - DNA, 160 bp, Zea Mays
caccaaaattgtaggtccacacacttgtgcccagacagagctgagctctaagcatcgtcagttgacatctaccctaattgcgaaaaggctattggggacattgaagggtcagccaaacttgaaggtgaagtcaattatgaccatgacttgggagatgttt

SEQ ID NO: 19653 - DNA, 360 bp, Zea Mays
ttgttggaaagaaatgtgaagaagactatattgttgctagaaccgaagaggaggcgattgcagaagctcatgaaaaatatggaaaatcagttgaaatatatcaagaccctgatgttcttgatacttggttctcaagtgctctgtggcctttcagcacgcttggttggcctgatctttccaaggaggattataagcatttttatccttcaactgttctggagacaggccacgatattttgttcttctgggttgcacgaatggtcatgatgggaattgagttcacaggatcagtaccattttcttatgtctatctacatggtcttatccgggatgctgagatcaatagggtaggcccttgtg

SEQ ID NO: 19654 - DNA, 522 bp, Zea Mays
atgtctctgaagtctgaacactcttctcatcctacgactgggataaagcaggtagatcagatcactctgggtcaaggcccggagaagtcagaggacgaaggagcccgagtaggaggcggccgacggcgagccgctgtgcggcgggctatagaatccgccgccgccgccgtactggatgatggcggcggctgcggggcttgcgtggttgtggacgccgtcgtaggtggtgatgacgtagcgggggtcgtcgcggtccctctccacccgcttcttcacgccgcagccctccgacgagcagcggtgaacatatgggtgtaccttggatttgggctactcttgacagccttcttgccatacttcctccatttgaatccatcgtccaagatctccacctctgatctcgttctgaacccgatcctaccgagtctcttctcgccaccaccaccctcacaccacctgatcatctgcttctcgctgcgatcgctccgagccccggccaaggtcggcgccggcgatgagtaa

SEQ ID NO: 19655 - DNA, 2977 bp, Zea Mays
cacttagaggtatctgttagcagaggctggtgacaccctatttgctacatttattggcacaaagcagtacaaagatattattgctgatgtgaacatattccaagggaccttatttcatgaagatactgctcatgatttagctcctgatgttgaccctgaacaaaatgatacccaaaagggtgaggaaagccatgggaaatcttaccgagaaacatcaaagaagctaagaaaaccaaaacctgcagtgcaccgaggtttcttggctcgtgctaatggaattccagcactggacctatacaatcttgcacagaaaagaaacaggaaacttgttctttgtggacactcacttggtggggcggtaggtacccgtagataatatacattatctcattatttgctcatacatcttcaatacaactgcaggttgctgcattggctactcttgcaattttgagagttattgctaccacttcatctgaagaggataacaggcttcatgtgaagtgcatcaccttctctcagccacctgttgggaatgctgctttaagagattatgttcacaaaagaggatggcaggactacttcaaatcctattgtattccagaagacttggtaccacgcattctatctccagcttattttcaccactacaatgcccagacacctgaagcatcttttacaaataaaactgatgtgaaatctgaagaagttatggaggcaagtggggaaaggcccagaggaaacaacagggaacacctcgttctcggtgttggtccagtgcaaaagtcattttggaggctttcaaaacttgttcccttggaaggggtgcggaaaagcttaagtgcaattcaaaaacaaacaaatgtttttgggaaggcaccatcacaattggatagctatttgcaatcaaaggttgatgaatcagaagaaccacctcaatctcttgagattcaagaaagttcacaaggaattgctcttacccctttatcggataaagatggagggaacactgaagataataataggactgagaaaataaatgcatctgaagcaggggggtctaaacgctggagcagggtaccttctttgccttcatatgtgccatttgctttacctattgggagattcatcagtcaatacactttcagattcagaatactccaagatgacgtcggtgcagtctgttatatcggagttaagagagcgtttgcagtcgcactcaatgaagtcctatagggctagatttcaaaaaatatatgattcatgcatgtgtgcaaatgctcccatttttactggcattgagcaattgccacaattttcacatctacaagaattaattggtctaacagctactgattctgttgaacttggagatatcgtggaccctcctgttatccgaactgctacttctatccttcctcttggatggactggactccctggtggtaaaaatgctgagccactgaaagttgatataattgggcatgacctacaaatgtgcactcttttccaggcacaaataaatggaaactggtattccacagtaatagagactctaccatcagctacttcatactcaccaaatggagaactgcaacccacattacagaaaatgcggattcttgttggacaaccactaaagcagcctccaaattacattagtggggatttcatgattcctgtgatggcaggtgctgattcaacacccgactttggatttgaatcattttttgaagataaagattgctgcaagggtttgagtggatttctaatatatgggacaagtgattttgtaactgtacgtaaagaggtccacgttaggactcggagagtgcgattgcttggattagagggggctggcaaaacatccctgcttaaagcaatgttaggacaagttaaagaaagaaatagcactgttcttgaatgcatacatgtcgatttgcatggcaagggaatatcaaatggattgtgctacatagattcgacaacggtaaacttgcaggagctacctttggaggttgggcggttcaaagaagaactgttgttaggactccatgatatcagcaggaagactgaccttgttattgcggtgcataacctagcacaccgaattccacagtatcaacggtccaatacttctcagcctcagcctgctctttcacttctcttggatgaagctaaggcgctaagcattccttggattcttgcaataaccaacaaattctctgttagtgcgcatgagcagaacagattgatcagctcagctatggaagcatatcaagtttctcctgagatgacaaaagttgttaactcttccccatttctgatgccaagtgctagaaacagtttgcagcagatcagatcagctactgggaagttgaagaaggatccagcaaatagatctggttatcttcctgtaaactttggattgtcatcatttcagaggaaggacattgttatgcatgtggagggtgttagttcccttcgtcaacttgtacatcaagtagtcctcaacaatgaagaaacagcatttgaggaacttgctcgtgagagattgttgaaggagctagcgtcagagaaagcagcgtccctgcaagtgaagcagaagccccggaaaagagatggctctgttacagctgctgctgtaggtgcatctctgggcgcgggcctgggaattgtaatggctgtgataatgggggcagcatcagcccttcgaaagccgtgattcatgtattcttttgatccattatttacttcttgatttaaggatgtctgaacaaaagcactagtgtaggcatgaaaaatgaaattttagggcagaatagttagctgataccgtagtgccacattttggctgtgtatagaatgtaggttgagccttttttttgctgatctgaattttgttgtgttactggagtatggcttggatatgttctacatcatgttttaatttagttataaatctgtatcatgtcta

SEQ ID NO: 19656 - DNA, 1453 bp, Zea Mays
acaaattgtgtgtgccttggcgtgtcgtggaggccccgggcacgcacgccgcacagtggcatcagctctcagtgcgcgcacgtcaccacaaattgtgtgccttgtcgtggaggccccgggcacgtacgccgcacagggcacacctgctccctccggcctgctctgctcactgctttgattccgcttcggcgcttcgccgcctccggttttctctccgcgcctccagtctccagggacgcaccacctctcccaagtcccaatctcccatggcggcgctgggcacggcgatcacccccgcagcagctaccacggcgccgtgctgctataatcggcatccgcggagccacatcacggcgcgccgtaaccgggttgcctccgcgaggaggcttgacctgtgcgccagctcctcacctgccgtcaccgctcccgacataccagacgaggcgctggtggaacccttggtggcgccggcgccggagacgaagctcaggaagctggcgtgtccaatctgctactaccccctggcgagctcgagcgatcagttggatgatgctaccagtctcgaatgtccaacgtgcaagaaatgctaccccaacaagcaagattactgggatcttacagtgtcagttggttcgacagagtactccgagtccatgccagtggcaacagagttgtttaggactccactggtatcttttctttacgaaagaggatggcgccaaaatttcatatggggtggtttcccaggcctagaaagagagtttgaaatggcaaaaacttatttgaagccaacaattggagggactattgttgatgcaagttgtggaagtggcctgttctcaagattatttattaagagtgggctatattctcttgttgtggcactggatttctcagagaatatgttgaagcagtgcaaccaatacatcaagcaggaaaacatttcagatgagagattagtattggtgagggctgacatatctagactcccttttgtgagtggttcaattgacgctctgcatgcaggtgctgcaattcattgttggccatccccagcttgtgctgttgcagatatcagtagagtccttcgcccagggggaatttttgttgcttcgacattcgtggcagatgttattccaccagctattccagtattgaagatcgtacgcccgtacattagccaaataactggcaacaataccttcttatctgaagtggagcttgaagatctttgcaaagcatgtgggctggttgatttcaaatttgtcagaagtggattctatataatgttttctgccactaaagcatgctaactaagtagcagcaatcgtccagtcgtttatgtcaagactcctcggttttatactgcaaatggtttccttctgtgcattgtgcggttgtgccatttgctctaaagacccatggcatctcctaggcgtaggcatgcatggcg

SEQ ID NO: 19657 - DNA, 1009 bp, Zea Mays
gccggcggtatcgtcgtcggtggggacgggtggcggcctcccggatccagactgcccctggtagtccgcgtgaattacggcatctgccatctcgacctgatgggcctcgattggcggctggcgttcccgtgaatcctgcggtgggccaagggtagaagcggtaactcgctgggccaggtaggaagttttcctttccgtgttccgccttttccccccgccgaataaacaaattataaaataaaaacaacttgttttaaatgggagcgggaatccctggaatttactttttttttctccttcgggctgtttctcactctgtacgcctctctggggccgcggacgtgagaggctcgcatcaaatcgggctcagggccggccgggcgcgtccgctttatcggctcacgttggcgcggcctccgtttcctctcccctttccttgtcctctctccctctccctccctcccggcctcacctctccagcctctctcccccacctcttccacccctccacgcccccagagagccccaggcgcaccgccgacgaccccggttcaggcgcagatcagcgtgcgcagtgtcccgcccaccctgcctccgcgacctccgaccctgggagcgcctgcccgcgccgcagggggcgcttcgcatatctccccttctcttccctcgccggtgggtagcggccggcttgctgctgccctgtccacgccgcgtctacgtgtcctcaagggctgggcgctcttgtcctgccaaacccggtgcggcctctgcttggaaccactccgttcgtgtgcctctctgtaggttttctacgctctaggaggaggtcagagacgcctcagagttggcttcgccgcgcgcatgcgatttgcggcggcggccggaggctggcacagccgccgctggggcgacgacgacaacggcgccgtggatgcctccgccgccgccggatcgaagggactatttgtaccgggagggccgcaggcacgacggcggcgggggcgacccg

SEQ ID NO: 19658 - DNA, 934 bp, Zea Mays
caccaacctcgcggccacccacctactcgccaacgcaatccacgccccacctgacattcgaaggccacgccccgccatcctagcccctgagcccgcaatccccttccattggtggcatcacccatgcgttgcgtccccgccgtcgtcctcgccccattacgagtggaaggaggacgtccacatgaccacaccaggcaaggccatgcccctgcccgacgccaccccccagaccccccctctagaagcctagcgatggcaccgtctatccgtgcgagatctccgtgcttgaggtcgccaaattccatcccatctctcagcgtcgtggtctccccgatatggatgggggaagagacaagctcgaacaaggaggctacgggcattgctttatgtttgtgacgctaaaggatctctatccatcattgtttccatattatcatggtattattgccttcaatattattctctatatcaactacagctaccgtggaggagttgatagtgaagatgcccttaataaccatgcagttcctgagcctgctcagtcatccctgttctctcttgacatacatgaatatcctaatcttaccgttgttcttgttctgtcctggcaaaaatacttgatgcatttgtttatgttttgtaatgggacatcactgctcaagtatccaaaagcttgggaaattgcacatgcactgcacgcgtggcggagcctcttcgagtttccatgcagcacgattcgttttccaacgcgttgccgctgcatgaaacgcaatgaaggcaagccgtcgcctggctacctccacccgctgcaggctacaaacatccgtgacaccgaactcttcggcgtccacgtctatggcaccgacctcgacgtcgagatccttaacgccaagattgctgccacgtgagcgttatcttagcacgtgaatccgag

SEQ ID NO: 19659 - DNA, 1236 bp, Zea Mays
ccccgtcttgataagaggcgattagatcactagatccaatcttcaggtgaaaacggtaaaagttagcaacctttcattaaatgttttgaaaagagagctcacagagttctttagtttctctggggatatagaatatgttgaaatgcaaagtgaatctgaatggtcacagcttgcttatgtcacatttaaagactcacagggagcagacactgctgttcttctctcgggggcaacaattgttgatcgtgctgtcattataactcctgctgagaactatcagctgcctcctgaagcacacaaacaattatcgggagcaaacgtctctactgaatcagcagtcaggaaggcagaagatgttgtcagcagcatgttggccaagggatttgtgctcagcaaagatgctctcaacttggcaagatccttcgacgagcgtcacaatatcctatccaatgctactgccactgttgcatctctagaccgccagtatggcctgagtgaaaagatcaatctgggaagggccattgttggcagcaaggtcaaggaggtggatgaacgctaccaggtctcagaactcacaaagtctgccttggctgctgctgagcagaaagccagctttgcaggtgacatgacctccatggccaaagacaaggtagagagagccgaggaggagagaaaggccatcatgtgggaggagaggaatgggctggtgagcgattatgcaaagatccatcttgacgagccctcttcatgggagcccgcagttctgcctttggaatcagtggatgaacagaagctccaggctgtctgatccacaaaaccgaatgccaatcgttgtcgcacgtaattcttttgcagctcgtcctatatatagatttattctttttcgtcgatgcagtggatcaaaacaaatgcgcttatcagccatagcgccatgtaaattttctgaaagttgctcccgtgttattaccaggttttctttctttcttagtttggagaaagagtggtgctaccagcattgctgctctaaactactgtgtgtgtgtgaatggagtactactgtacttgtgtctacttgagtactacagaaacagaatacaacttccttcgttagatacagattgatttaaaattgagttgaaccacttgtgcaaaaaaaaaaaaaaaaaaccctactaagatgttgcttgttcagtgtttcttaactgtaataccatgaagtcgtcgaaagaaaacggg

SEQ ID NO: 19660 - DNA, 1930 bp, Zea Mays
ggttcatgtggtatcaacttgggatgtgttcacggccacatagttccttagatgagcgtttgcttaacgaccttattctttaaatgggacacatagatgcaagaagaagaagataaagaagaatacgactcgggagcagcaagagttacaacttgatttggattcaacattgacagcagaggcggagggacaagtagaggcaaagggaaacgaggtggaggagcaggatgccactgatgctgttgcttctggtattttgatggaggggacagcaaaatattatgaggaggactccaaggtgaaggtcagtctgatgcccgagaaggaagccaacaccactgttgtttcagtttctgagagtacaccaaaacacaagaagaggaggaaaaagaagaacaagattcaggggcaactagattctgcaaaggcatcatctagtgttgtttccatggatataattgcagctgataaatctgaaaatggttgcacagatgtggtaggggcatcaggacatgctgatatcaatatggatcccataaatggtgatgatctaagtagtgctcagtcaaaggcaaatgatgctgatgttttactgaagaataaggatggaaacaagggggataagaattgcgctgagaacagcgtcttgttgcaggagagctctgcaagaagaaaaagacggaggggaaaaagaaagtggggttcagccggtggaggaccaggcttctcttctgataatggaggcgtggttgctgagcatagcctgcattcttcagcaaaccatggtcttagctgcatatgtgctccatgtttagttgaggcacatgaaaagaagatccaaaatatctactcaccaagaggatcactggtaaggtttcaaaggaagaaactcctgatcttggaccttaatggtctgctagcagatataaatcaagattaccataatgcacacttggcacatgcaaaggttcgaaccaaattagttttcagaagaccatactgtgacgattttctgagattctgcttccagaattttgagctaggaatatggtcatcaaggaaaagggaaaatgttgaatcggttgttgatatccttatgaggggtcttaagcaatgcctactattttgttgggacatgtcttactgcactgttacagggtgcaaaacaattgacaacaaggacaaaccattagtgctgaaggaactaaaaagggtttggaataaggatgagccagacctcccatgggggcagggagagttttcaccttcaaatacattactggtggatgattcgccctacaaggctctgtgcaacccgccaaacactgcaatcttccccgaaccctacaattacatgaaccagagggatgattattccttgggacctggtggagatcttcgggtttatctgcagagaattgctgctgcagacaatgttcaaaattttgttcgggataacccatttggtcagaagtccatcacagagagtgatccaaactggaatttctatgtgaaaatagtcgataagatggagaagcaaatagttgatcaagtggaaacgaaaatagttgatgaagtggagaggtccttaggttaataggaacaaaggttcaatcaagagaaagttctgtatttgtttgtgttgattagcaggtgttttgcattgcgccagtgctatcatgtgtaatctaatttagtaattgttgtttcatagacaaaacatgatttgaagaatcttgataggttttgttgttccaaccgagggatgaatcattgtttgtcctgtatcgagtgttacaggctttctggtttgctaacttagctatttctggaagtttggttgactatgctggaggatgattcagttcgatggaactgttatatactcgaattgttgtaaatcatctcagtttcatggtttcttgccttg

SEQ ID NO: 19661 - DNA, 2696 bp, Zea Mays
agaaagaatggaatccaccaagctttattttttttaaaaaaaagaaccctcaaagggaaaaaggctgcacactggaagacgaaggcaaaccctagtcgctactccaccgcggcgccaaccacctcgatcgggctccgattccgatggacttcgcggagctggaggccgtggagggcctccggtggccgtggcactcgtggccgccgactgctcccgccgccgcgtccctcgtcgtgcccacggccgtcctctgctcgccgctgcagcaccccacggcgcccgacctcctcccgctgctcccctacgcgccgctccgctgcgcctccccgggttgcggcgccgcgctcaacccgttctcgcgcgtgcaccacggctccgcgcgctggtcctgccccttctgcggcgccaccggcaacccgttcccgcgcctcctggcccccgacgcgctccccgccgagctcttccccacccactccagcgtcgagtactcgctgcctccggaccccgccgaggccgggggcccggggccacctgcgctcgtgttcgtgatcgatgcggccacggcggccgaggagctcgccgtgctgaaggacgaggtacgcagggtcgtgcaagggctgcccgaggggatcagggtggcgctcgtcactttcgctgcgtccgtatgggtgcacgatcttggatttgagggttgcgctcgagtggttgtgctcaacggcgagcgtgagctcgagtctgacaagatacaaaaacttctaggtgttcaccgttcaccatacaagaagttggctatgccaaggtccactgaagcacagcgatttttgctgcctgtttctgaatgtgaatttaacatcacatctgcaatagaggacctgagctccatgtctgcatgtccacgtgggcaccgccctttaagggcaactggcgcagcgatttctactgctattgctcttctagagggttgctgctcacccagtactggtggtcggattatggtctttacatctggtcctgcaacagttggtccagggtgtgttgtggaaactgatcttgggaaagcaattcgttctcatcgtgacatattcaatagcaacgcacctttgactgacaaagcacgtgatttctataagaaagttgcaaagaggttgacagatcatgcattagttcttgatctgtttgcttgctcccttgatcaggttggggccgcagagctgaggaatccaattgaagtgtcagggggtttaatggtgcatacagaatcatttgagtctgagcagttcaaaagctgttttaggcatatgttcaagcgtgaaggcgccaataaccttaatatgaacttcaatgcgacgattgaaatagtgacatcaaaggaggtgaagatttgtggcgcccttggtccctgcatttcccttcgcaggaaaaatagctccgttagtgataaggaaattggtgaaggtgggacaaattattggaaaactagttcactgagcagcaagaccaacattgctttctttttccgagttgattgcagtcgtaaagctgagcccccaactgtcttctttattcagttcatgacaaggtaccgagctggtgatggtagttatcgcctaagggtaacgaccgttgcaagaaggtgggctgctcctcgatctcctgaaattgctgcagggtttgatcaggaagctgctgcagctgttatggccaggcttgctgtttacagggcagagacgtaccatgttagagatgttatacgatggcttgacaagatgcttatccgcttcactgctaagtttggaaactatgtttctgaagatccatctacatttcggctgtcaacaaacttctccttgtatccacagttcatgtactacttgcggagatcacagttcattgatgttttcaacagctctcctgatgaaactgctttcttcaggttgatgctgaatagggagggagttgtggggtctctaatcatgatccagcctactctattccagtactcatttgatggaccacctattcctgtgctgttagatgtcagctccatctctcctgatgtcattttactatttgattcatacttctatatcgtgattcattatggctcaaagattgctcaatggaggaagcttggctatcacaaggacccaaaccacgaaaatttgcggaagctccttgaagcaccagaagtagatgcagaggcactattggtagaccgtttccctgtgccaaaactcataaagtgtgaccagcatggtagtcaggccaggttcctgctcgctcgcttgaatccatctgtgacacagaaaacacagctttcagagggatctgaagtcattttcaccgacgatgttagtttgcaagtgtttattgaacacttgcaggagttggctgttcagggctagaaagtcatggagcttcaccatgtctctgctatttggtccacttgagatcctgaagatatggctttgagagggaccagacttcatatttgcagatgaagtttacttgcaagtttttattgaacacttgcagtaattggttgtgcaggattaacatgttcatgtggattatttatatgcaattttctgctcacatgcaaatactggggagctctactgcctggaggagtgagatctccctgagttgtacattgctcaagctccagtttgatggaccagaaaatcagcaaggcg

SEQ ID NO: 19662 - DNA, 5649 bp, Zea Mays
tgtgtcccctccccccctcagatcagatctctccctctccttctcccggccccgagtggagctgtggaggcacctcgcatcaccgccttcgtctctccagactagccgagagagatctcgacaccgccgcccgttgccatggcggcggccaacgcccccatcgccatgcgcgaggcgctcacgctcaccagcctgggcatcgcgccgcagtttgtcacgtttacccatgtcaccatggagtcggagaagtacatctgcgtccgcgagacctcgccgcagaacagcgtcgtcatcatcgacatggccatgcctatgcagccgctccgccgccctatcaccgccgactccgccctcatgaaccccgacgccaggatcctcgcgctcaaagcccaaatacctggaacaacacaggatcaccttcaaatatttaacatcgaggctaagactaagatcaagtctcaccaaatgcccgaacaggttgtattttggaagtggatcactcccaaattgttgggtttagtgacacaaacatctgtttaccactggtcgattgaaggtgattctgagcccaccaagatgtttgataggacagctaacttggcaaacaatcaaatcatcaactatcgatgtgacccagcggagaagtggcttgtgcttattggaattgcaccgggagccccagagagaccacaactggtgaagggaaatatgcaacttttttctgtcgatcaacagcgtagccaggcgcttgaagcccatgcagcatcttttgcaacatttaaggttgttggtaatgagaacccatcaacccttatttgttttgcctcaaagacaactaatgctggacagatcacttcaaagttgcatgttattgaactgggtgcccagccagggaaacctggcttttctaagaaacaagcggaccttttcttcccaccagatttccaggatgattttcccgtagctatgcagtttacagaaatagaatcagtccagaccctatattcttgacagcagaatcttcctctactggtggattttatgccatcaacagaagagggcaggttttacatgccacggttaatgatgcaactgttgtaccatttgttagcggccagctgaacaaccttgagcttgctgttaatcttgccaagagagcaaatcttcctggtgcagagaacttggttgtgcaaaggttccaggaactgtttgcgcaaacaaaatacaaggaagcagctgagctggctgcagagtctccgcagggcctcttgaggactcctgaaactgttgcgaaatttcagagtgttcctgtgcaagctgggcaaacacccccactcttgcagtactttggcacattgctaactcgagggaagctcaatgcctttgagtctcttgagctatctcgacttgttgtcaatcagaacaaaaagaaccttctggaaaactggttggctgaagacaaactggagtgcagtgaagaactaggagatcttgtcaagactgtggacaatgatcttgcactgaaaatatacatcaaggccagggcaacccctaaagttgttgctgcttttgctgaaaggagggagtttgacaaaatacttatatattcaaagcaggttggatacaccccagattatctcttcctcctgcaaaccattttgcggacagatccacagggagctgtcaactttgcattgatgatgtcacaaatggagggaggttgtccagtagactacaacactatcactgatctcttccttcagagaaatatgatacgggaggctacagcttttctgctggatgttctgaagccaaacttgccggatcatgcttttcttcaaaccaaggttttggagatcaacttagtgacttacccaaatgttgcagatgccattcttgcgaatggtatgttcagtcattatgaccgtcctcgtattgctcagctctgtgaaaaggctggattatacttgcgtgccctccagcattattcagagttgcctgatatcaagcgtgtcattgtaaatactcatgccattgagccccaggcacttgttgagttctttggcaccctttcaagggagtgggcactagagtgcatgaaggaccttctactggtaaatctgaggggaaatcttcagattgttgtgcaggctgcgaaagaatattctgaacaactaggagttgatgcttgcataaaattatttgaacaattcaaatcttatgagggcctctactttttcttgggatcctatttgagctccagtgaggatccagatatccatttcaaatacatagaagcagctgcaagaactggacagatcaaagaagttgagcgtgtaaccagagagtctaatttctatgatgcggagaagacaaagaactttttgatggaagcaaagctacctgatgcccgcccactgattaatgtttgtgaccgctttggatttgttccagatctgactcactatctatatacaaacaatatgcttcggtatattgagggctatgtacaaaaagtcaatcctggtaatgctcccttggtagttgggcaacttctggatgatgaatgcccggaagatttcatcaagggtttgattctctctgttcgttctctgcttcctgttgagccactagttgatgaatgcgagaagaggaaccgcctacggttgcttactcaattcttggagcatctagtgagtgaaggtagccaagatgtgcatgtccacaatgctcttgggaaaatcatcatcgacagcaacaataaccctgagcatttccttactaccaacccattttatgactctcgtgttgtgggcaaatactgtgaaaagcgagatcctacacttgctgttgttgcttatagacgtgggcaatgtgacgacgagcttattaatgtcactaacaaaaactcattgttcaagctacaagctagatatgtggttgagagaatggatggtgatctgtgggataaagttcttcagcctgagaatgaatatagaaggcaactcattgaccaagtggtttcgaccgcattgcctgaaagcaagagccccgagcaagtctctgctgctgttaaggcattcatgactgctgaccttcctcacgaattgattgagcttcttgaaaagattgttcttcagaattctgcattcagtggaaacttcaacctgcagaacctactcatcctgaccgccatcaaggcggatccatccagagtcatggactatgttaacagactagacaattttgatgggcctgctgttggtgaagttgctgtcgaggcacagctgtacgaggaggcttttgctatatttaagaagttcaacttaaatgtgcaggctgttgatgttctcttggataacatccgaagcatagacagggctgaggagtttgccttccgtgttgaagaagatgctgtttggagccaggttgctaaagcccagttacgtgaaggtctggtcagtgaagcaattgagtccttcattcgtgcagatgatgcagcacacttccttgatgtcatccgtgcggctgaggaagccaatgtgtacaatgatttagtgaagtaccttctgatggtaaggcaaaaggcacgggaacctaaagtcgacggagaactcatctttgcatacgctaagattgacagactcagtgacattgaagaattcatacttatgccaaatgttgccaaccttcaaaatgttggtgaccgtctatatgatgaagaactatatgaagctgcaaagatcatatatgctttcatctcaaactgggctaagctggctgttaccctggttaagctgaagcagtaccaaggtgctgtggatgctgctcgcaaggctaacagtgctaaaacatggaaggaggtctgctttgcttgtgttgacgcggaggagttccgtcttgcacaaatatgtggtctcaatattattgttcaggttgacgacctggaagaagtcagtgagtactaccagaacagaggatgcttcagtgaacttattgctctcatggagagtggtcttggacttgaacgtgcacacatgggcatcttcacagaattgggagttctatatgctagataccgctctgagaagcttatggagcacatcaaacttttctccacccggctcaacattcctaagcttattcgagcttgtgacgaacagcagcactggaaagaacttacctacctgtacatacagtatgatgaatttgacaatgctgccaccacaattatgaaccactctccagatgcatgggatcacatgcagttcaaggatgtctgcgttaaagttgcaattgtcgagctatattacaaggcagttcacttttatctgcaagagcatcctgatctcatcaatgatatgctaaacgtgcttgcacttcgtttagatcacaccatagttgtagacataatgcgcaaggctggtcagttgcatcttgtgaaaccatatatggttgcagttcagagtaacaatgtatctgccgtgaatgaagccttgaatgagctttatgtcgaagaggaggactacgagagactccgtgaatcagttgacatgcatgacaactttgaccagattggtcttgcccagaagcttgagaagcatgaattgctggagatgaggaggatcgccgcctacatttacaagaaggctggcaggtggaagcagtcgattgctctatcgaagaaagacaacatgtacaaggactgcatggagacatgctcacaatctggcgaccgtgaactgtcagaggacttgctcgtgtatttcattgagcagggtaagaaagaatgttttgcttcttgcctcttcatttgctacgacctgatccggccagatgtggctcttgagcttgcatggatgaacaacatggtggactttgccttcccgtacctgttgcagttcattcgtgaatacactagcaaggtggatgatttagtgaaggacaagatcgagtcgcagaaggaagaaagagccaaggagaaggaggagaaagaccttgtggctcagcagaacatgtatgcgcagctgcttcctctcgctttgccggcgccgccaatgcctggcatgggtggtcctccacctccgatgggtggaatgggcatgcctcccatgggcgggatgggtatgccgccgatgggccctggtccgatgccagcattcggaatgggaggctactgagtggtggttttgcagggagcttagatgatgatgtgaattgttccattgcaagcataagtggaacctcattggagctgtagatggttttacagtttgggaaatcaatattctttattgtaccaggaaacttttttttgggcgagtgagtgaaatcagcctgacccatagtttgagaagcgcaacctgtgatatgttttacgatgggatcggaaataggatgattaggttgtttcagcatgagctgttaaaagctggtaccatgtgtatgtatagtggtgtgataaaatcttttgcgtgtcggcagagtgaagatagacaaatgtatgtttccttgttacgacctgttaatctatatattagcccgacttgtagttcaaatgccctacattattttcttctagctcctccaacttgtagttcaatcggtaatactatatttattaataaattcaatggatatgttctctat

SEQ ID NO: 19663 - DNA, 127 bp, Zea Mays
gccgtttacccgcgcttggttgaatttcttcgctttgacattcagagcactgggcagaaatcacattgcgtcagcatcctcgaggaccgtcgcaatgctttgttttaattaaacagtcgaattcccc

SEQ ID NO: 19664 - DNA, 1598 bp, Zea Mays
atctcctctccgttctcaccaccgacaggggcgtctgtctcctccccgctgccataaacgcaggctcacgcggacgcctccctcccgtgccaagcgcccaagaccaaacccaccagcacagcaccaattcaaccgcgacccaacccaccgccccgcaccccattcccgcaccctcctcccccagatctccggccgcgacgacgccatgacggccaagggcggcgccacgccgtcccccggcggcgcgggcccccgcggcggggaacggccgcctcttcaccgtcgggctggtcaccgcctggtactcctccaacatcggcgtgctcctgctcaacaagtacctcctcagcaactacggcttcaagtaccccatcttcctcaccatgtgccacatgtccgcctgcgccctgctctcctacgccgccatcgcctggctgcgcgtcgtgcccatgcagctcgtgcgctcccgcgtccagctcgccaagatcgccgcgctcagcctcgtcttctgcggctccgtcgtctccggcaacgtctcgctgcgctacctccccgtctccttcaaccaggcggtcggcgccaccacgcctttcttcaccgccgtcttcgcctacatcatgaccgtcaagcgcgagtcctgggtcacctacctcaccctcgtgcccgtcgtcaccggagtcatcatcgccagcggcggcgagcctagctttcatctgtttggattcatcatgtgcataggagcaactgcagcaagggcgttgaagacagtattgcaaggaattcttctgtcttccgatggggagaagcttaattctatgaatctgttgttgtacatggctccaatcgctgttatcttcttgcttcctgcaactatctttatggaggataatgttgtcggcgttacaattgagcttgcaaagaaggatttcacgattgtttggttgcttttgttcaattcttgcttgtcgtattttgtcaatttgaccaatttcttggtgaccaagcatactagtgcactgactctacaggttctcggaaatgcaaagggtgcggtggcagttgtcgtctcgattatgatattcaggaatcccgtgtccataacaggaatgctcggttatactctcacagtttttggcgtcattctttacagtgaatcgaaaaagcgcagcaacaagccatgaataccctaggagacagtaaatatgggaaatcatttctttgtcctgtcagtgcctagagctaatatatgatgagaaatcacatcggtggcgaccacaacaaatcctatgccatactgcctcagcaattggacatcaaggatagaagtccaataactaccttggcatatgggaggcattttgttttatggcgttgatggatagaatataaatatttttttgtgtgtgttagagaactatggctcacactgccagcattggttgatacgtttagctcttgggaaattgcctcttgtattcatcttctgctgctgcagtttccattttgttttgttgtgaagaccacctataccacactttgatccaggttccgggacctaattaatatattgtgacactgaattgatgctcaaaaaaaaa

SEQ ID NO: 19665 - DNA, 1634 bp, Zea Mays
aatggtgcagtgtgtgtgtctgcgaagctatttctggataattgagccattcaatgctgagcctcaccgatcagagctagtcgcatcttacatcaccccagtggatttcttctacaagaggaatcatggacccatccctaaagtcgaggacctctcaagatacactgtttccatttctggtctcgtcaacaagtccattcagctatcgatggctgacatttggtctcttccaaagtacaatgtcacagcaactttacagtgtgcaggaaacaggaggactgcgatgagtaacgtacggaaagtgagaggtgttgggtgggacatatctgctcttggaactgcaacttggggaggtgccaaactatctgatgtccttgagctagttggaataccaaaactcagttcagtcacgtctctaggagggaaacacgttgagtttgttagcgttgacaagtgtaaagaggaaaaaggtggtccttatacggcatctattccattaaatcaggtactcaaccgagaccacggatacccgctccgggttgttgtacctggagttattggtgcacgctctgtaaaatggctggacagtatcaacgtaaaagaggaggaatgccaggggttttttatgcaaaaagattacaaaatgtttccgccaaccgtggactgggacaacattaactggtcaactagaaggccacagatggatttccctgtgcagtctgctatctgtacactggaagatgtagatgttatcaaggaaggacaggctaggattgctggatatgcactttcaggtggtggccgtggcattgagagagtggatgtatcagctgatgggggtaagacctgggtcgaggctcgtagataccagaaagacaatgtggcgtatgtgtcagatggacctcaaagtgataagtgggcttgggttctctttgaggccacattagacgtaccagcgaatcctgagatcgtagttaaggcggtggactcagctgcaaacgttcagcccgagaaggtagaagacatatggaatctgaggggaatcctcaacacgtcttggcatcggatcaaaatccagagatcttcgtgcgttgaaagatctaagctgtgaaattaagtacgcagctgaccacttggagaaagcacactcactttaccattgtccctgaataataattagtcacttcaactttatgcgtctgtggagtaaggttgtacgagtgttgtggctgtgtcattatgggatttgagctcacttggtttctgtgtaaatgtcagctgctgcggtttttttttggttggtcaggtttgatatcgagaaatatccattgcattctgcgtttgaaaatactatcgcagcatagaactgttctttgggcaaatggcagctctgggaagaggtgcgcttcatatcgcagctgagaaataccaataaaagagaaagaaagatgtgaacatatatatccccttcagccgtgggaatggcaatttcagtaggcaatgatatactacctcggttcaaatatttgtagctctctagttcatttttgaatgaactaaaccgcaacaaataaaaataaactaaaccacgataaataaaaaagaacggaggaagtagttagcattaacattct

SEQ ID NO: 19666 - DNA, 2258 bp, Zea Mays
aattagtagcagcccactgcccaccgaggcagagtagaaaccccatcatgccgcatcacggcatcacgcgcgtgccttcctcgaccctcgctactgctactgtctcgtctcttgctcgcatcgtctggggaccgcggagcggcggcggcgtggcgcagcggcacggcagcctccccctcgctcctcctactccggctcttcccctctccccctcagccctacgcccctgcgcggctgcgtgacctgcgtccagccgcagcggctggtgcccatcggcggcaagtagcagagcagcagcagccgccggcggtcctcccctccccctcggcctcgctccggctctcccagtcccagctcgagctccgtactgaaggttgaagcaaggacccaaaacagattgccgccatcaaagatggaatctgggagcacgttctatggaggggaaggtctctccatcgaccccaagtggtttatcgacccgaagcttctctttgttgggccacgcatcggcgagggcgctcatgcaaaggtctatgaggggaagtataagaaccaaaatgttgctatcaagattgtgcacaaaggggacacccctgaggagatgaccaagagggaggggagattcttgagagaggtgaccatgctgtcaagggtgcagcacaagaacctcgtcaagtttattggggcctgcctagaacctgtcatggtggtcgtgacagagctactagtggggggttcgttgcgcaagtatttggtcagtctccgacctaggagccttgagcctcgtgtagcagtggggtttgcattggacattgcccgagctatggaatgcttacatgcacatgggatcattcatcgtgatcttaagcctgagaatctgttgctgactgcagaccagagaacagtaaaacttgttgatcttggtttggctagggaagagacactaacggagatgatgactgctgagacaggaacataccgttggatggctccagagttgtacagcacagtaacactgaggcatggagaaaagaagcattacaaccacaaagtagatgtctacagctttgcaattgtgttgtgggaactcctccacaataaactgcccttcgagggaatgtctaaccttcaagctgcctacgctgccgctttcaagaatatcagaccaagtgccgataacttgcccgaggagctgtcagaaatcctaacatcctgctggaaggaagacccaaacgacagaccaaacttcacacagataatacagatgctcctacactacctatccaccctttcgccacaagagaccttggcgggcccccgccgcacgttcagttcggagaacacaatcctgcccccagagtctcccgggacaagctcgctgatggcttcgcggggcgacctcggcgacacgcccaagggcaagaaggaagacaagccgaggggcttcttcttctgtttcagcgagtgctattagcacgagcccccccaaagggggaacactccgataagcttgcaaatactgaacgaacaccgtctctccccagctccgatgccctgcgactcaagccatgtccagccggtcaagtcccaggcatccatagtccgcaccctgaagaacggaagtgtagtcgaacactgttttgttttcttctgctaatcaaggtctcctgcatcgctgacatgctgatgacatataccagcagggtaaaacgacgggtaaaccttttgactccagatagtaatggtgggaatagcttacctcccctgtgttttctggcgcaccatggtgtaacggagttgctagagcgcgactatagattgccttcctgcctgcctgtctcgcccgacatcgtatagaaataaaaccaataattcgcatctgtcggtttgtctggttgcaaagggtaagctgccagtccttttgtgttcttgttctgccagttctttgtgttcttggcctggtcgtcttccgttgctgtacagctgcgttttgttgcagctgcaagatttgtgtagcaggggagactgttgcagctatgtgtatgcgttgcagcagcagcaataaggcaacacactactacaggggagggataaactgttcggtctctcctggcagcagttgcagctgcgggtaaaaaggccagccgaatcggggaaagggttccaaaagccaagccctgccctgatcggttgtcattgctgcaggggctgctgctcccacagacgcacagctgcaacagtttctcctacacatatat

SEQ ID NO: 19667 - DNA, 988 bp, Zea Mays
agtggcgaagggcccctcccggctcccgcttccctctgccatggctggacctgctgttctcaatgagcgtatcctttcttccatgtcccagaaacatgttgctgctcacccatggcatgatttggagataggaccaggggctcctgaattcttcaattgtgtggttgagattcctagaggcagcaaggttaagtacgagttggacaaggcatctggtctgatcaaggtggaccgtgttctttattcctctgttgtttacccacataactatggcttcattccacgcacactctgtgaggataacgaccccctggatgtcctcatactgatgcaggaacaagttgtccctgggtgtttcctgcgagctcgtgctattgggctcatgcctatgatcgatcagggcgagaaagatgataagattatagcagtctgtgctgatgaccctgaattccgtcactacacggacatcacggacctcccaccgcatcgccttcaagagatccgccgcttttttgaagattataaaaagaatgaaaacaaagaggtcgcagtgaatgagttcctgccagcgaaagatgccatcaacgcaatcaagtactcgatggacctgtatggctcatacgtcatcgaaagcctgaggaagtgatctccagctgcttgattgtggttgtggatgctacaccattttctcaacagctcatccagagtaccgtagtacagacttaacacgaacgaactgtaatcgtgaccaagggatgctattaccttctgctcatgttgaaacaatcagcagtgcctttctttccattatatgccatgtcgaatcaaggcaacttggccctgaaatctttgtggtcaagttaaaccagcactttgacagaacaaggattgctggatgcctggattactgttacataaatgaccattactgaacttcatttcttgctcttatcttttggtgagatgcccagttctcatccgatgcata

SEQ ID NO: 19668 - DNA, 838 bp, Zea Mays
ccccatgcccatgccccaagctatgtagctagtcctgtggccgcgctggcccgtccctcactcccttgctatgtatgctattgctacccatccactatcgatcatcgcgggcataaactaatccggccggctgcggctgcagctactcatcggcaaagctgcagtataaattcaggggagctccatcgacgagtgagctccctgggggaccaggctgggagagcccccccgtcaggccccctcctcctcctggtctcctctcttctatccgagctcggcattcagggctactacacctgcttacatccatcgttcatgcatggtgcatacaatggtatgcgcatatgcactgcattgttcgttcagaataaataagtagaccatgcaactgctacatacacagtggaaaggtttttgatcgagaggcaacgcaattgcaatggtgatcagggtgtggtcgaggtcgatcgtgcatcatggccgcatgcatgcatgggagatgcagcaggcgttggcgtcgtctgtcgccacagcttggatagcggaaccaaaaaaaaaaaagggtcatgtggctagcagcttctgtttattttcactttcttcgttcatcgcatgctcttgttgttcactgttgtactatctagtagttctctttatctggtgcttgcaatctaattctccgcttccttgtcgtgacatttttttttctttcaatggtcgatgtcttcgtcatgaatgctttgtactctgcgtatatcggtatgcagttgtacgtgccctttattaacacttccactgttctatatacttagacattaatagtgtgtttggtttgagg

SEQ ID NO: 19669 - DNA, 3111 bp, Zea Mays
gcgagacagacggttggggaagagtcaggcgagccagcagcagcagcttgctctgccgacgttacaattccgggaatgcgggagggcgtgctcgatagatttcaggggccggagctcgagtaaaccacgagaaaagatagtggctgagatttctcgcggcgctcgccgcgagagcgacccccacaggtcgccgcccctccgcggcccgcgcagcgcacagcatacagtcagcacacgcagcagctgccaccacagcgaacagcaaagcacctccgactcggagtcgcggcgagagccgagaaccttctcattcatcttcctcttctatccatcctgcctgcctgcttgcctccgtattccagctagatctccgggcagccgattgaccgagaagtttgtggttgtggcggcggcggagagggaaacggggagcgggagggcggcgcggatgccactgctgcgccggcgccggcggggccggtgatgcccgccgtggcggtcgcttgaggccgccgtgcgtgggaggtggacgggggagcgaggcggtgcggaccgaggttgcgttgggttggattcgattgggctgcgtctgctgagagtaaggacaattggatcaatttaagtaggtctgggcacacaaatttgaactattaacgcattgggagtgcttgtgtgttagaggtctaggaggagctatgaggtactacttccgtcaggtccagcgtttggttggagatatggaaggaggagctctcttgtttatagatgacctcaactccaagtgacaaagtgaacagctgttgaacttcccgtctatttctgtttctttttgctggatttggagatggaggtgaattcctctggtgaggaaacggtgataaaggtaaggaagccatacacaataaccaagcagcgggagcggtggacagaggctgagcacaaacggttccttgaagccttgaaactttatggcagagcatggcagcgcatagaagagcatgttgggacaaagacggccgtgcagatcagaagtcacgctcaaaagttcttcaccaagttggaaaaggaagctattaacaatggtacttctccggggcaagcccatgacattgacataccgccaccacggcctaaaagaaaggctaacagtccatatcctcgaaaaagtggtctcagctctgagacaccaaccaaagaacttccaagtgacaagtcaacaaaaccaaatatgcccttgagcaatgagaatgtactaatggcaggtgatgcatctcttcagaaatttcaaaggaaggagttgtctggaaaagaaagttgctcggaagttcttaatctcttccgtgatgccccatctccatcattttcttcagttaacaaaagctcttcaaatcatggtgcaccgattgaggcaagtaaaacaaaaatccgagatatgaccattatggaaaatagttctcttaaccccaacatgcaagaggatgtaaaggaaatcaatgatcaggagatggaaaggcttaatggtacccaaatcagctctaaatgtgaacactctcatgagggatatttggacatctcaatgcaacaaatgaagctaaagccagagtctgtggagacaacatatgtggacaaacaaaccgcaagagcttcacactccctagcggagagaactgggacaactagcattccggtcactgcaactgaagaaactcattctgttctaacaagtgatcaagtgggaatcaatggaagcatgaacccatccatccatccaatgtttcctgcagatccaaaatttgatagcagtgccacaccacagccttttcctcataattatgctgcctttgctccaatgatgcagtgcaactgcaaccaagatacccacagatcattggtcaacatgtcatccaccttctccagcatgcttgtttccacgttgttgtcaaaccctgccatccatgcagctgccaggctcgcagcatcatactggccagcagctgaaggtaacactccgattgatccgaatcaagaaaatcttgcagatggtgttcaaggaaggagcatagggtctcctccaagcatggcttctattgtagcagctacagttgctgcagcatctgcatggtgggcaacacaaggtcttctccctttcttcgccccacccatggctttttcatttgtgccagctcccagtgctgccttccccacagttgatgttccacgaccttcagagaaagatagagattgcccagctgaaaatgcacagaaggaatgccaagaagctcgaaaacagggacagtttgaaggtttcagagttgccgcttcttcagagtatgatgggagtggaaaaggcgaggtgtctgtccacacagagttaaagatatctcctgtccagaatgctgatgccacgtctgccgcaggagctgacacgactgatgcattcatgaataagaaaaagcaggaccgctcttcatgcggttctaacacaccttcaagtagtgatgtagatgtggacaatgtccctgagaaagagggcaatggtaatgagaaggcgaagcaagcctcctgcagcaactcttcagctggtgacactaaccaccgcagatttagaagcagtggaagcacgagtgattcatggaaggaagtttccgaagaggttgtaatctaccaacactatgccaattcactctgcccaaacctttgagcatgccgcactgcctttctaattcactttttttgttggcagggtcgtctggctttccatgcgctgttcagtagagaaaagcttccgcaaagcttttctcccccacaagcagaaggctcgaaggaagttggcaaggaggaggaagatgaagtcaccacagtggcagttgacctcaacaagagtaccacaagcattgatcatgacctcgacacaattggtgagccaagggcttcctttcccaatgaactgtcgcccctgaagctgaaattgcgccgaacaggcttcaaaccatacaagagatgttctgtggaagcgaaggagaatagggtgccggctagcgacgagggtcatgcatttacatagcactcttgatgcaaaagtttatttcgtaaagttgtagtggaatatgc

SEQ ID NO: 19670 - DNA, 3509 bp, Zea Mays
atgtcgacgcgcgacggcggaggcggccggcgtggcggcaatgcagcagcaggccgtggaggtgacggccaagggcggggccgtggagggggcggccgaggtggcgccggcggccgtggcggtggcggccaatggcgggcccaaggcggcgcggagcttggcggtggccgaggtggagccgtcggcgcagcgcgtggcggccgcggaggtgtcgagagagggggtcaccagtccttccacggcgccaggccggtcggtggggaccgaggcggacgcggacactaccaccatggcgtgcctgctcaggtccagccgcagtggcaagtggccgcgccgccttcgacgtcgaggccgacacccgcggaagtcgaggagctgagaggcgaggtggagaggaaggcggcggtggcggtgccagacgcagaggcgcacgaggggccgtcgtcgggcaccgcgcatgagccttccgccgcgccggcgcgggtcgaagcggagcaagggacgtcgctggtggtggaggcagaccaggccgctcaggggaggctgcctccgtcgtcgagcaaggcgctggttttccccgcgcggccggggtacggcacgctcggccggaggtgccgcgtgcgcgccaaccatttcttcgttcaggtggcggacaaggagatctaccactacgacgtcgtgattagtccagaatcgcagtcaaggaaaagaaatcgttggattcttaacgaactcgttaaattgcacaagaattacttgaatgggcgactgcctgtttatgatggtagaaagggccttttcactgctggtccgctaccgttcaaaaccaaagaatttgttctggaactaaccaatcctgagagagcaaaccagggggcgaaagagtacagcgtgaccataaaagatgctgccaaattagatctttacagccttaggcagttcttggctggtaggcagagggaactgccacaggatactgtccaagccctcgatattgctatgcgagaatgcccaactgaaaagtatgtatccatctcaaggtcatttttctctcagtcatttggacatggtggtgatattggcagtggtgtggaatgctggagggggtactaccaaagtctacgtgctacacaaatgggattgtctttaaatattgatatttcagcaactgcattttacaaggctcaaccgattttggagtttgcattggagtacctcaacatacgtgacacctcaaggcgtttgtctgaccaggatcgcttaaaactgaagaaagtcctcaaaggagtacgtgttgtggcaacacatcgtcgtgatatagccatacattacaagattactgggataacctcacttcccttgaatagtttaactttaatcaagatggggcaagtgtttcagttgtccaatactttaaacaccaatataattacagtttgaaacacattcactggccatgccttcaatctggcaatgatagtaggccgacttatttaccaatggaggtttgcagtatacttggcggtcaacgctattctaggaagctaaatgagtaccaagtcacaagcatcctgaagaaggcatgtgagcgaccacctcaaagggagggcagcattttagaggtagttaataggaacgactatggtaatgatcattgtgccaaagaatttggtattaaggtgacaaatgaacttgccttggttgatgcacgggtgctgccagctccgacgcttaagtaccatgactctggacgagaaaaggtgtgtagtccttccgttggtcagtggaacatgaacaacaagagattgatcgatggagtatccattcagtattgggcttgtgtgacttttgcttctcggttgcatccaaatgatgtccgcatgttttgcaacaacttggttggggcgtgcaatgatatgggcatgcaaataaatgggagaccttgtgttgatgttgggcaagcacgcccagataacttagaagctgcactcagaaatactcatagacaatctgcacaaatgcttgcccaacaaggcgtgactagacagcttgatttactaattgttgtattaccagatgcaaatgcaagtgtcttttatggtaggataaagcgtctttgtgaaactgaacttggtttagtaactcaatgttgtcaaccaaagaatgtttttaaaggtggccgacaatatctccaaaacctggctcttaaaattaatgttaaggttggtggccgtaatacagttctcgaagatgctttaaataggagaatacatttgttaacagatttacctacaattatctttggagctgatgttacccacccagctccaggggaagatgcatccccgtctattgcagcggttgttgcatcaatggattggccacaagttgcaaagtacaggtgcttggtgtcttctcaaggtcatagggaagagatcataactgatcttttcacacaagtgaaggatccacaaaagggacttattaacggtggaatgatcaggcatgccgaacatcttagggaactactcgtgtcattctataaggcaaacgggagccgcaaaccaagcaggataattttctatcgagatggtgtcagtgaggggcagtttagccaggtcttgctttatgaagtggatgcaattcgaaaggcgtgtgccagcttggaagagggctaccttcctccaattacattcattgtggtgcaaaagcgccatcacacacggcttttccctgaagatcatcatgcacacggacagatggatcgaagtggaaacattttgccaggaactgttgttgacacgaagatatgccatccaagtgaattcgacttctacctttgtagccactctggcatacagggaacgagccggccagcacactaccatgttctgtttgacgaaaacaaattcactgccgatgcactgcaaacgttgacctacaaactgtgctacacgtatgcgcgatgcactcgatcagtctctatagttcccccggcgtactacgcacacctggcggccttccgtgcgcgccactacatggacgatgacctctccgaccaggggtcgtcttcagtggcgagttctcgcatgaaagatggcgctgttccggtgaagcagctgccgaaagtgatggagagcgtcaaacagttcatgttctactgctgaaggtggcctttgcaggaaggaccttcatcgacacttttgttgccatgaaatgaaacgagtaattctgggttggtgtaattatggtgaagtaaccctgaagggtgggccgcacgacctccaaatcatattttgggtctggcgagtcttctatccaaaactcgtcagaaaacgccttttatttttggtggacttcgtataagtccaaggcattgcctgtgattttggggtttcttttaggttgcaaccttgttttgtttttgaaattttctgctttgaattgatgcattatatatgaagaaatgagcctctcacgctagctccagcaagtgacccaagtatgac

SEQ ID NO: 19671 - DNA, 1124 bp, Zea Mays
tccattactcattcttttttatcctatggtcttgttctgcacaaagtcctttcgtttgttcctggtgcaaggcaaaggggtccccagcagcagctacagagaatgcccttgcatccaccaacaacgcctcccagagaagatctccaaataccccggttattgggtggcctccagttcgtgccttcagaagaaatctggccacctctagcagagcatcccttgaacatcagaatgggaagaaggaagacaaacctgaacagaccacaaaaagagctccatttgtaaagatcaacatggacggcatccctattggtagaaaaatcgatctgagtgccctcggtagttacgatgagctgtctctgtctgtcgacaagctattccgggggcttcttgcagcacaacaagaccctctggctgccggcgcaaaggagtgttcacaggaagaggtggcgatatcgggtttactagatggaactggggagtacactctggtttatgaggattatgaaggcgatagggtgctggttggcgatgtcccctgggggatgtttgtttcttcggtgaagaggctgcgcgttctgaagacatctgacctctcttcatctctaacagcacctcctggccagaagaggacggtaactgagtgtccagtgtttacctcttagacacttccttgcagtgatgttggtgtgctgtgaagaagaaaacgtcttctgagcttgtatcatctttcttcgtggtttcttcctcttcttttccctactttctcttggaagggatcatcaaagaaccgaaccgaccttttgggttttcctgctcttgtttattttgtttctctttccgggaagcgatgtgaccttttgggttgtatgtaaatgttcagacgaaccagctctatgtttatgcagcctatcctgtctgttgccttttacacaccgaggacatgtactgtttgttgtggtcatgatggctgaaatcgacgatttttttcccgtcaacatgcatgaacaattctggtcatgttatccgtttggtgggggtttgcagcggggatcttgaagttctggagcagagtagtatgccatatttcatatttgttagaactgtttcatatatactttgga

SEQ ID NO: 19672 - DNA, 899 bp, Zea Mays
cgaggggcaaaggccaaagcgaactgaaccgatccgcggttgtgcccgtgccgcgcgccagcgccacgcttcctacaatcctactgtagtttaatccgcttgcacggaggagcaacgccgagcaatggcgctcgcagccccttcttccctccgcctcctcccgaccacgccatcgcaggcgccatctccgccctgtgcctcccgaccacgccatctgcgggagctccgtctctgccagagactcgccaccgccgccgccgccgccgccgccgccgcggccgcggccacggctccactcgcttcctcgcccaccacctccgcggacacggagcggaggaagcacgaactgctgcgcgcggttcaggaaacgcggcgcggattcgcagcggggcccgaccaacgcgctgccatcgaggaggccgtcgtggccgtggaggagcgtggtgcggggaagggaacgccgatagatctcgcggcgctcgatggcacctggaggctgtgttacacatcggcatcagacgtgcttgtgctgttcgaggcggccgagaggcttccactcctgcaggtgggccaaatataccagaaatttgagtgcaaagatcgatcagatggtggaactgtgaggaatgttgtaaggtggagcatcgagaacttgctggaggagcaagaaggtgcaacactgatggtctctgcgaagtttgttgtcctgtctaaacggaatatctttcttcaatttgaggaggtcgctgttgaaaatatcaagatcagcgagcaactgcagacactaatagctcctgctatacttcctcggtcatttttgagccttcagcacgacggacacgaaaatcagccaacttctctagaaacttagcaaagcagttctcagaccgatgagtggt

SEQ ID NO: 19673 - DNA, 2727 bp, Zea Mays
cccacccggcgcatgcagatggctccaacccttttttctagtggcggacctgacctgatcgcctcgtggtttgtcattgcaaggtgcaagcaaacttgaaaaaaaaaacacacgtcctgctccgtccgaatcgctactccgccgcgcttctcatcaccgtcaagagatagtcagacagttccagccccctttccacacgcacactcctctcccttcctctcctccgcttccatccctgggctgtgcgctactactccccctgctggccgctgctctgctctcacgcatgttttcacatccaagcgcctgcccctcgccctcgccgccacagtggtaacccgatccatgccgggcggcggccgctgacttgctgctgttggcttcaacggccgcaggcaaagttactgctggtagcgctagcgcggcgcggcggcggcggcgtaggaggaggggtcggcggcggagatgaggatgaagacgctggcgtgctgccggcggcggcctcaagacttcagcatcgatatggaccaagagcccgacagggtggtgacatataatggcctcgagacctgcattatcaacagttccacctatgacgatgacagtggcatcagtgcaacaacaggcggagatggctgtatcaccactgattcccttgatgatgaagtctctagttgctctagtaaagatgcttctggttcttccttcacttcacacagtcttagcaagcaggaggagcattcactagatgagttgggtacacccatggcaattcatctactccctttcaaagggaagaaaacaatcacatataccttgagtgcttcagatattgaaaacatgaaggaaaaatttgcaaaactattgcttggtgatgatacttcaggaggagctaggggcgtttgtgtggctctggccttgtctaatggcataatcaatctctctgcaactgtctttggagaactctggaagctggaaccactgtgcgaagataaaaagatcaggtggagaaaagaaatggactggttgctgtctcctacaacttatatggttgagctggttccaacaaagcaaagcggagcagatggatgtacatttgagaatcaaagttatgaagggcaggcctggtgtagcggtgagacctgtctcactgagtcggatttgaaatagtttctcagcatttgtggagggaaggcttgtctcgatttatctcgagacctcattcatgtgggagcctctggctctttattcagaatctaacttggttatttttcaactgaaccatgcagattatgactccaaaggcccgctcagatgtccatgtgaaccttcctgcccttcagaagcttgacatgatgctcattgaagtaatggactcaatgatagatacagaattctggtatgaggagagtggcagcagagctgatggtcgggggaaaattacaggtccaaggaagagtaaaaagtggtggctcccgtctcctcgtgtccctgagcaagggctatctcaattccagcggaaaaggcttgtttttcaggctaagcttgttcaccagatcctcaaagccgcaaaatccatcaacgaacaagtcctgtcccatatgcctattccggccgctgtcatggatgcccttccgaagtctgggagggctagcttgggtgaagatttgtatcaggctataaccacagattatattcctgtagaggaaatatttgtttcgctcagtttgaaaaccgagcatagtgtgctcgagactattaaccggttggagggcgccgtgtttgcatggaaccaaagaattctggaggaaagaagcaagaggtccccaggacgccattcctggagcttcatgaaggatagctcgtcggaagttgacaagatgtccgcatgcatcgaaagggttgacgctctcgtgcagcttctgaaatccagatatcccaacctgcccccgacttttatagatgttttaaaggtccaatacaacgtggacgtgggccatgcaatcgtggaggcctacgctagggttcttgttggggtagcgttcagcatattgtcgcgcgtggcggagatactgctggaggatgacctgatcaagaagccgaacacccccatgaccacgctgaagttcgacctctcctctgacgtgtacttggccggcatcaccgagacgccaccgggacacatccggcggtccctgatggaccagatcagcatggtggacgggcgctacgatgccgttgttggcaagaagaaagaagtgaagcagctgaggtggtgagggcagtcagcagctgttgtgtgaatcttttgccgatgtacagggtgatgcggggcccagtgtccgctccacaaggttacctttagcaaatagcgcgatgtaatgtatttttgcgacgagtttatagcgtactgtactgtaagatcagcattaggcgagtcctgcctgtcgaagtctccgggtgttgctgttgcgtctgaacgatctgacgatgctcttggtcagcctctgctgcttttcttgctggcaccttgatgatgatagcatgtcgatgacgagaccttgcttgagtgcttgacgggttcatgctgacgcgtcttccgttctcgaagcgcggtccgtgtttctggggcgtgtggccctgtggagttcgggcttcagagaatgaagggaccgtgcccattcaattcagagaagagaatgaatggaggggccgtgtcaactctga

SEQ ID NO: 19674 - DNA, 2368 bp, Zea Mays
cgcgagccactgcacccatccactcgtacgccgcggtgcgccgcagcccgcagcccgcagcccgcagcccgcagcccgcgactccaggcatccacaaaaaaccatctcccccgcggccccggcaccgcacgctcccgacccggcgagtcccactcccacctaagctgagcggccatggcgcggcacctcgcgccttcgtctggaagcctccaccgtctcctcgcgtcctgccactacccgcccacctcccaggcgccgcctccccgtccgctcctcctcccgaagacccgatcggcggctatgcagctcccgcgacgcgggcggcgcgacgtcgtcgccgctgcagctgcctccgcaccgtccccctcttctccgggtaccgaggtggcagtctggggtaaggtctccgccgtgctcttcgatatggatggcgttctctgcaacagcgaggagccctcgcgacaggccggcgtcgacgtcttcgctgagatgggagtcgaggtcgccgtggatgactttgtccccttcatgggcactggtgaggccaatttccttggaggtgtcgcaagagctaaaggagtgaaagatttcaatcctgaaagtgccaagaagagattttttgagatatatcttgacaagtacgcaaagccaaattctggcatcggattccctggggctctggagctcatcttggagtgcaaaaattctggtcttaaggttgccgttgcatccagtgccgacaggattaaggtggatgccaatctggctgctgctggtttgtccgtgtttctatttgatgctattgtttctgctgatgcgtttgaaaaattgaagcccgctccggatatattcctggcagcatcaaagagcttaggtgtcgacacaaatgagtgcattgtgatagaagacgcgcttgctggtgttcaagctgctaatgctgcagaaatgagatgtatcgctgtgacaactactctagaggaaatagcgttacgacaaggcagtccctcgttcatacgaaagaatattggagacatttcaattaacgacattttgtatggtggttctaatgctcgccacaatgaaggggcaggaagtactgagaatagtagttcggtagggaatgctttgtctgagagtctaaacggagcaactgctgctggacattctgacacaaaaggttttccaatctcaaaaaataaagggctgttgggttctcgacgcgaaatattgagatatggaagtctgggaatagccttgtcctgcctttttgttgcagtcagaaattggaaggcaatgcagttcgcatctcccaaaggcctactgaattttctcatgggtggaaatagttcagtttttgccagaaatgaaggagaatctctgtcatcaagagttcaacaaataaagaagtatctagctgagtttgaatctgggggttctgccacatatgttcctgagtttccaagaaagcttgactggttgaatacagccccacttcagtttggaagagtaatttagaactcatcttaggatttgaaaggaagagtggtgctgctggatttttggacatattgctgcattaactgcatgcatgttttgccagacctggattttgtagagaagaagtataaagaaaaacctttcactgttgttggtgtgcactctgccaaattcgataatgaaaaggaccttgaagctatacgtaatgctgttctgcgctacaacattactcacccggttgtaaatgatggtgacatgtacttgtggagagaactgggggtgaactcttggcctacatttgttcttattggacccaacggaaaggttctagcacagatatcaggtgaaggtcatagaaaggatctggatgaagtaattggtgcagcactggaattttatgaagagaagaaactattacaaaatgacccccttcccttggcattggaaaaagacaaggatagtcgtttactaacttcgcctctcaaatttcctgggaaacttgctgttgatgtgcaaaacaatcgattattcatatcagacagtaatcataatcgaattgtggtgaccaacttggaagggcagttcatataccaagttgggagttctgaggaaggattgcttgatggcccatttgatgctgccctatttaaccgccctcaaggtattgcttacaattcaaaaaggaatatcttatacgttgcagacactgagaaccacgctctgcgagaaattaattttgtggacgagactgtgagaacactagctggaaatgggacgaaaggatctgattacagaggaggaggacaaggaacaaaccagtggcatttgtggctgttagaggaacatgaaattttgttggaaactagctgca

SEQ ID NO: 19675 - DNA, 204 bp, Zea Mays
agactgcggttaaactagttgtatgtacatcattaggcaatcttgagttgctagacgatactatgtagtagttcctataattaagatctcatgcaagtttgtgccatcgagtgcagcaataagttgattgcatctgctagagactaaacatgtgtgcttgcatcttgttctcatgtgttggatcgattcagcctttgcctattt

SEQ ID NO: 19676 - DNA, 3085 bp, Zea Mays
taataggcaatctctggtagggtagaaacagtaccagatagggagggtcggcaacgatgactcggtaggcgtgcttcatcgccgccggcagctcctccggtcggttgtagtcgtagaaggtgaagtcgccgccgtactgcccgaaccgctcgtcgtactccagcagctgcgcgggcactccggggtccgtcttcttcaggtaggcgtagagcgtcgggcatgcgatgcaggccacggcaccggcggcggagcctgatccagaaggggagacaaggcggacgacctcctccacgagctcccgcgcgaactgtgaggagttcttgatacaaaagaataccctgaagcgtccgagatctccagatggtgacaacatgcttgctcttggaaattttgagggttcggtaaatgaggcagcaaagattttaggcgtcacagatacaaaaccttccttggacaattcaagtaggaaaaaacaaggccgtggaaggggtcgtgctggtacaggccgagggcgtggctcaagggctgctgatcaaacacgattgacttcaacttcctcagcagctgtaacaaatggccaactagataaattaaccaacaaggaaccccgatcgagtgttcaactgggccatgacgacagagctgctttacaggacgaattgtcaacattacgtggcaaagttgcatttttggaggaagacctttctaaatcgcatcaagaagcaacaaattaccatgaacttagtgataggttagcaaaggaattgaaggatctcaaagatcatgaccaacaaatgagattaaagcaaatgaaaatcctgtccgatctgctgatagctgtgtcaaaagcagagaggcaagaagcgagaatgagaataaggcaggaatctttcagacttggaaatgttgctgttatgagagctgggactatcatatctgaaacttgggaagacggtcaggcaataaaagatcttaatgctcacctgaaatctttgctggaaactaaggagactattgaaaggcatcgtaaatcacttaagaaaagacaatctgacaagggtgatggcagtgatgctgagactggcatgtctgaggaggacatcctcttacaagatgaaatatgtaaatctcggttaatgagtataaaacgggaggaagaacagtatatgagagagagagatcggtatgagttggaaaaggggaggcttatacgagagatgaagcgtctcagagatgaagatggctcacgctttaacaacttccaaattcttcaccatcgttatgctctcttaaatcttcttggaaagggagggtttagtgaggtttacagggcttttgatttggtggagtacaaatatgtggcatgcaagcttcatggattgaatgctcaatggagtgaggagaaaaaacagagctacatacggcatgcgattcgtgaatataacattcacaaaactttggttcatccaaacattgtcaggctatgggatatatttgagattgatcacaatacattctgcactgtcctagaatattgcagtggcaaggatcttgatgcagtccttaaagctacaccaattcttccagaaaaagaaggaaggatcataattgttcaaatatttcagggcctggtttatctaaacaagaggggccaaaagatcattcactatgatctaaagccgggcaatgttctctttgatgaggttggtgttgcaaaagttaccgactttggcctcagcaagatagtggagaatgatgttgggtctcaggggatggagctcacttctcagggagctggaacctattggtatcttcctccagaatgctttgacctgagcaaaacaccatttatttcatctaaggtggatgtttggtcagctggtgtaatgttttaccagatgctcttcggaaagcgtccttttggtcatgaccagacccaggagagaatacttcgggaagatacgattatcaatgcacggagagtggagttcccttcaaagccagctgtatcaaatgaggcaaaggatctgatacgccggtgcttgacatacaaccaatcagagagaccagatgtactaaccatagctcaagatccttatctctcatacgcaaagagatagccgctatgccggagaacactaaggcaagggtagctgatcatttatgagattatttatgtatggggatggataatcttgcgaaggagcaaagtgttccacaagctcaagaagaccacaaagggtgtaactgtatatgttgtaaattttagtctttcccatcgcagcaatgacctgaaatccagaagccatcagttcaacggacagcttctttgtagcgtagagaaagcaggcattggtttgaacggggcatgcgtaacgtgatggtttcttggctggtgggctgtgggcagtggtcctgttgatggttggtttttgtttgctcatactgtcggtaaggtctgccaaatcagaaaccaccggtgacaggcgagagctcacatgctcacctccgaaaaaaatctcggccttgcactggcaggatggactggattttgcgtattgccaaaacagatttaaggtagcatgcatcaatacaggttactttggataacctatagactcaccacagccacaagcacagaagctcttcgtacaatttcagagagtaccgatgtgccagatttctgctggtgccaatttgtttgtgatcgctgtcacccttgtacaacactgggatcgctcattgagcatacacaagttatgcaatttgcttttttattatagtcatctttagggcgtcgttttgttcggaacggattctttggaactttaatgttagttttatttgtgttaaaactgaacgtggaatagttccaggttatataatcccagctaacctaacttgcacttaggagatgtttggtttgagaaatcactctatctaaaataagttagtgtatcatgagttcattttctaaatttggtgggatgatctcattccatatactaagtaactaggaagaatgaggtgatgatatattaactcattttattttacaaaccaaaaaaaaatgaggagtaagaag

SEQ ID NO: 19677 - DNA, 1534 bp, Zea Mays
ctactataccttagtcacgctgtttcatgctatttgctcgagtcactgtagctggtgggttgagcatgatcctatggagattatagagactgttaaggtgtgtatgaaagaggcagttggcaaagccaaagatggtaaacacaatgtggttgctggtttgaaggccattgggatcacaaatcagagggaaaccactgttatgtggagtaaatccactggccgtccactgtataatgctattgtgtggatggatgctcgcacaagccctgtttgcaggagattggaaaatgagctgtcaggcggtaggacccacttcgtggagacatgcgggttgccaatcagtacctatttcagtgctctgaaattattatggttgatggaaaatgtggatgctgtcaaggatgcagtccggactggtgacgctttattcggcacgatcgacacctggttgatttggaaccttacaggaggtgttgctggtgggcagcatgtcacggattgctcaaatgcatctcgtacaatgcttatgaatctaaagacacttgactgggataagccaacacttgctgtgttaggagttcctgttgagattttgccaaagattatcagtaattcagagaaaatcggtgtggtcgccaaagagttcccgtttgcaggagttcccatctcggggtgtcttggagatcagcatgctgctatgcttgggcagctgtgccagaagggtgaagcgaaaagcacctatggaactggtgccttcatccttcttaacacaggggaagagcctacccaatcctcccatggccttcttagtaccattgcttacaagcttggtccagctgcacccactaactatgctcttgaagggtccattgcaattgcaggcgcagcagttcagtggctgagggacagccttggaatcattcagtcagcagctgagatcgaaaagttggctgaaacagtgccagattcagtgctcgagagtatgtgttttcaggtgaatgatgtcctcagctccatgcacaaggatgctggagaggcaggagaagtaaagagcgcagaaggagagttcttattgcgtgttgatggtggtgctactgttaataatcttctaatgcagatccaggctgatttattaggcagccctgttgtcagaccagctgacatagagaccacagccctcggagctgcatatgctgctgggttggctgcaggagtttggaccaaggagaaggtttttgcaggtttgcacaaggagaacacgacagtcttccgcccgaaactggatgaggcgcacaggaaaaagagggcggattcatggtacaaggcggtttcaagatcattcgatctggctgatctttctctgtaaatttatcctgccagcgctcctctatctggttttggaagctgcaaatgaataaattggtcttcgctgggactaatcttaactgcttgttatttatatataacatcacgatgtttataaaagtgagtacatgaatatcctcagattttcagcaggaagtgtttttctaga

SEQ ID NO: 19678 - DNA, 2772 bp, Zea Mays
atccgccatacgcccatcccatcccctctcctcactcagctctcctcgcccaaaatctccgccgtctgcagttccggttgcgagtccacacagctcatcacgcttccttcacaaatcgaacgcagccgccagccggatgtcgattgcggcggtcagatcctcgtccccgggcccgtcgccgaggccgtgctgcggcctcaggaggagcgctgattccagccccttcaggcccgccgtgtccccactcgattcgccgcagaggagctcctccgtctgcaagaacagcggccgcgcctcgccgcggacctggggcgcggagaaggagaacgacccgcgcgacgcggcgccggccgcgagcgcgaggacgcacaaggtgcgctccagcggcggcggcggcggcggcgccaaaagcttcatggcgcccactatctcggcctcctccaaggccgtcgcgccggctttcacgccaagaaagaaggtattcggcgagcgcaacaacgatgccgtcccttcgtcgccagtggaccttgcgcacagcagtaagcccagggctgcgcatccgctgctgccagaagaggctctgggcgtgccgaggcgtctgcggctctcactggacggcgcctctgcccttccttccgcggctgggcctgtcgtttcgcgcggcgccccgtcgttcggaggtgacgaggccgccgtgatggttgagaatcccgccgtctccgagagccaccacgacgtggctttggcggacgcggaggtcgtggcagccccgtacgatcccaagacgaactacctctccccgaggcctcggtacctccgctaccagcccaaccgccgcctcgagatttaccgtcatggcggcgggagcgtgcgggggctcgaggacatgttcgcttcccagagcagcagcgaggaggtcgacactgcgaccaccacggaggaggaagtatccggagaagggcagccagatgactcctcggaggaggagacctcggctatggcccctccaccggaggccagagctcagtctactgctccggccctggatcgcctcctgctgccgcagcccgcgctggattcgccactagctcgggtcctgacaccggagccgaaggagtctccgcgagctggtggcgtcttgatacctgagcgggaacgtgcagtgagccccgcgcgagctcgtcccaagaagaagaggtcaccagtgaggttcctgcttgcccctcttgctctggttctgttgatggctgcagcgtttgtctgtgttccaccgccgccgggttatccggtcatgctgaacacctccatgtcaaaggtgtcagtcttactttcagttcaagaattgcatcctgtggagttggctgctaggctgaagcaatggtctagcagttcgttggacttcgtcacgtcctactgggaggctattgcatcttaccaagaacgacctgtccttggtccgcacttggctgccaatgttactgctgctgctgcagaagtagatgcagattacgctgttggtttctactacagtgctgctcagacaagcccaacaagtttggagttggggactcatgatgttgtttcagaaaatgatactgagatgattgctgggcctgatgtggaggatccggtaacctgtgatgaccctgatgcagaacctattgatgatattgaaatggaacaggaagatttatctgaggtaccaagtgccatggaggaggtgaatgttgatgcagtagtagaggagttcgatgatgagatggccgaggaagtgtctggtggtagtagtggagaagagacggcagccttcattcagaattcagatattccttctcaatccactcccgagcctgaacaggcaaagggcattgacgaggtatccttgcagcaagatgttcagactgaggattctgaggatcatgctgatggcaaggaggatcagccagcgcagcatggtcaaaagttgggatcagatatgtggtcaagttacttggacaaagtatcggatcctgctgccattggtgctgctcttgctgccattattgttgcagctgttgtggcattcctttacatgaggcagaagcaaactcgtgttgcctccaatgaaccagctgagcaggtggagcaagttgagcaggttgaacgagttgagcaggttgaacaagttgatcaggttgaaactctttctgactcaggaagtagccaggggcatgttgttgccaagggttcactgtttcacagtcctggcgtagaagcctctggcccctcacagtatagcagcagcttgtcatctgggcttggcaggaggaggaataccaagggtgaaggccttgagccagtagtgtcgaggagagactcgacagctcaatccacatcatcttatggtagtttcaccacataccagaagatccctgccaagaaagaggacgaagcgatgaccccagtccggcgctccagcaggctgaggaatgtgaaaactcctgaatcttaagattggcgcaagctggcatctgaactgccttttagattattagataattgctattgccactttgtttgctgcttagtgaagcatcatgtgtctaggcaatcaacaggtttgcgtgatgtttgataaacagctctctgctgtttttacttcaaaagatgattaggacttgtgtgttcagtataactgcttaagatttaattgatgttgacttgctcgttgtactgctctctgtttgagatgaatcctctgttttagatgaattctctggattgcatttctcc

SEQ ID NO: 19679 - DNA, 1487 bp, Zea Mays
ccatctcgaggcggccagacaaggcataaatcaatccctggatcaaaagcaaacagcaagctagcaaaaggatatgatccagcagctgagcatcacgccaagctttgcaggcagccttcttcatatcctcgttctccatcctctgctcccaaaaggagctagcgctagctaggaaacacacagagagacgaaataagcagcgaggcaatgggcaactgcttcaccaggaagtacgacgagcacgagcacgagcacgagataccaatcaccacggacccgccgcggcggacgtcgatgccggtgtaccggccgccccggccccgcgatgacaagacgcgggaggtgccgtgttgcgccggaactacggcagggagatcgacgtctggagtgctggcgtgatcctatacatccttctatgcgggtcgccgcctttctgggaagaaacgcagaaaggcatatttgacgcaatattggccgacgagctcgatctggtctcctccccgtggccctccatatctgaaagcgcgaaggatctcattagaaaaatgctgaacagggaccctcagaggcgcattacggcttcacaggccctagaacatccatggctcaaaggtggtgcacctgacaggcctatcgacagcgcggtcctgtcaagaatgaagcagttcaaggcgatgaacaagctaaagcaacttgcactgaaggtaatcgcagagaacctaacagaggatgagatcaaggggctgaagcagatgttcaacaacatggatacagacaggagcggcacgatcacggtcgaggaactcaaggacgggctggcgaagctcgggtccaagattagcgaagcggaggttcagaagcttatggaagcagtaagactgcttgctccgttccacttccacacccaggcttggagtactacttcactagtcatgcatgcttcggtgcaggttgacgtggacaagagtggcagcattgactacaccgagttcctcactgccatgatgaacaggcataaactggagaaggaggaggatttgttccttgcttttcaacacttcgacaaagacgatagcgggtacataacaagagacgaactggaacaagccatggcggagtatggggtgggtgatgaagcaagcattaaggaagtgctggacgaagttgataaagacaaggatgggagaatcgactacgaagagtttgtagaaatgatgaggaagggaagttatacctgaggaagctctgttctcatggtgggagaggttgtgtatatatgtttcagcaaatgtgtcaagtacaagcaacgaagcaagtttaacttagaacaagttgcttctgcagctatggtccgaggcaagcatgtacagctatttatttattgaccgaatatgcaacgagagagaaaatgtccagtttacttgaaagaaaagttcagagttcgtgcaatcgtacatatgccagtaattttcgcaagtggtacattt

SEQ ID NO: 19680 - DNA, 1164 bp, Zea Mays
tttgcatcccggatgcaaataatttttttccgccaaagccaggattcctctgctcttcctgtttagggtttccccctctctctgctcctgccggatgcgatggcgattccgccgcggactccttccccgccgccatcgtggtcgcgctctgtaaccgagaccgttcgggggtcccaccagttcaccgtacggggctactccctcgccaagggcatgggccccggccgctacctcgccagcgacgtcttcgccgtcggaggataccactgggccgtctacctctaccccgacggcaagaacgccgaggacaactccaactacgtctccgttttcgtcgccctcgcttccgacggcatcgacgtccgagccctcttcgagctcaccctcctcgaccagtccggccgcggctgccacaaggttcactcgcactttgaccgctcgctcaagttcggcccatacccccctcaagtacaggggatccatgtggggttacaagcgcttctacaaaagaacactcttggaagaatctgatttcttaaagaatgattgcctagtgatgaactgcacagtaggtgttgtcaagaaccgtatagaaacaccaaaggacatccagattcatgttccacgatcagacatgggccgctgcttcaaggagctcctcagccgctgcattggatgtgacataacattcgaagtgcgagatgagaaagtcagggcacacaagtggattcttgctgctcgctccccagtatttaaagcccagttctttggtcctattggaaagcctgacctgcacacggttgttgtggaggatgtggaacctgttgtcttcaaggcaatggtgaacttcatttacgctgatgaactccccagcattcctgagctagctgggtctgcctcaacgtggacatcaacagtagtagtacagcatttgttggcagcagctgatagatatggactggtccgtctgcgtatcctgtgtgaatcaaagctctgtgatgaactgactcctgaaactgtcgcaacaactttagcccttgctgaacagcaccattgtgctgagctgaagtctgcatgtctaaagttcattgctttgcgaggaaatttgggagggaaggagacaaacccaaagggccttacaaggcagagatcctgccaaaagaa

SEQ ID NO: 19681 - DNA, 894 bp, Zea Mays
tttggaagattttacaccttcctcgagacaactcttgtcacactctctttattgcctcacttcatagccttcttcagtgatatcgagatcccaggaagtcctgcagcacttgcaaccacatttctcacctttgtgttgaatctggccttttccttgagcgtttttggttttatgattatgcatatttcacttgtttcggctaatacgacgacaattgaggcatatgagaagaagacaactccacattggatatatgatcttggccggaagaggaattttgctcaggtttttggaaatgacagaaaatattggttcatccctgcatattcagaagaggatctgagaagaattccagctctacagggtcttgattatcctgtcagtgagaccagattttgatggccaggaattgtaatggggcaattctaacagtgtcctcgtcagatacctcagtgttggacatctactcatacaactgtcagcattgctgattgccctatgcaaggcatctagtgaaatgtgcacaagatgattgtagtaatagtaaccatgagttattcatctgttgcacttcatgtatgtgacgaaggggaagtcctcctacctttgccagaggaagtttgttgtgatgtaaattagttttagcgcctggttagatggaccaaatcttggcgatgcgccaggattttggacttaattctttatccatccacgtgaattgggcaggatttcatccatgcaaactgggcattagtgtggtttgaaacagtcttgtacttcagtttagttatatcatgccatgcaatacatttaccatttgagatatttgtgccgctgttatacactatcaatagtaaatggataagcgctgcgtaattaattcgacattgtaca

SEQ ID NO: 19682 - DNA, 1925 bp, Zea Mays
gaaacacatcattactttaagatgggccggctcaggttagtgggcatcaacccatttgcctgcactagtagacagatttctcagaagccgcggccgtcacgcgtcagacccacgcagcgcaccttctcttctccgccgcgtcgccgccgaacatcagcatcggatcgatggagggctgggacaaggggaccaagagcacggtgggcgagatcccgctgctgtcgacgcgcgcgggtccgcgggacggcgaggcgtggcggcagaggctcaaggaggagtaccgcgcgctcatcgcctacacgtcggtgaacaaggccaaggacaacgactggttccgcatcgccgccgccaacccggagggaacccgctgggaggggacctgctggtcgcccccgagatcgagctccccaccctcgacggcaagactcacaagatgtaccgcggtgggaagatctgcctcaccgtgcacttcaagccgctgtgggccaagaactgcccgaggttcggcctggcgcacgcgctgtgcctcggcctcgcgccgtggctcgcggcggaagtcccgattctggtcgactcgggcatggtgaagcacaaggatgacgaggcggctccggctgaggcatctgcctctgctgctcctccttcgtagttgccacttgcaacaactgagtgtccggtgagctaagggcgatatcggaaatcaactcggcggtgaaccgtgaaccgccaaataagagagatacctgcaaatctaaacatcatgtgaaacatgttccatacctgctgattgctgtctgcgtactaatttctatccaacttctaaattgtgttcgcagatttttatggtacacttgactaataccataaggtaacataattgcttaataaaactagtgcagattttctgattggtcggttatagaatttgttcatcgattactagcgtgtttggttcaaggaatgaggtagtccatcaccttttcatttctcactttcttatttggtttgtggaatggaatgagttattccatcaccatttcattcctcataggctaataattagtaataatatgaggaatgagttcgttccactaaatttgtggaatggactcatgatgcaccacatcatctagaatggattgattgttcaaaccaaacacccctacaagtttgtgtgcaatttccctaaaaacttctgtttttgatttgacacagtgcttagctgtctttgagattttgtcatgccccaaaatttccaattttgggatgtaaatagaaaacgcttaatataaacaatggttttgatccttgttttaaaggcgatgcctaggcgtcgcctaggcgtccaggtgcccgaaagatccaaggcgtccccgtcgcctaggtaagaagcagcaagagggcatagggcagaggggaaaggaaaggggcggcactgtttcagggtggcagcgccgaatcgggagcggcggaggccaaatccagggcggcagagaacaaatccagggaggcggaggctgaatcggcggcggcagcgtccaaatcgtcggcggcggcggcgaatctgaggcggcgacggcgaatctaaggcggcggcggcgaatctgaggcggcgacggcgaatctaaggcggcggcggctcaatcgggggcagcggcagctgaatggtgggggagagaggcaacctagggttgccagaggaaggattatatgggctggctggtgggctgggtctcctaccccttccttctccttttttcttttttttttctttttcttcctcctccatggggctgttttgctgattctcaggttgataaggcgtcgccttgctcgccttaggcgtcgcctaggcgtctaggcggtggtccggcgccttatctcgccttaccgccttaagaaccatggtttgatatttatataaa

SEQ ID NO: 19683 - DNA, 839 bp, Zea Mays
  misc_feature (1)..(2): n is a, c, g, or t
nntgtgttgtgtagcagcttaacatgatccggcacagttcgtaccgactccagcaactagtaaattccatcatttgcatctggtgctcttcgttgctaaatttttccgaactcgttctcaagctgtaactccccagtttacattatcttatcaggtttaggctgtacctacatccgcggaatggtttgtctgtttcctgtgcatgccttaccattgcatgaaaggaggcaagctgaggctaaccgcatcagggagaagtaccccgatagaattcctgtcattgttgagaaggccgagaggagtgacatcccagacatcgacaagaaaaagtaccttgtccccgccgacctcacagtgggacagtttgtgtacgtggtgcggaagcgcatcaagctcagcgccgagaaggcgatcttcatcttcgtgaagaacaccctcccaccaacagctgccctgatgtctgccatctacgaggagaacaaggacgaggacgggttcctctacatgacctacagcggcgagaacacctttgggctgctatgagtggcgccgcgccgccgtggatcgacgtcggacaatgcccctcctcctgtaaatacttaaaaaaaaaataggcgtctcaagaatccgtgtacataataatctggcatgtcttgcatcaaaagcaactcgttgcgtccactgtctgttgaaactattgaagcgtactaaacatttaagcaactcgttgcgtccactgtcagctctgggttgcttcagaagttctgtcacctgctgcgtcctccgtgagcttgtcgatgtggcaaagtaacacagggtgcctgtggtcattccacccg

SEQ ID NO: 19684 - DNA, 649 bp, Zea Mays
gcaggataaactagggatataagctgttggagagctttgagaaatctttccctaaattaaaattcccaccgttgccggagaggggagacttcgatatgaaggaagtccttgagtctacgtattttttcaactagcacaatcaatgttaacagttgcattatacacgctgctgcccggacatatctgagttctgagtgtagatctaccaactcgaatgatgaaagctaggtcatacatgagcataacccgaagagtggctttgcagaagttatcagaagctaagttggtactctgagcattcacaaatgcatcggcatcatttatcgcgttgaagttggcaatgaggtttgctaaataaaagtgggaaccatatcaaagttaaacgagaatccctgtaaatgtaattatgtaatttttttttgtctttagtgtttttattttccttgatcttggtactgtcgagagaaattcggctgaccggtagtttgtcggctggtgctgagtagagattatttcatactttgtagtttaacaatataatttagtaataaagtgatatactagtatttttctcgttgttttagctctgcataaagtttgaaagcttttttttttctcttcaagttaaaagaatggaaactacctgtaa

SEQ ID NO: 19685 - DNA, 1573 bp, Zea Mays
tggatatctgaaccttggtttggggcttggacttgacataggaaacacttcgtactattggactctgcgactctagcatcaaattcaccatctgtgaaggagaagatggcactgaatcatcaaatggagatgtgttgatctttccagatatgatcagatacaaagggctgacccattttgacgtcgacaactttgttgaagaagtgtttgtgaaggatattgactggcttcctggatctcctgagcctataagtggttcctatgttttcgtttgctcccatcaaagaagggatataaggtgtggtatttgtggacctgctttgattaaaaggttcaaggaagagataaatggactgggacttgatggtcaggtggctgtcagtgcatgctcacacgtgggaggtcataagtatgcaggaaatgtcatcattttcagttctgatgccaagggagaagtggttggtcattggtatggttatgttgtccccgacgatgtgcctgttttgctgcataaacatattggacaaggagaagttgtggaccgtctatggagggggcagatgggtttatctgaggagcagcagaagcaagctctcgagcttcggagcatgacaaatggtggcaaagaatcccttgaagaaaccgaaacagacggtgcttcttgtaaccctgcagcaactggtggatgctgccaaggcaatggtggcttcactcgagctttggagcagcagaagcaagctctcgagcttcggagcatgacaaatggtggcaaagaatcccttgaagaaaccgaaacagacggtgcttcttgtaaccctgcagcaactggtggatgctgccaaggcaatggtagcttcacttgctgccatcctgacctgccaaaggaaaaacgggacaagagcatcgcaattgagcagaaccctaagagctgtgaggagaatggcaaggaggggggtggtgctggcagcaagaaggggaattcaaagacttgcccgatgcccacctggtttgagacctgggagagagctgacacctatgctgctcttgctgttgtcgcagctgccgcagctgtgtttatctctttcagaatctacaagaacctcaactgaagagcttgagagatctttgaagaggtgcccgaaacaagtctaggtgaatcagcgtactggtggtaaaacaatccgggacgagaataatctttacctgtgtatagtaatgtgaggtttagaacctcaaagtagcttatctggagatggtgataaaaaggtgttgtggctacggtgttttcgcgtgtgaacgtccactgctatcgaagtttggatgccttagctgctggtaatcgtaaggcatcaagtaagcaacattcactgtgatgatgttgtcttttgtttgggttttggatgttctggagattctaggttttgaaacaatatcaggttgattgaaaaacataaacatctggaaaaggttaacgcctttcttgtgacatttgaaaatttgaacttcctcgtttatctgcaacctgcgcgcgcatgtttctatggtgaacccggcgagacgccaatggacttcg

SEQ ID NO: 19686 - DNA, 545 bp, Zea Mays
gttggacaaagagaagaaaatcctctccattcgggataggggtattggaacaggagctgctcgagtctcttgtcgaagctgatacggcaggaaagagctaaaaagatggaagaaaagaaagtgtatctgcaactatacgaagcaatggaggcgttggtcaagatcaatctggagaccaacaagatcatggacttcatcaagtttgacgtcggcaacgtggtcatggtgactggcgggaggaacaccggacgtgtaggagtcatcaagaacagggagaagcacaagggcagctttgagaccatccacgtgctgcttggagctttttgctatgtctagttttctcctatttgttgtacatgaaaacatagaatagaattcaaatttggtggtcgcaaaagtgtggagactttaattcatacaaagttaggcttaacattagtgcaaacagttgtattttagtttagatttagagtacacttatgtatgcattgtttgacaatgtttatttatgatatattgaatggtacttaattatattatattaa

SEQ ID NO: 19687 - DNA, 1888 bp, Zea Mays
ctcccaatgagatgccatatgacaccccttgtgagatgcaagaggacgttcggaacttcattgatagttctttgaagcatggttatcatctttccatcttccgtaaagaaaggattggaggagattcacatggaatctcatactggtatgaagatgacccaatccttgggcatcggttgtatcgtgaaattagacgagtggagcatgcgaaggactcaacaaaaaaatctaaaggaaagggagtttctactgttccggttatctcctataactgggaggctgtagcatccaactttgatgagtttaaagtagctgcagagaaactcttttcaagcaggaacaggacagaagtctctcttggcaagaagctgaagttcacttatcttccagagattgaaaagattcacaagaagaaggagaagttgctaaaaaagcaacaaagagaagccatcctccttgacagctgcttgacagtgaatggattgacatctggccgctctcgacgtgaaagaaaacatgtgacttatacttttgatgattatgagcgttcaataaatgaagccataaaaacaataaggaaaaatgagaatgctgttgaggttggcccctccccattatgcaaaggattttatggagaaactccagagaagttgtattacaaagcaaaaacagatgaaggaaaggctgaaactctccatcgcaggcagagaaaaagatcccaaaggtacacaaaggactatgttgaggccatatcagatattgacctagattttgacagcgatgatgatatcatgggtgaagcagtctatgatgaggaatatcttagaagaaggaaacgatacaaggcaagcctttctgaaaatgatgatgagtttcagttggatcaagtcgccaatgatggtgatgatgaagtgggtacttctttgaatgttaatgaagacacaaaagatctccaatggtacaaaagatttccacttctcacccctcaagggaccaagttgaaatctattgatgaaatccaaactggcatccgacgcagtaagcgctccacccgttcccgtattaactatcgacagcttgatacttttggcgcaaatacaaaatatggaaagtcagagaaatgcaatgcatcagatccggatgctagttctgatgcactaaatgatacggagctctcaacaagtcaagatcgagaggaagaagacggagtaaacaaagcacaacagcagtacacagagaaaccaatcgttcctgtcaaggagagtagaagtgtccggagaaaattcctcgtcctaaatgagcttgtgcctatagctggttttgatgatgcttcagtcttagtgaaagataagcacgtgaataacaacggaggaaaatgttctgcagcacattagggcgttggggaagctctttttttttggtcacatgggtagcaaatactgggtagaactgctcgcttaagcatggaccaacgagaatccaatgagatggtgatgcaacattggtcttgtttgggcagactgctgcttactacttccagtgtcatgccagcgaggagatgagatggtccatgggtgctgtgtggctgaattcccagcccataaagccaagtccctctctgatacttggaggtcttgctgagatgtgcactaggcacaccgcgtcgattggcgctgtacaattgtcacagctgtacgtgtatctcctccatgtatatacagtgattgggagcaatagcgtcttctggtttcaggatgcctatgggtagttgtctcttcttccttttcccctcttctgagcatctgaagttcggcaataaactcgattcaactgtggcatttacttatttctgtatgcggtaattaatatcgctcgatcttacactact

SEQ ID NO: 19688 - DNA, 1582 bp, Zea Mays
ggaattgtcgccacttgttgggaggcacttgaggcccatgatggggcgagcaaagggaagtacaccattgggcttgggcaagattgcatggccttttgcagcgaggtggaggatgtcatctcaatgagtttgacggttgtcaattctctgctgaaaaaatacaagattgatcccaagttaatcggtcgcttggaggttggaagtgaaacagttatagacaaaagtaaatccatcaaaacttggctgatgcagatctttgaggaaagtggtaacagtgacattgaaggtgttgactccagcaatgcatgttatggcgggacagcagccctactgaattgtgtgaattgggtcgaaagtaattcctgggatggccgttatggtcttgtcgtttgcacggatagcgcggtttatgccgaagggccagctcgtccaacaggaggtgctgctgctatagcaatgctcattggtcctaatgctccaatttccttcgagagcaaatatagagcttctcacatggctcatgtctatgatttctacaaacctgatcttgcaagtgaatatccggttgttgatggtaaactatcccaaacatgctacctaatggctctagactcatgctacagacagttctgcaacaagtatgagaagattgcgggtaaacaattctcaatttgtgatgcagaatattttgtgttccattctccatacaacaagctcgtgcagaagagtttcgctcgactttattacaatgactttttgcgcaactgcagctctgttgatgatgatgctaaagagaagctccagtctttttcaaatttgactggtgaagagagctaccagagtcgcgacttggaaaaggcctcacaacaggtcgcgaagcacctccatgacatcaaagttcagccatcgactctgcttccgaaacaaattgaatgggcaaagaattgtgatgttctcttacggcagtggtttgacatccactatgttttcattgaggctaaacaatggccagcatcccttcagcctatcaaacattgcttcagttcttgatgtcaccgagaagcttcagtcaagacatgagactttgcctgagaaattcgttgagacactgaagctgatggaacaccgatacggcgcaaaggacttcgagacgagcagagacacgagcctactgcagccgggcacattctacctcaccaaggtcgactccatgtaccggaggttctattcccagaagctgtccgaggaaacaggcggcgggaaaaccaagtgctgcaacggcctcgcaaatggccactagtggtcgcccagcactgttgctcatcattctcagtattttgataatgctcatggttagcgtttagtctagcgtgtttctgaaataatataattgttctttgaagctgtcccaccccacctagatcagctagttttttattttaatattttattcttctgaacattgaaattcatcagtctctacattgtttctctttgtttcttcttttagtactctcttcgttccaaattctaaattacgtacataatgtttgctatgtctaatagtaaaaaaaaagtcaac

SEQ ID NO: 19689 - DNA, 3446 bp, Zea Mays
gtccgctcggcccgtcgccgcgctcgctcctctggtcggtggacggcaccgtgccgagtgccgagtgccgaccggtcggaacggaagaaaccatccgctcatccccgttttctcttgtcccgttcaccacgcctgctctctcccttgtcatcttctggcgacgactgggcgactgccgacggccgctgctgccgccggccgctgctgccgccctagaccaggtggccagctcttgtccgagaccgttgctggcgacgagaatccaatagcttaacccctatgcaccaagggaagtcggatcctcattgctggtacaatgagcaggccgaatacccgcaacaagaacaagaggcctcgcgctgatgaatccaatagcccatctgtggctgttttcaagaagatacattccactggtgatatctcaaaaagcgatatctgtcagctttacatggtgtggaaaccgctttgccacggttgccatggtaactccaaggactcaccaaattgtttctgcgggttgattcccattggcaatggggttcgtaaatctggcctctggcagaaaactcaggaaattatccgtggtcttggtcctaatccatctagtgatcttcgtgattctagcgagacacctgctgggttgactaacctgggagcaacttgttatgcgaatagtattctacagtgcctttacatgaacacatccttccgatctggtattttctcattggatctggatgttttgaagaagcatccagttttagatcagctggttcggttgtttgcacaactacagtctagcaaaatggctttcattgattcaacgccttttattaaggcattggaattagacaatggtgtccagcaggatagccatgaatttctcaccttgtttctgtctctccttgagcaatcactaagtcactccaaggtccctggaactagagaaatagtgcaacatctgtttcgtggcagtgtatctcatgtaacaaggtgctcatcatgtggaaaggattcagcagcatcttcaaaatctgaagacttctatgaactcgagctgaatattaaaggtttcaataatttggaagaaagtctagacgactactttagtgaagaaggactagttggggagaatcaatacttttgtgaatcatgtcagaaaagggtagacgccactcgctgcataaaacttagatcacttcctccagttgttaattttcagctgaagcgttatgtattcctcccgaagatccattgacaatggaccaattcaatgtgagcatggaaaagttccagtgtctaaactcacatcaatgaagcgtctatcagctgcagcttggcagaaattattttcaaaatatggaggggggccaacattgagtggtgatgatttttgcatggtgtgtcttaaagatggggcgaaaaatgcagtatctgctgatgtctaccgtgaccgcaaagaatcatttaaaaaccttgcagaagcagctcttgctggtagttgttcagatagtccttcttacttcatctcaaaggcatggttgactcattggctccgcagaaaaaatgctggtatcctttctgatgctgataatggaccaacgagtgctttaagatgtcgccatgggtatctcctgccggagcatgctccaggagcaaagcgggtatccgtaccagagagcctgtggttatttctctatcaaaccatcagcgagaaggttgatgatgttgttacttttccatcagactgtcaaccatgcaaaatctgtagtcaggaattgtctgatgttgcttctgttgagggtaatcttagagcagtgaaacttgagcaacgatacaaacatgaaaagttaatatctgggaagagctttgcacttcgtcctggtgaaaaatattatttggttccttcatcttggttgtcagagtggagagcttatattacaacgacgggaaaaaatatttcttcactaccagaacctcaaagtcttgaagctgttgtcagttcacttatatgtgaaaagcattcgagattgctgcaaaagcctttggatcttgtttgtaagcgcggaagcatcactcagaaaacatcaaataacgatggtttaacaatcatcccagagtatgattggaagttattctctgaggagtggagtgcgacgcctggaaaaggtatatctgctgaaatcgcttttagcaaggacgctcaagataaagtgcacggttcctctgaagcaatgccgattacggatggaaatttggaccagtctctttatggtgcaaatgacgattttggggccagagagccctatgtcagaactgatcctgaggtttgtgaagaatgtgttggagaaagagagagctgtgcattggtgcagaagctcaactaccagaatgaagatatccacgtttattttgtccgtggaaaagcaccaccaaagtctatcaaagaagcatctaaagatgttcctgtatcagatcgtcggatttcaaagcgttccaggaggacaagctctgggaattcaatcagtttgaaagtctctggttccacatccgtctatcagttgaaactcatgatatgggaatctttagggatcgttaaggagaatcagaagcttcacaaaggaaatgttgagattgaaggtgacttggctactcttgccgacaagagtatctttcctggggatgttctttgggtcagagactctgaaatctttgagaaccgtgacatagcagatgagatttcagagcagaagggtgatatactgcaggttgaggaaggctttagagggactcttttgacatcaagtgtttcagcacagctttgtcagggcataacatttagtgaatgagtttcttccgtgagatatatggctgcacatacctgttggcataagctagttaaggtctctagaaggtacctgattgcttcagagggtagtcaatcatgtcagttctagcagtcctggcgaaaagttatgtctatgcttctctccatgctgtcacactaaggatgtcaaatgtatcctcgcttgaggaaaacggaagaaggctcttccttcttccctaatgtaatggtgacttaggtataccactgggctacggggctgtgatgcctgcatgcttagtgtttttttttcctgttgttggccatgcgggaccgtgagggctacgagcgacttgcattgtacttggtggttgtgcacacatcggcttattgacaggtagattactatgaaagtctcaaggcgatgcagagcattgtgcagttttttcatgccttttattttaccttagatcctaagggtgtgcaatgccatttgatatatatatacctttatgatcactctggtttgctcacctctcgttgctcatagaacagagttacgaagtcgaaaccttttccttcatttagaaaatcaatcgttattttttctgtgatctctttt

SEQ ID NO: 19690 - DNA, 772 bp, Zea Mays
cggagctgctgtaccaccacttctgggcgagcaggtagacaaggctctacagagtatggaggaggaagctgaacgcgtattccaggatgaacgagtgttacttcatgaagatggagctgcttcagcaagagatactatgtatgaacaagcagaagttgtggagcatgaactgcaacatatgacagaacaagtaaaatccatcattcagactatgaatgctactcagggtggtgagctcgagtccgctgatagtatgacaccatttgatgttgctgtccgaatactggataatcaactgcgttccctgatgtggattgatgagaaggttaatgagttctctggcagaatacagaggctgcctaacaacagcgtttcagccgaacgtgactctggaattcccaggttttggttaagctgattaattcgccgcattttcttgcggccctaatcgaggttcagtaaacattcttcgcttggttattctgctgctccaccggccaaggtttcgcgttattttctccccgttcaagcactttggtgccatgtagctctagccggttcactctggattggtaccattcagtgtcacttgtgcacacttcagcatagtttctatttgtttaacgttggacgtgattacggcatgtttggatctatttgtgttaactgttttagaagctaaaattagcactatttacgctattgtgttcaatatggagcacaagtctgcagaactaatctcaactcactttcatcccttaggtcttttttg

SEQ ID NO: 19691 - DNA, 1366 bp, Zea Mays
gtatgcgttcggcgacgcgacgcgcacggcgcaccattccgcggccacgaagagcacaatcctgttcgccacgccatgcctctccacgcccgcgcaccgccgctccgccactcccaccttctactcaccgccgccaccgctcggctccgcccgtgcgcagcgccagcgaccaagccccgccgccgctccctcgtcctcgtccgcgcctccagctcggaccctccgcagcagcagctcaacctctccgtgctccgcttcaccctcgggcgctgatgctgccagccgagtgccgttgcccgaggggagcatccaagtattcgtcatgtctgagaacctgtcagctgtgcagaaggaggacatggcgtgggcgtcgtacgtcctgctccggaacacaaacaccacgtctgtggtcatagcaattggggatctcttgtgcgtacgaggatactggaatccacctgcaaatacttcaaaatattccacgatcgagtggttcaaaagtcagatgcagcaactaggacttgttgatttgaggggtgctttatacttccctaattcgtcagattctcagcttgcgaagattctgccagatgggattctttctgtgctagcgcaacctattctgagtcctgatccagctaataatgaaacaaaaactgaaggtgtcatcctgttggcctgcaatgcaaattatgcatatagtgagaaagatagggcttggataagaacagttgcagacaaatttcaacgtgcttaatttagaggtaccaaagaaatgttgacagtcaggcagtactggaaaatggaccgggaaagattggggagtgtaaagtagactgactggtccaagaaggatttggagtcttggcaacgtggactgagcagaataagagagttttgcagttgggaggaaatcagcattaagctactgtttattagggttggcgctagttgaagcaaaatagtccagcaatagtttgttcagttggctagagactatgtggtgatgtgtttggtttgtctctgtgcctcttgctttggtatgtatgtctgattggatttggcattgaagcagaaaggctgctccagagattagtgacatgtgcaaagtagcaatgctgtcataatttacgcatactccagcccaattgaggcagttgatcacctggctgcatttatataagcagtaaaagcatttttagttcaaagtgttgtcacatttaagattgcaaatactgctgatcaatcacattccttcatatatgtacctagattttctattgcaggcttgcagctagtgaccttttcagttgctattgctagtatacacaaacttaacagacaagggaaatgtttgaatcttctg

SEQ ID NO: 19692 - DNA, 3399 bp, Zea Mays
ccgcttccgcagacggccaggccaacgcaaccgctcctgccatccgcaccagtccccccctcccctccctcccggactcacccggccgccagcggggtaagtcgccggcgggctttctttgcatgtttatttatgtaacccggcccggccgaaacaaaacccccggccgcgcgcacgccaagattgctgcccccacccccctggcctccgctcaaaccaccgctcgacttctcctcgtgtaggtttggccgcttcctcctcctctgcggcgggagcgggacaacagacacaggggcacagaggaaccggcgcggggcggcgcaatgggggacgctgcggcggcggggaccctgcacaagagctacttcgacgtgctggggatctgctgcccctccgaggtgcccctcgtcgagaagctgctgcggccgctgcccggcgtgcgcaccgtcaccgtcatcgtcccgtcccgcaccgtcatcgtgctccacgacgccgccgccacctcgcccgcgcaaatcgtgaaggcgttgaaccaggcgaggctagaggcgtccgtgcgggcgtacggcggtgggtcggacgggaggcaggcagccggcagcaagagatggccgagcccgtacgtcctcctctgcgggctcctcctcgtcgtctcgctcttcgagcgcctctggcctcccctcaagtggtgcgcgctggcggcggcggccgccggcctgccgccgatcgccctcaggagcttcgcggccgcgcggaggctcaccctcgacgtcaacatactcatgctcatctttccggggcgatagctctcaaggactactccgaggctgggttcatcgtgttcctgttcactacggccgaatggctggagaccagggcgagccacaaggcgactgctgggatgtcgtcgctgatgagcatggcgccacagaaggctgtcgtagcagagacgggggaggtggtggcggctcaggacgtcaaggtgggcacggtgctagccgtcaaagccggggaggtcgtgcccatcgacggcgtggtcgtggacgggcggagcgaggtcgacgagagcaccctcaccggggagtccttcccggtcgccaagcagccggagtcccaggtctgggccggcacgctcaacatcgatggctacatcgctgtcaggacaactgccatggcggacaactctgccgtcgctaagatggcgaggatggttgaggaagcacagaacagtaggtcccgaactcagaggctgattgatacgtgcgccaagtactatacgcccgctgttgtggtcatggctgcgggggtggcggtggttcctgtggtggtgagagcgcacaacctcaagcactggttccaactggccctggtcctgctggtgagcgcgtgcccgtgcgcactagtgctgtcgacgccggtggccaccttctgcgctctcctgacggccgcgaggacggggctcctcatcaaaggaggggacgtcctcgaaaccctggccaggatcaagattgccgcctttgataagacaggtacgatcactcgaggggagttcagcgtcgaggagttccaggcggttggcgagcgcgtcactacgccacagctcctttactgggtctcgagcattgagagcagatcgagccacccaatggcgtctgtgctggttgattatgcccagtcgaagtcagttggacccaaatctgataatgtcgccgagttccaaatcttccccggtgaggggatttacggtgagatcgatggggaaggtgtgtatattgggaacaagaggattttgtcaagggcctcatgtgaaacagttcctgacatgaaagatatgaaaggagttaccgtcggatacgttgcctgcaaagggcagttaatcggagtattcactctctcggattcctgccgaactggatcagatgaggccatcagggagctgaggtcgctgggcatcaagtcagtgatgcttactggggatagttctgcagcagcttcatatgcacagaaccagcttgggaacatacttgatgaggttcactctgagcttcttccagaggacaaggtgaggatcgtcgacgagctcaaggcaaagcatggcccgactctgatgatcggcgacggcatgaacgatgccccagcgctggccaaggccgacgtcggagtctcgatgggggtatctgggtcagcggttgcgatggagacgagccacataaccctgatgtcaaacgacatccgccggatcccgatggccgtccagctggcgcggaggacgcaccggacgatcgtcgtcaacatcgtcttctcggtgatcaccaagcttgcgatcgtcgggctcgcgctcgccgggcatccgctcatctgggcagccgtcctcgcggacgtcggcacatgcatgctggtgatcatgtacagcatgctgctgctgagatcggaatcgaacggcggccggaaggccaccaccacagcgaggaacaacacaatggggagcactgcaggaaggcgaaagactgcggcggcggcggcggcgctgctcccaccgactgcgctgcgagcaagaactgctgcggcgtcaaaggtggagacgcctgctcgagcgtgcaggccgcgcgtgctagggagaccggcccgtgctgccggagctacgtgaagtgccccaggacggcggcggcgagcaggagcagctgctgcggccacagcatgctgaagctgcccgagatcgtggtagagtagtagtagtactgtagtagggtggaaattccaccgtgggagaagggtgtgcacatatgaacaagcaactgtgaggtgagtgtgactcgccggcgtaaatgtagactaagatcgccggtgcagggtgtttgatctagtagtctagttactatataggtttgctggagaaaaaaatgatgtaggattttgactgagcagagcagggggtctgaaaggtggaaggaagggctctgcttggttttcctgcacactgctcctctgtttgcgtcttctgtggcggcggcggcaatggagactgtcacagacgaaggatgtcatgtgactagtgccggccggggccaacactaatattcaggaactatccatatccatttcggtcccttttaaaatgggagtttctttttctatctcctacgttttctattttagaataaattgatttatgtgactgcgattgcgttttagaataaattgatttatgtgactgtggctatgaaattactgggttctaaaatttctgtgctacggcccgatcgtgaaaaaaaaatactgggttctaaaacggcccttcgaccttaggggccgatacagaattagagagtaggaagagccaagcaatttatcaatactataaagtgaaggtatatacacacgcgtagatgtgtatataga

SEQ ID NO: 19693 - DNA, 221 bp, Zea Mays
ctcggagcctacggagtaccaaccacgtcaccgaaactgtagacgaggaggacaagggtcaagggaaagaaagccaaccgccccaatctcgcgtcccgccggcggccaccaccaccaccgccatgatcagcatcctcgcgcagcgccgcgccatctaccgctcaatcgctgaagccgatgggtcgtcctacttctaccagtgtaaaaagttacatcactag

SEQ ID NO: 19694 - DNA, 1708 bp, Zea Mays
ctttattttattattattattttcctactacacaagggaccttttgagctgagatgatgcccaaaaacaaaaggacgctcatcatcagtgacgcccagtcgtcgccaagcagctagctagcatgccaataatttttttcttgttaatgttgtcgcagctggtactatactactactactacgccgtatatgaatgcgcttttgtctgcatgctcaggctgattccatccaacttgtctttcttctctcctctccacccatgccccgtccgtcgcagcaggggttatatagtgcccgcgaacggacgcgcaggcgccacgaagccgagatcgagcagctacctctccgatccgaggcctgagcgagcgagctgaggactgcagcctatataatatctagactagagtacaccacaacgacgaggcacatatatatacacgcggcggcggccagatccatcttggtatacacgtaatatatatacacgcacgatgggcagcgccggcggcggtggcgagagcaagctggagagcccgctgctgggcgcgtcgtcgacgggccacggcgaggcggtggtgagcgggcagctggagagcatcctgggcgacgcgtccgtgccgtgggggacgcggatggcgtcggcgtccgcggtggagatgcggctgctggtgcgcctggccgcgcccgccgtgctcgtgtacatgatcaactacctcatgtccatgtccacgcagatcttctcgggccacctcggcacgctcgagctcgccgccgcctcgctcggcaacaccggcatccaggtcttcgcctacggcctcatgcatgacaatttcagggtgggtgttcatgatctccgttgggttcaatgcagcagccagcgtaagagtgagcaacgagctcggcgccggcaacccaagggcggcggcgttctccgtggtggtagtgacgctgctctccttcgtcctgtcggtcctcgtctccgccgtcatcctgctgtgccgggactacatcagctacatcttcaccgagggtgaggacgtgtcgcaggcggtctcccggctcaccccgctgctggcgttcacgctcatcctcaacggcatccagctccagcccgtcctctctggggtcgctgtggggtgtggatggcaggcgttcgtcgcgtacgtcaacgtcggctgctactacatcgtcggcatcccgctcgggtgcctcctaggcttctactttgacctaggagcagcgggtatttggagcggtatgatcggcggcaccttgatgcagaccttgatcttgatatgggttacattcaggaccaactggaacaaagaggttgaagaagcacagaagaggttaaacaaatgggacgacggcaaggctcctctgctgtcagcgcaagaatgaaacaactcgtctctctggtgcccaaccaaagaacaacgagacgtggatatgacctgtacggaactagggacgcccctcggcaggctcagcggagacgtcgacgtagtttgatatcaagtagcaattccaccatgtcctgaaatggacagaaccaggccaaatgcctggaatggacagaaccagatggctgatgaaattctacgtacattccatccggtccaatatataattcgtttcacttttttatattaagtttgaccgactcatctcattaaaaaatataattgttattaacttttactagaata

SEQ ID NO: 19695 - DNA, 2374 bp, Zea Mays
cagcacaaatcctcaagcaccccaaaacggcaaaacccatcaggtccccgccacacctcgatactctaacttcggccgccgccgccgccgccgccgccgcgaatgccggagccccaggccatcctcccgctgcgcgctctcccgccggacgcgccgctgcccttccccgtccccgcgccgttccacccccaagcccccggccccggtgggaccgccccggccacgcccccgaacccgacccctccgcaaccgttaacccccgccgcgccgccttcctcctcttcgacgcggccgccgcacccatgggagatctccgcgcgagcatggctagagtccttccccgacggacggccgcccaccgagcccgaggtcgacgcctacatcgacgtgcaccgccccgagctcccttccctcccccgctcccagctacaccagcgcctcctcgccctccgcggcgaccaggttctggatgcagaccagagcgcattcccgtacaggttccagcgtactgatctatggaagcctgtgtaccagtggttggaatctcttgagctggactcactagttgctacacagcagatatcagactggcttacatcgaacccaaagataatggacagaatggttgagaaacattcaaaataccatttgattcactacacccagaggatgcacttgaagatgctaaaaaagaagggaaagttgccaaagactctgcaactttctgcggctagagccacagttcgaccaattgctgctccgttcactccagaagaaaacattgtgccgttacagaaaactataactccagtgacaggtagacttcccagtgccagttcagggagacaacagagcggtaccacaggcagattttccagtgccagttcagggagacaacagagctgtaccccaggcagatttcaaggtggaaatgcaactcttagggacaagaagacgtcattgtccaaaaagaaagaagctttgctcaaatacgaacttttgacagacttacagaaccaattgactgctgtgctgttaaagcaatgccgtactgttgccattaaagaaacagattcatcatatgtggaatctccaaatccagagactaacatgagtatacaagggaccactactgcaaatgcttcagccccttcagaggcaaagaatgtgtttatcaatgaacagtcagttccagcaggagccacagaaagtgaacctgggcataagaggaagagaaaccctatcatcgttacacctgcatggtgttatagtgaagcatcagcaggaaccttgcagaatgaaataaatcctagctcaaatagtgatgtttcaagaaatttcaatatttggagaggacatgctaatccactagtttcacatagagatactaagaaaaatatattattctgtcttgagggacgcgaaactggtgtcagctgctctcaagctgcttcttatggaggttatgctggacgaaattgtgaaagatggactccatttcttgaaggatggaattcacctgcattccagtttgaagggcctgctgtacatgttgttagaaaaagttacctatcttggtgtccaacatcatgtgcttatacgtcaagtgcaccttctgctcagcctcatggcaggcaaggtatccgcaaagttcttgatgtaaaatttcatccagaagggttgcctcagcttgtttctagctctaatgaggcacccaatgaattactgctattcaatctgctttctggaagggcaattcagcttagaggccacaatactaagatccagtctatcgcctttgcagtcaaaggagcaagtgtagtgtcttgtgcttctaatttattaaaggtatgggactgcattactgggtcttgcctctatacgctgggtggcgatgatcaaaattcagtggggcatactcagaaaataaatgctatggcagtgaataaatggcaatcctgtcttgttgtcaccagtggagcaaaaggtgatgggaagcttctactatggaatgctttaagaggtgaacttgcttctgatctaaattcgaacttgaggtctcaggatatgatctatccctcagttgatacaatggagttctatagtgagaatcatctggcatgtggaagtgattgtgactatggtggctcagctgtggtacaattatgggatattgattctccagagtcttatttatctttctctgcaagtgactcttacattacttcccttaaagtcaaccctgctggcaacactctcattactggttctggcgatgggactattggcttatttgacatccgtacttgttctgcaattagccacttgtcagtgggatctagttgtgaggttacatctgtttcatttagcaaaa

SEQ ID NO: 19696 - DNA, 1535 bp, Zea Mays
atatgggaaatgtattttactcttcatgcttttccccttcgtgcaagcaaagctaaacaatacccgtcttgccttcaaatcgaactcctcccccgatcgatcccaatcgaacccaccaagccgataccctaaccctcgcccttctcgatgtcggccgccaccaccggcccagccccttcagtagccactccgatggcgccccctccgtcctacccggcctcctccacggcctcttcctccatctccgcgtccgccgaggaggaggaggacctctatggccgcctcaaatcgctccaacgccacatggagttcgtcgaaatccaggaggagtacgttaaagacgagcagaagaacctgaagcgcgaactccttcgtgcgcaggaggaggttaagcggatccagtctgtaccgctcgtcattggccagtttatggagatggtcgacggcaacaacggcatcgtgggctctaccactggcagcaactactacgtgcggatcctcagcaccatcaaccgcgagttgctcaagccgtcagcgtccgtcgcgttgcatcgtcactccaacgctctagtcgacgtgctgccgccggaggccgactccagcatctccttgttgggatcgtcggagaagcccaacgtcacttacaacggccctagaatggtgcgtgacgtgttccgtttggccaaggagaatgccccagcaatcattttcattgatgaggttgatgctatagccactgctcgttttgatgctcagactggtgctgaccgagaagttcagcgtattcttatggagctactcaatcagatggatgggtttgatcaaacagtcaatgtgaaggttataatggcaactaatcgggcagacactctagatcctgctttgttgcgtcctggtagacttgacaggaaaattgagttccctctgccagaccggcgtcagaagaggcttgtttttcaagtttgcactgccaaaatgaacctgagcgatgaggttgatttggaagattatgtttccagaccggataagatcagtgctgctgatattgctgctatctgccaagaggctggcatgcatgctgtccgcaaaaaccgatatgtcatcctccccaaggactttgaaaagggctaccgaaccaacgtgaagaagcccgagacagactttgatttctacaaatgagtcaacccagagtgttgaactcgtttctttctgcaaatgagtcaacccagagtgttgaactcgtttcttgtttatcaattgattatcttttaccatcagctgagtttatggatagttgccattacaaatattcaagttcctcaatgatgatgtgtgttctgtaatgattttttggattgtttgcctgtcgttcatggtgatctgcttcatcagatttaaggggtgtttggtttatagagactaatttttagttcatctattttattatattttagtttctaaattactaaatatggaaactaaaactctattttagtttatgtattgtatttacgccctatttgatttctttagtc

SEQ ID NO: 19697 - DNA, 2730 bp, Zea Mays
ggacatggtctgaagctctgtagcttaaccgtgtcatgcagccccctttgaagttctatagcttaaaccatggcatggtgaaagcccaagctcaatggcgctccagtgtctcacgcacgaattgaagatggcactagcaagtagtgtttcgtctaaacaaggaaaagaaagttaggattttggtgatttatgagcttgttcaagaatacgagtggttgaggaaatctcaaaagttcagcgggtagcctatcaagatggccgaggaaactgccaatgacgctcaggtggcacaagataacgagattgctctcagcaatgaggcaatccaaggtgatgagttggtccatgttgaagagctgtcccaaggtgatgatttggttcaaggaaatgagctagttgtttctgaggtgacaactcctactattggaaccagacgcaggagaaagaagtctttggtatgggagcacttcactattgaagccgtcgcaggtggggccactagggcatgctgcaagctctgcaagcaaacctttgcttacagctctggttcaaagattgctgggactagccatctcaagaggcacatcaccttgggctcttgtcctaagataaagaatcaagagcagaggctggcgctgccttcaactggagggactgacaatgatggcgagggaactatagagcggcgaaccaagagacgctacagatacactggttatgcaaatgctgcttttgatcaggaccgcagttgctcatacttggcaaagttgatcattcagcatgactacccacttcacattgttcaacagccgtcatttgccatttttattgaaagtctgcagccacgtttcaagattgtggatgttgaaacgatggaaggagaggtatatgctgtttatcagaaagaaaaggagaacctgcttcaagcattcaacagtatgcctggaaggatcagcctcactataggattgtggacaactagtcagactcttgggtacgtttcacttgcagggcagtttattgactctgagtggaaagtgcaccgaagaatgcttaacttcatgatggtgtcatctcctcattcagagaatgcacttagtgaggcaattagcatgagcctttctgactggaatatgaaggacaggctattcaccatcacattggataatgaatgctcctcacatgatatctacagtgcaaatctgagggaccatctctccaacaagaacaatctcatgcttaagggacagctctttgttgtgaggtgctatgcccatatccttaatgctgttgccctagatgtcattgcttcaattcatggtgttgtatacagcattcgtgaaagcataaagttcataaaagcttcttctgcccgcgaagagaagtttgctgagattgctctgcagctggagattcccagtaccaagaccctctgtctggatgttacaacccagtggaacaccacctatctgatgctgctggctgctttggattataagcagactttcactacactagaaacatgtgatgataactacaatgaagctccatcagcagaggattggaagaaagttgaggctgcctgtaattacctgaaactgctatacgattctgcacatagtatcatggcggcagcaaacccaactgcaaacatctttttccatgaagcctggaaacttcagctagagctggcaaatggcacaggccacgaagatcccactttcagtagcatcgccaaggatatgcatgagaggttcgacaagtactggaaagattgcagcctcgtgttagccattgctgttgtcatggatccacgtttcaagatgaagctcgttgagttcagttactcgaaaatctatggggctggggctgcaaagtatgttaaggtggtcgatgatgctgtacatgagctgtataaggagtatgtggctcagccactcccactgaccccagcctatgttgaccaaggcgaagggaataatggaccagccaatgcgaatagcagtcaaggggctcctgcttccactggtgatgggcttctagacttcgatatgtacctttctgagatccaaagtagccagccctcgaaatctgagctggagcagtacctagatgaatccctcactccacgtatccaggagtttgatatcctgaactggtggaagctaaacacggtcaagtttccaaccctctctaaaatggcccgtgatatcttggccattccagtgtccatggtaagcagtggcagctctatattctgtgctggaacaggaagtcacatgctcgatgactacagaagctctctgcggcctgagattgtggaagcacttgtttgcgcgaaagactggctccagtattcaccacctgccaccgaggcaccgagttctgcactggtgaaggctcaaggatcgtaggtttgtcgtggtcactgcctgccttgtggaagcaaagcaagaatccatttacccatctgtcgtatctctgagtgtagttaactgtaggtgtattgtaggctgagattgtgaaccgattttgatatattctggtatctatcacgtaaaggtgtaacatgtgttgaactctgctgaactcgtggctgttctgatgtcgtctgactttgcagtttgcacacttccctatgtgcttgtacaagccgtgggatgtatcttgtttttgtattaaatttgttttataccgtggattgatgtctcagtctatatataagcagga

SEQ ID NO: 19698 - DNA, 998 bp, Zea Mays
ccgaacatccttccccaaaacccccccacccaaaggcgaggcagggggagagccgtgcctggtgtggtggctcctgaccaaaacggagtccctcgccgccgccgcttcccgaaatccgccaaatccggagccaatgccgccgtcccctcccaccccggcggcacccaaaactatcgccgacttcttcgcgcgccccgccaagcgcctgcgcgctgccccggccgcctccctctcctccaactcctctccctcctcgctgtcgccggagcagcgccgtcgcgccgacaccaacctggcgctcgcccgcgcgcggcgcaacctccgcctcgccgagtccaaagcgcaagcatcggggggcgcaccgaagctggaggagctcctggtggaggagacgtgggcggaggcgcttcgcggtgagctgcgcaagtcatacgcgctcgagctctgccgcttcgtggcccacgagaggctccacggcccgctgcccgtgtacccgccgccgcacctcgtgttccacgcgctcaacgccaccccgttcgaccgtgtcaaggcagtcatcatcggtcaggatccataccatggccctggtcaggccatggggttgtctttctcagtaccggaggggataaaaataccttctagcttaggtaacatttttaaagagctcaaaaaagacctaggctgcactgtgccatcacatggaaatttggaaagatgggctgtgcagggtgttcttatgctcaataccgtcctaactgtgagggagcatcaagccaactcacatgccaagaaaggatgggagcagtttacggatgaggtcattaagactatatcacaaaagaaatcaggattagtattccttctttggggaaattctgctcaatctaagacaagattgattgacgaaacaaaacatcacatattgaaatctgctcatccatcaggtctgtctgcaaacaggggtttctttggatgcaggccgaatccaaacaaatgag

SEQ ID NO: 19699 - DNA, 1716 bp, Zea Mays
cttcggtgggggattcttctcccttctttgtgatccagggctaggcaaaagccaactcctccaagctgcagcagctgtttccccacgaggaatatatgtatgtgggaatacgacaacaaaggctggcctaactgttgctgtggttaaagattctatgacaaatgattatgcatttgaggctggtgccatggtccttgctgatcgtggaatatgctgtattgatgagtttgataaaatgtttacagagcatcaggctttacttgaagccatggagcagcaatgtgtttctattgcaaaggctggtcttgtagcaagtttgtcagctcgaacttcagtgttggcagctgcaaatcctattggtggccattatgaccgagcaaaaacagtgaacgagaatctaaaaatgagtgctgccctcctttctcgatttgacttggtgtttattctacttgacaagccagatgagtcactagataaaagagtgtcagaccatataatagctctccataccaatgatgttgataatttcagacccaacaagaggaccagaacagggtcacattttgatggtgatccggggcttggagttggtggaaattcagtagcttcaaggctgaggctacacccagagaaagacaaggacttcactccattatctgggcaacttcttcgcaaatatatatcttattcaagagaacatgtcttccccagaatgtcaaaggcagcagctgcaattttgaaagaattttatttgaagctgagaaaccgcagtgcttctgctgatggtacacccatcacagccaggcagttagaaagcctagtcagattagccgaagctcgtgctcgcgtggatctaagagatgaagtgactgaagaagatgctcaggatgttgtcgatatcatgaaagaatctctgtatgacaaatatgttgatgaacatggttttgttgattttactcggagcggtggaatgagccaaccgaagcaggcaaagaagtttctgaatgcattaaacaaggaatctgagttgcagcaaaaggactgcttctcgagaactgaactttacaccatagctgataagatcagcttgcaagttccagacttggacactcttgtagaaaagatgaacattgccggttaccttattcaaaaaagatcagggatgtatcagctggtgactgcgccatattaacaatgcagccaacgaggtcaagatggagagttttcttgaatgaaactagaatttgcacctgctttgtctgtactagtgcctgctctagatctccagacactctggaaggccttaatccatttcaacataattgacatgtacctttcagctcatttccccccgtcccgtgagagatgtatggtttggaagctatgcgtatcgtcatggctgcgcacatacgtgctgcagtgtacaggcgactgaagtgcacgcgtcgcaggatgagcactaactttggtagcttggtgtatgccatggttgcgatatgatatattattgtgaaacaggaacctctagcggttattagtttatagatattcaagtttgccaatgaaacatccagaatagcatatgatgcattttacaccccttacacccgatcactcggaaaacatctagcacgctgtaaattactccctcagcaatagtaattattgctgttactgcgctgcactgcttgggaacactccttttcaaagccacat

SEQ ID NO: 19700 - DNA, 1274 bp, Zea Mays
aagagaaaaatggaagcttccaaggctttcgaactgacaagcaaaacggcgctcactctctcgtcaacgcctttgtcttctttctcggcttctcgcttccttctccttttcttcctctcctccccactctcaattccttcctcgttcggttgttccttcccacttcctctctctcgcgcgcctgtactacttttgaagccgcaaggagaagctcgattccaccttgcagatccaatggcgcaacctgaaattcctgcatttggggattgggaaaccactggaaacacaccttacacacaaaagttcgaggatgcacggaagaacaagaaaacaggaattcttgcacaaccaaatgatccaaggagggatctggaacctcctcgcaagtcgcctttgcacccaacggtctacaaaactaatcctcaagaccaaggtccaaggaacccaccacatcgaccaagacctgaacttgacaaccaacgacactctgaccggcctactcaccgtgagtctgcaccacgaagacattcaaatcttcagagagaacaagggagtaatgctgggacaccaagaagcccctacagaacagctgctgggtctgcttcaccaatgcagccaaacaaccaatcaaagccaaagcacaggtcaactggaatgcagactccagagaggagggcatcttcagaggggcttggccagcatacacctggaaggagcaggatgaagccgggtggctatgagcctgaagaagtggctgtaccaccctttggcgaatgggatgatgcaaatgcagcatcaggtgaaaagtacactggtatcttcaacagggtgagggatgataggttgtcacctacctcttctgctaggcaaccgtctactactcgtagtgaagagaataaggtgcaacagaaatgttcttgctgcatactttgagaaaataaggacaggatctcgaagagttctagacaacttcctatgctgctcctgtgatgagatccctatcttgtaactcttcctgtgctagttgtcatgtttgttattgttggtgtgattatgtatctgtagatggattgtttcatttgagctcttcaattattacaaggaacatatatatgatacctagaattgtaaagtatggagtgagcaatttctttgcaacaataaaaggtttatcgaatgggctctggaattccatagttagttaatgtggatatcagcaagacaccaacaatgtgctttcagttcttgaaaaagcaaggccatgcatacccgat

SEQ ID NO: 19701 - DNA, 631 bp, Zea Mays
attatgatccactataataccgtgcaactcttatatgagggcacccaagggagccagccgtcgttcttgagcaaagatgtagaagaaataagaggaagaaaaagaataagaatacatacgtagggcaaggtttcctacttttttgtgtgttacacaagttgcagtatgagtgtttgtggtgtatgtcatagttataaatatttcaaggccaagtaagtataaaaaccgaccttagctcagttggtagagcggaggactgtagtggattccccatgtcatttgttcttgttggcagggaatacctagctacgacaaagatggggatggctaggaaagaaaaccaattgtgggacaatgataattgatatcaatgtcagccccttatatgctacacctgcaacctgtaatcataccgtcaactgcacctgacatccgtgcatcagaagtttttaattctgatgatttagattatgtctataaatctgttgaggatggcatggaacatatttttacttcaacaacacaactccaatttggtcatgatttgtgcttgaatgaagaagtcaagatttccttttgactcagcctgtttttctgaattactggtttgttacaaaattgtagatataat

SEQ ID NO: 19702 - DNA, 2448 bp, Zea Mays
atcctatcttcagtctcctcaccgcgcgctctctaccgcttgtccgtttcttcctcttccgaggtagcaacgtgaataaggccgggcttgcggatgccggggtgcggagtagcggggagaggtgatgtgggggtatcgtcggccgcgcgccgcactccgccacaagggaagagccgcccctgcctctggatgactatcgctcgcggttacgggaggcaacatgagctcaaatattgcacatcgccacaaagcaaatctctgttactagaagcaagatttggtcgacatgttactaggagcactgcttatctgctccaaaattcccggagcactgcaatgacaagactacagaagtctgggaagtttctgcaacctgtcttggactcctcaagaaattatttgactagtacattctacaatgcaagcttgaagaggagagttctgtcgagggttgagtgctttgtgtcttcagatccaataaacaatggttggttgaaaccaaggaggtcagagaacttcactagtttggagagcgcatgtgttcagccagaatacaaactaccagtcaggacacgtgctgactgtaaagcagagcagagtttccaaagcgctggacggtcgttctcctctgcttctttgcgtttcttctttgcaatatggaccgtgtcaatatgagcattgcaatccttccaatgtcgtcagagttcagctggaatccagcaaccgttggtctaatccaatcatctttcttttggggttaccttctcacacagattcttggaggtatttgggctgacaggtttggtggtaaggtagtactaggatttggggttgtatggtggtcatttgctacagttcttacaccccttgctgccaagattggtcttccatgcttactcaccatgcgtgccttcatggggataggcgagggtgttgccatgcctgctatgaacaacatcctttccaaatggatcccagtctcagagagaagcagatctcttgccttggtgtacagtggaatgtaccttggatcagtcaccggcctgtctttgtcacctctgttgattagcagatttggctggccttctgtcttttatgcatttggatctcttggaaccgtttggtttgcactgtggcaaagcaaagcacacagctctccagatgatgatccggagctaagtaaagctgaaaagaggcatatactgggtggcagtgccttaaaggagcctgtcacttccataccatggaggctaattctatcaaaggctccagtgtgggctctcataatatcacatttttgccataactggggaacattcattcttctaacatggatgcccacatactacaatcaggttttgaagttcaatctaactgagtcggggcttctctgtgtcttgccatggctgacaatggctgtttttgcgaatattggtggatggattgctgatactctagttcagagaggggtctctgtaacaaacgttcgtaagatcatgcaatcgattggtttccttggaccagccttgttcttgacactgctgagcaaagttcggactccagccatggctgtgttatgtatggcatgcagtcagggtagcgatgctttttcacagtctggcctgtattcaaatcaccaagacataggaccacgttatgcgggggtacttctcggactgtcaaacactgctggcgttctggcaggagtttttggtactgctgccactggctacattcttcagaaaggttcttgggatagtgtgtttaaggtgtctgttgtgttgtacatagtaggaacggtggtttggaatgtcttttcaactggagagaaaattctcgaataagctgtggacattcctatatgccactatacggaactgtgtgattttgatgatgtcattttggcaaacaaaataaattttagaagagatacatctggaagaaaactccattttatgcaagaggtgtacctgaatctgatgtttgggctatcggaagaaccagatcaaattagggtactgtgtgaggtcaagaaggtacacttggaacttgggaaaattcttgtacacaaagcaaccgcaccaagggcacgtcagatttttgcagttgtttcttgagaagtccaggcttctgtcaagatcaccaatccacatctttttgttttaaaatgattgacagttaaatcgtgtatcaccttgcctttgcttaaggcgctacaggtactgccaaactaatgtatgtgcttttcttatcgaaaaacctaaatgtatgtgcttcagatatcttgaacatctctgctgtttgcgtcattgctactattgtttcgtgtaagctgcataatgatactaaatgatgatggtgtcatttttgttttacttctattgacagacaaaaatatcctcacatgaaaattagattgcatcattggtcacaaaaacaaaaagaata

SEQ ID NO: 19703 - DNA, 1512 bp, Zea Mays
caaacccacggactaacacacgcgcacgcgtacagcaaagaaatggcgatggcgatgcagccatcttagcccccctcccctctccctaccctccatggccgtccctcctctgctgctcgtcgccgttgccgtagccgcgctctccatcctcgtcctcgtcgtcttcgccttccggcgatgcaggcggcggcggcaacgccacccgctgcaggccgcggcggtggccccgaccccggtcgctgtccaggttcaaattttactgcaaaatcaacgagttcctgctggtgttggtatggcatccgatccaatggtggcacgtagaagtggaaagaaacttccaatggaagacataagcttttgccagtgtcctctgcagggtgttgaacattttgggctctttggaatttttgatggacacggtggggatggagctgctaaagctgtcagcaagattcttccagaacatctgggatacattttatctcatcctgaaacaaaagaacgagtgcaatcatattctgatgcttctgatgttcttagatatgcttttactttgacagaagacacaattgatcatcagtacgagggatgtacaggcacagcacttcttatttggtttgaccagaataaagattgttttgcccagtgcgctaatcttggtgactctgcatgcgtcatgagtgtcaacggcaagacgatcgatatgactgaagatcaccgggtaactagcgcgaccgaaagagctaggatagcaagaactgggcagcccctgagagacggtgaagctcgtcttagcggactaaatcttgctaggatgtttggtgacaagtttctcaaggagcaggacccgcgcttcagctcagaaccatacgtgagccaagccgttcgcatcaccaaagcgtgcacagccttcgccgtcattgctagcgacgggctctgggacgtcatcagcacgaaaagggcggtacagcttgtcgtcgagggaaaggagaggaggagctccggcgacgccacctcagcggcggccagagtagccagccgtgtgctggacgaagctcggagtctgcgaaccaaggacaacacatccgtaatattcgtagattttgacgtcctgagaagggatccctgtatctcgccagttgattgacatggcagattccggagactgcagcttcccatggatcgtcgtcttcctggctgctctattatatagctcccaagttttgttgtgttttcagtgagatgatgtggtgtaggaggcagagtgcgtgcataccgtgtaatctggtgcatgccttttagagtctcctctctctctctctctctctctctctctctctctctctctctctctctctctgtcaccctagttgatgaaccgatgatcacccatcatccaggaatggcttaacaaatctccattaactgtgaagtcattcgccatttttgttaatccgtttgcgcgtccagtttgaagtccaagggacgagatggaggcaagagaaagttgct

SEQ ID NO: 19704 - DNA, 5372 bp, Zea Mays
gcagatcatgttgagggcgtccatgcggatgttggggacgatttcgacaatctcatcctcagccacgaactccacctgcagcacagacaggacaggtccaaacattccctttgacgaagatagtctagtccctgcctgtgattgtggaagggatggggttggttacctcggagggcgagaagatggagaggtgcgggtcggactgccccgccatgaatgccccccactggaacgccgggactcgtgagagagagcaatggaggcgctgctgcgggtcggaggcggcgaggcgagagcgaggtcgacggagagaggaggctacaggtcgctgggactctctaaactacagcccaatctgagtgcccgaaagcccatccaacaacagagcccaacagccgcttcacgcagcttcagttcgatttggtcgggtcgcggcagcgcacggcgggtgaggcagcggcgaggcggggcggcggggcgccgcggttgcctttctcgctgctcctgcagtcctgctcgctcagcgccgggacccgggagaggttattagggtttccttctcatcaactttagccccagcagcaacacagccagcagaagagggcgggcccgatgctggccgcccggaacccccctccgccgccccatgacatcgccgcgcgcctccaccacctgcgcgacctccgcagggtgccgctccccaaccgcgtcgcgcgcatcgccgacctccacaccgatgaggccagccccgtgcgcaagcttgttgccgagatcatcggtgagcttgggtcaaaacacatgaggtatctacctgatatgatcccttgtttgctgcaccttctgaatgatgagacgcctgcagtcgtcaggcaagctgttaagacaggaaccaacttgtttgccaaagtactccaaaagctagctatccagggtttattctccaatggagggattgatgatgcacttaaatcatcatgggaatggctgctcaagttcaaatcaggtgtctcgcacatggcatttcaggccaccggcaatgaaggtgtcaggttactggctattaagtttgttgaaaaaacagttcttatgtacacaccagatcctgatgtcccatctgatccgccaactgaaacaacagaagatatggcattcaatgtagcttggttacgaggaggtcaccctttgcttaatgttggggatctggccatggaagccagccagagtcttggattgttgctagagcagctcaagtctcctaaagtaaagtcactcagtacttccatgatcattgtcttcgttactagtctctcagctattgcccaaagaaggccttcattttatggacgcatattgccagttttactttccttggatccagcaagttctattattaaattgagagtcccgggcgcattccatgccttgaagagtgccttctctgcatgcctgaaatgcacacattcaagtgctgagccgtggcgagcacgcctattggaagctcaaaatattatcaaccaagggggttcaatagaagatgcagcaaatgctgctaagaatttcggggacacttcaaacagggaagaatcgtggcctctgatggagagaagcactgacggtagtaacaagcgtagtctggctgaagacatgaatcatgtgacagaggatgatgtccactccactaaaagagccaggcaatcaattgatgctaatgaacatagtgaagaggcaaacaagacaaattttgagtcgatgtctgttgatatctcatctagccagcccagctctataagaactgggaattcagaagctgtgtatcaattaattggtatgtttgctgcactagctgcacaaggtgacagagcagctggatcactgcaaatcctttcatacagtatcgctagtgacttactagcggaggtggtaatggttaacatgcaacatctcccaatctctcgtcctgaagttgaccaacagcagcttccttctacgagctctggagatggacttccactttcaagtttctcctctctgctggggattctgctgaagggagcgaaccaaattgatcaagatgaagtgtctccagctaaagaacctgcgctggtgtcgtcagttgcagatgacagaatgatacttcctgctaattcacctgttcctagctcagtaaatctacctatcgaagagaacagtaacagtccaacagttccattatgtatagaaacaacagaggccaaagtaaccagtgcaggtggcaatagttcgattgatattccagaatcatcagaagcttcccatgcctcaacagagccccagggaacccaagagcatgctagcacttttgccggtccatttcctgctgataatttctcagttggatttagtttggcacaatcgtcagaaactcgcagcccaagctcttctacattggaagcaaaccactcacagctttcatcccttagttcacaatatgttcttccaaagttggttgtcaataatattgatctcagtgatgaggccaaagatctccttcaaaaagaggcgtttgtgcggattcttgagagtgataagaaagaagcatctggtggttcaattgctcgccttccgttgcttgctcacctgggtgttgagtttcctctggaatttgatccttgggtgattcttcaaaagcacattctctctgattatgcgaataatgaggggcacgagttgactatatgcatcctgaaccggctatatcatgaggcagagcaggatcacgatttcctttcatctagaactgctacatcagtttacgaatcctttcttctaaacatagctgaaaatcttcgagacatgtttccagcttcagataagtcacttggcaaattgctttgtgagataccatacttaccagaaggtgtgctgaaactgcttgaaagtttatgttctcctggaagtaatgagaggcaggacaaggatattcagagtggtgatagggtaactcaaggtctcagtgctgtctggaaccttatcatgctaagaccttcaaatcgggacagatgtctggagattgctttgcagagttcaactcatcatctagaggaggtccgcatgaaggcaatacgtttggtggcaaataagttatttcctatgacaagcatttccaaaaagattgaagattttgcaaatgaaaaacttaattcagtgctggaaatgactccatctggtgattgtgtaactactgaaatggctacacctgaagcacacaaagatattggtttagaaaacttaacagcttcagtaacaggcatgcagactctgatgtctctatactttgcattgtgcaccaagaaacattcccttctcagacatgtatttgcaatatatggtaatctaccgcaagctgccaagcaggcagttcatcaacaagtaccaattctgatacgcactataggctcctcctctgatcttcttggaatcatctcagatccaccagctgactgccgggacctcctcatgcaggttttacaaaccctcactgatgctgcggttccatctaaagatctgatttcttccataaagatcttatattctaaaacaaaggatgttgagttcctttttgcaatcttggttcatctaccaaaagatgaggtcctgcctgtgttccccagtattgttaatcttccaatagacaagtttcaaagtgccatttcccgaatcttgcagggatcacctcggaatggcccttcacttgatccatcagaaattttaattgcaattcatgtaatagctcctgataaggaaggaataccactcaaaaagattcctcttcctttgctattcatgaggactgtcatgcaagcaataggtgtttttcctgcattggtggattttgtgatggagatcatgtcacgccttgtgagcaagcagatttggaaatatcccaagttatgggtaggatttctgaagtgtgctatcttgacaaaacctcagtcatatggtgtgttgctgcagttaccagctcctcaacttgagaatgccttgagtaagaacccgacactgaagacgcccttggctgagcatgccgagcagccaaatattcggtcgacacttccaaggtctactttggtggttctgggtcttgctgaagatcaaccacagcaaccagcagtaacacaggtgcagagcagccaaaaccaggctgcggaaaccagtagctctgctgctgatacggctacagaagtaactcaggaatcttctggtgctagctaacatcttttatgccgaaatgggctaatgcttgcaggttgtaagccatctatcattttcatctctggagtgatgttggtgattgatgaaatgggctaacgcttgcaggttgtgtaccatatgtctcttgagggtctaagatgtgtttttctgtgtgatgcgtctcattggacgggtgttagctgctgcatctggacgcctaaatgagaactaagttatttagttgctgggggtaattctaattttcggtggtgcacagggaccattgtaaagtaaagaggttaacattatatatcatccttaaataggaaaagggcaaacaagtgtttgttgaagctgtagctcaaacagtccctacttattccatgagttgtttcaggctaccaagggggctggctatgtcaagcaaccaatgcaatgattcgaaaattttagtggagcagtaaggaagggaagagattctaaatttaggggactacgttttcttgatgtagccctatgaattagaccgccacaaatgtggagagctatacttgatggacttgacgttcttcagcaaccccaagggatggagctttatggccaacccccccagatgtgttagtgaattaatagaagatggtatatctatgaaatggcgacttgacgtgattcaaaagtacttatataatatggatgctaagatatattcctttatatatgtcggcaagatgattttttttttgcacgacatcgtaaaagatgtggtatattctctgttgaatctgattacagaatgcttgtttataatcagaatcaaatacaggattggctggatggcagagtagatacttcagataatgaagccggtgaagttcttaaagaaaggtcaatgagtcgatgaaagtgggttcaatataggccaatttgatgaacacaggcattgaattatactagattaggctgctgaatagcgtaatacctacatccatttaggtgtgttttcttgttagcgtgctattgtaatgtctatattgtaatgggtctcgacccaccaaactttgttatattaatgcactcccaatcttgattaggattagggttttcaatatgttataaagctagattctctcttccccctttca

SEQ ID NO: 19705 - DNA, 1863 bp, Zea Mays
acgcaacgtcgccgcatgcccgcatctaggcattccagcccctagagcctagaggcctagacaaaacccaggcccccttcggcccttcctcgtacactctctcccaatttctcctccaagaacaaacgaaaaacaaaataaaaaactgctcctaaatcttttcaatcattcctctctgttctctctctctctctcttcctacagtagtccagtactccagtccagtcctcctccttcgaatcccaaggtggcggccagagagtagagatagagagagagtgggactatagagacgttaccgttgctgcttgttattattaacgccgccgccgcctcctgcattcgtatggtccgcgtcgtcacggggctcctccgtccgtaaggcaccgccgcagcgtctcggctggatcaacaggccggccgatccgtcttcttcccctcctcctgcgggtcggcgtttggggatcatggcggcgcgggcggctgacgagaacaggagaccggcggcagggaagcccgcgccaggcgtccgagacatggcgagccggcgcgcgctcacggacatcaagaacctcgtcggggctgccccgtacccctacgccgtcgccaagaagcccatgctgcagaagagcaaaagggacgaaaagcagccagcgttggcaagcagccggcccatgacaaggaaattcgccgcctccttggcgagcaagggccaacctgaatgtcagccgatcgtagctgatccagaacccgaagtttgtcaacagaaggaatcagtaggcgatggcaccgttgatattgacgtggaactctacgagctggtcgacggtagtgatagtgacatcgacatgggtgcgacagagaacaaggacattatgaacgaagatgaattgctcatggatattgacagtgcagactcggggaacccgcttgctgcaacagaatatgttaaagagctttacaccttttacagagaaaatgaggctaagagttgtgtaaggccagattacatgtccagccaacaagacataaactcaaagatgagagcaattctgattgactggctgattgaggttcactacaagtttgaactgatggatgagacgctctttcttatggtaaacataatagatagattcttggaaaaggaagtggttccaaggaagaagctacaactggttggagtcacagctatgctgctcgcttgtaaatatgaggaggtatctgttccagttgttgaggaccttgtgctgatatctgaccgtgcctacacaaaagggcaaattttagaaatggaaaagttgattctgaacacgctgcagttcaacatgtctgttccaacaccttatgtcttcatgaagaggtttctgaaagctgcagatgcagataaacagcttgagctagcgtcatttttcatgctggagctctgcttggtagaataccaaatgctgaattatcggccttcgcatctggctgctgctgcggtttatactgcacagtgtgctatcaatcgttgccagcactggacaaaggtctgcgagtctcatagcagatacactagcgaccaactcctggagtgctcgaggatgatggtagattttcaccagaaggctggaaccagtaagctcactggcgtgcacaggaagtacagtacctacaagttcggttgcgtggccaagattttgcctgcgcagttcctgctggagtcgggagggacaccgcctccttcagttatactgcggctaataacaaactgtccagttattctaaaaaacaacgaacgatgttcaggaatgctgttggaaccttgcaaagaaaacaagttctgaatcaaatggatcagtggcctttgtccaaaaaaaa

SEQ ID NO: 19706 - DNA, 1562 bp, Zea Mays
ccagagtccaaaatcaccctgctctacaccgcaagtcccagatctcggttgaacaagacaacactcgagcaccagtgacgcattccctctcccaccctctaggcccctaccctcccatggcgaagggcgtcggtggcggggatcccataccgctgtcgcggttcggcgcgctggtggcccagctggagtccgtagtggcatcggccaggcagaagacccccgacgcgctgctctgcttcgacctcctctccgagctctcctctgccatcgacgaggcccccaaggagaccatacaactttggcaaaggaaatgtgaggatgctctccaatccttgctcgtccttgggacacgacgtccagttcggcgcttggcgtcatcagcgatgggccgaattatcgagaaaggcgatgtgatatctgtatattcaagggcaagtaacttgcaggggtggttggtcgatgtgaaaagggctgaggccactgcatgtgcaggtgcagcacaatgtctgggggaaatttaccgtttatttggacgcaagattactgcagggctgattgagacatcaagcattgtagctaaactcatgaagtatcatgaggactttgtgagacaagatgctcttctcttgcttgagaatgcattggaaggctcaggtggtggtggtgctgctgcagcttatcaagaggcttttcgtatcatcatgcgaggtgtaagtgataaatcgttcattgtcagagcagcggcagcacgttgcttgaaggcatttgctaatattggtgggcctgcattggggatggctgatttcgattcttctatgtcttattgtgtgaagggtttggaagatagtgtatcttcagttagagattcatttgccgaagcacttggtgccatacttgctcttgcagtgaatccagatgcccaggtgaagaaaggcgggaaaaaacaaactgcttctgcaaagaaaattgaagatggtgtgcagaagcatttgattgtgccatttgtcaaagcaaatggagcaaatgcaaaggaactccggattggtttgactttatcatgggtgttctttctgcatatgattcatatgaagtatggcaccccagatagcgaacttcaaaattatgccatacaaacgatggaaattctccaggggaatgattcccttgatccacatgcgctggcatgcgttctgtatgttcttcgagttggtgtcgcggatcagatgactgagctgacacaacgcgattttttgctatttctgggaagaaagctggagtctttgaactacacagctgcaacgagagtggcaacactacgcattttgtgttacctattgagaagcgttggtgaggttccagctgaattcaaggatgttcttgataacacagttgttgcagcattgtctcattcttctgctcatgttcgtgtggaggcagctttaacattgcgtgctttagcagaggttgatcctacttgtgtaggtggtttagtttcatatggtcttacaacattgcaagctctacgagagactgtatcatttgataaggtcttctgcatataa

SEQ ID NO: 19707 - DNA, 3205 bp, Zea Mays
ctcagcgactactttaattgctgttatcgcatttgaggaggggaggccgggaccccggaagtctgctgctgctcctgctttctagtacctgcccacctgcgcttgcatctgttgcttccctgctgctggcctgcgaatccacctgcatttgctgaggctcatcgccgcgtgtactcctgctctgtgagagtaagaagaacttgaacctcagcggtaaagaagaatatggcagacacggtcacgggcagttcaaggaggtcacaagatgacactgcaacattaatcccacacagtggcaatttgggaggatcaagccggaagggcgtgaaggccgccaggttcaaagatgatgatgaggttgtggagatcaccatcgtacagcgcgattccatggcaatcgaagatgtcagggtagtcgatgatggcggctcagggcatggtggtgggtttgacggcctgtcacttgtgtcaccttcctcgtcaaggagcggcaagctagcatcaaagtttaggcaggtgaaaaatgggctaaagatgaataactcaagcaataaggcgccacagacacagttgggaaagaacgtgaggaagagattggacagaagcaagagcggtgctgctgttgcgctcaagggcttgcagtttgtgactgcgaaagttggtcatgatggctgggctgcagtggagaaacggttcaaccagctacaagttgatggcgtgctgctacgttcgagattcgggaaatgcattgggatggatggatctgatgagtttgcaatgcaagtcttcgattcattagcaaggaagagagggataacgaagcaggtgctgactaaggatgagctgaaagatttctgggaccaactaagtgatcagggttttgacaaccgtctgcggacattctttgatatggttgacaagaatgctgatggaaggatcacagcagaggaggttaaggagatcattagcctcagtgcatcagcaaacaagctttccaaactcaaggaacgagctgatgagtacacagcactcattatggaagaacttgaccgtgacaacctgggatacattgagcttgaggatctggaggcacttttgctgcaatcaccatctcaagctgctgcaagatcaacaacacatagttcgaaacttagcaaagctcttagcatgaagcttgcatcaaacaagggcacaggtccattttaccactactggcaagagttcatgtacttccttgaggagaactggaagcgcatttgggttatgactctctggctctcaatctgcatttgcctctttatatggaagttcatccaataccgtaatcgagctgtatttcacatcatgggttattgtgtgaccactgcaaaaggtgctgcagagactctcaaattcaatatggccttggttctatttcctgtttgccgaaatacaatcacttggattcgatcgaagacaaagatcggagctgttgtgcccttcaatgacaacataaacttccataaggtaatagcagcaggtgttgcagttggtgttgctttgcatgcaggtgctcacctgacatgtgattttcctcggctgctccatgcaagtgatgctgcctatgaaccaatgaagcctttctttggagacaaaaggccaccaaattactggtggtttgtaaagggaactgaagggtggacaggtgtggtcatggttgtacttatgactatagccttcgtattggcccagccatggtttcggcgtaataggctcaaggattctaatcccctcaagaaaatgactggcttcaatgccttttggtttacgcaccacttatttgttattgtgtatgcactgctcgttgtccatgggatctgcttatatctaagcaggaaatggtacaagaaaacgacctggatgtaccttgctgtccctgtgctcttgtatgtaagtgagcgcattcttcggctatttaggagccatgacgctgttaggattcagaaggttgcagtgtatccggggaatgttttggctctctatatgtctaagccacctggattcaggtaccggagtgggcagtatatcttcataaactgccgtgctgtctctccatacgaatggcatccattttccattacatcagcaccaggagatgattatcttagtgtccacattcgcacaaggggtgattggacttcacgtcttaggactatcttctctgagccgtgccgccctccaactgatggagaaagtggactcctaagagctgacctttccaaggggatcacagagagcagcgccaggttccctaaactcttgattgatggaccatatggtgctccggcgcaagactatcgggaatacgatgtgctcctgctcattggactgggcattggagccactccattgattagcattgtgaaggatgtgcttaaccacacccagcatggaggatctgtttcaggcacggagcctgagggcagtggcaaggccaagaagaggccattcatgacgaagagggcctacttctactgggtgaccagagaagagggatctttcgaatggttccgaggggtcatgaacgaggtggctgagaaggacaaggatggagtcattgaactccacaaccactgctctagtgtgtacgaggaaggggatgcacgttctgcactcattgtcatgctccaagagctccagcatgcgaagaaaggggtcgacatcttgtctggaactagtgtcaagacgcacttcgcgcgtcccaattggcgaagcgtcttcaaacatgttgcagtgaaccatgagaaccaacgcgttggagttttctactgcggtgagcctgtccttgtgccacagctacggcagtggtcagcagacttcacccacaagacgaacacaaagtttgagttccacaaggagaacttctaatggcataactggagaagctctggacgtggtcctctaatgatttcagaatgtgaattaccagggttgtaatatatatacgagtagaataaaatgatgggagttattttgttatagatgtcaaaagtcaaccatgttctttttgcaatgtgctctgtccatccctgtttactcctctatgccgtctaggcgaagtagataatgtatcttttgcatacaagcaacattagaaggtgtaacacatgattttttttttgataaaggaagattttattaataacttcaagcacattacatcgag

SEQ ID NO: 19708 - DNA, 4001 bp, Zea Mays
atctcccgacacacgtcctctcagctctgcagcagtgcaccctctgttccttgccgcacccaactcgcccccacccacgcgcttgtgatcaacgcgccgcgctcgttctccatacaatttccacttcagtcgaggccacctcctccccctttcggcacgcagccatgggcaaccgtgcgtcgcgccaccaccgccacgccaccgagcagcagccagagacgccgacccttcccaagccccagatccagccgccgccgccgccgacgcagacgcagcagtaccagcaggccccgccgccgccgaagccgaagccggcggcggacgcgagggcggtggggcgcgtgctggggcggcccatggaggacgtcaaggcgacctacaccttcggccgcgagctcgggcggggccagttcggggtcacctacctcgtcacgcaccgggagactgggcagcgcttcgcctgcaagtccatagccacgcggaagctcgtccaccgcgacgacatcgaggacgtgcgccgggaggtgcagatcatgcaccacctcaccggccaccggaacatcgtcgagctccggggagcctacgaggacaggcgctcggtcaacctcgctatggagctctgcgagggcggggagctcttcgaccgcatcattgccaggggccactacaccgagcgcgctgccgccgcgctttgccgggagatcgtcgccgtcgtccacagctgccactccatgggggtcttccaccgggacctcaagcccgagaacttcctgttcctcaataacaaggaggactccccgctcaaggccacggacttcggcctctccgtcttcttcaagcccgatgcggatgtggaattgacttgacccgattgcctggctggacggtttcagactcagcattactaaaatgagggtctatatatggaaatggcattattcagatatgtccatccttgctgcgtgttctgtatatatgaggcatccagattaactccaaaatatttgactctaaatttgttccaaaggcgacattgtgatggcgttgtagatttgcatcgtttattctttaggcactgcattgtttttgccattggtccttaattgaaggaagcataacagatcaaacttgtgtcaattgcttggtagacccaatgccacatgctcccatgtgagtaggtctgggaaagagataaactgaagcaagccttcattccacaaatgtggagatgctggtttaaccggtgacttggtcactcagtgagacaactctcaccactgcaccagccaccaggcctaccttctcatgtcaaatgcttgcattgcacaacaacaacaacaacatagcttttttgtcccaagctagtcgaggtaggctagatgaaacccacaataaacaaggataggaaaaaaggacaccgaaagggtaaaagaaagatgatataattaagagtaaatataaaaatatacaaagatcatggtttgggcaatcaaaacatggtttgggcacgttgattgctagtctccaagcgcacctatccttagctaattccttggagatattcactccttaagatctctcttaaccgcctcatcccaagtcaatttaggtcgatccctacctctttttacattatcgactcgctctaaaccccttttacgcatcgacgcctcaggaggtcttctttagacatgttcaaacatctcaaccgatgttgaatcaatttcttctcaattggtgccacctcgaccctatcccaaatatcttcgtttcgaactctatccctttttgtgtgcccacaaaactaatgttacatatgcatctctgctacactcaattgttggacatgtcgcatttttgtcggccaacattcagcactgtataacatcgccgtcctatagaacttacctttaagcttttgtggcaccctcttgtcacagaggacgctagaagcatgacaccatttcaactaaacggctgaaattctatgcataacatcttcatgaatgtcaccaatcaccatccttttgaagcatcgatcctatcgaaaagactccttagccacaagttttccattgagggtaacatctccattctcatgtctagtcgcgctgaaattgtacatcatgttctcgatcttagtcctactaagtctgaaaccttttgactccaacatgtgcttccacaactctagtttcctattaacaccttccctactctcatcaactaacaccacaccaaaggatatccccttgtatgtttcttgtgacctcatccatcaccaaagcaaataaataagggctcaatgctgatctttgatgtagtcctattttaattggaaagtcgctagtgtcgccatcacgtgttcggacaaatgcttgccttgcacaaaataggaaattacgtcgtgattttgtcgcataaaatgggatatttactttgcaaaatgttggtttcgtggtggatttcttgcggggtttagttttttctctatatattatccttttttgttttgaaccttaacaagtgaaatgatttgtttatttgcacactgacatgagcaaactgaatgagaatccataatggatgatgcaggggacacgtttaaggatcttgtgggaagtgcatattatgttgctcccgaggtattgaagcggcactatggggcagaggctgacatatggagtgctggggttattctttacatccttttatctggtgttcctcctttttgggcagagaatgaggatggcatatttgatgctgtcttgcacagtcacattgatttctcttctgatccttggccttcaatatctaatggtgcaaaagatttggttaagaagatgctgcgacaagacccaaaagaacgcctgactgctgctgaaattttgaaccacccatggattagagaggatggagaggccccagataagccacttgacattacggtcatcagtagaatgaaacagttcagggcaatgaacaagctcaagaaagttgcattgaaggttgtggcagagaacttatcagatgaagagattatgggcctaaaagaaatgttcagatccctggatactgataacagtgggacaattactcttgaagagctaagatctggtttaccaaaacttggtactaaaatttctgaatcagaaatcaaacagttgatggaggcggctgatgttgatggaaatggtaccattgattacgcggagttcatatcagccacaatgcatttgaatagattggagaaggaagaccgtatactcaaagcttttgaatattttgataaggaccatagcgggtacataacagtagatgagttggaagaagctctgaagaagtatgatatgggagatgataaaacaataaaagagatcattgctgaagtagatacagatcatgatggaagaattaattaccaggagtttgttgccatgatgaggaacaatacccctgagattgttccaaaccggagacgcatgttctaactgtcatgtacaattttattgaatactttcaagaccaatatgcacccttagacataatcctggccccattttcttttgggaacaactgtaaggactcaatatttttttagatcaatttctctgcagccgggacatatttgtaccaaaataggtggtgttatagtgactcgtacttcgatgtttggagcatcatggactcatgggtggcaatgtttattcccattgtactcggagctctgctttttcagagtgttgccacttgtgaattgttctaatgtgttgtggtcttcgaaatcgttcatcgatcagatcaggcaatgccatattactcctgaataaatattagcagtatcgtggttctggattggccttggtgaaatgccgatccatccacgtagttcttttttgggtgaaaatgattagatgaccacccaaagaatcatgtctaggcacctattgtatcctctgcaaaaggttcgtatgtgtaattttgacttgggtttatttctt

SEQ ID NO: 19709 - DNA, 3569 bp, Zea Mays
ctgacaagctctgatgggttgcagaatctggcttcagttaccataatagttgcaggggattccaagtggataaaggtggagaagaagttggttgctaaaggaactaacagaacctcgaggcttcaaataacatccaagaagaaaggaactgtttggttggaccaagtgtcactcatgcctgcagatacatacaagggacatggttttcgtaaaggacttgtgtccatgctgatggatctaaaaccacgattcctaagatttcctgggggttgctttgtggaaggtggttggctaagaaacgcattcagatggagacaatccattggtccatgggaagagaggccaggacacttcggagattgttggcagtactggaccgacgatggtcttggatattatgaatttcttctgctttctgaggacataggtgctgccccaatctgggtattcaacaatggaatcagctacaacgatgaagttaatactgctactattgccccctttgtgaagaatttgctagaggcagtgcgaattcgacatggggctctgttagagccaaaatggggcatccctaaaccatttccagtcaagtatgttgcaattggaaatgaagattgtgagagaaagttttatagaggtaattacctcaagttttacaacgctataagagaggtctatccagacattcaactgatttcgaactgtgatggctcgtccggaccacttgatcatcctgctgacatatacgatttccacgtctatgccgatgctaagactctgttttccatgaagagcacgtttgacaagtcaccccgcagtggacccaaggcttttgtcagcgagtatgcagtttggaaaactgacgccggtagaggaactctcctggctgcattggcagaagcggctttccttactggactggagaagaacagtgatgctgttgagatggcttgccatgctccactattcgtaaacgatgatatcgagaaaaagtggaacccagacgtcatcgtcttcaacacctggcagcattacgggactcctagctactggatgcagaagcttttccgcgagtccagtggcgccatggttcatccgacgacgacgatcagttctggcagctctgctgattctctagcagcgtctgcaattacctggaaggattcagagaataatgactcgttcctaagagtaaagattgtaaactttggatctgatgctattagagttgcaatctccacagctggacttcaagctaccatcgatgtgctgcgatcgaccgctactgttctcacatcaaccgctgtgatggacgaaaactctttcagtaacccaaacaagcctgaggctgtagcctgctgcagcctgtgcactggagcagcagaggcgagagtgaaggcgagagctgacgtggcaggggcgagagggaggctgtgcactggactcagcctaaaagcgaaagaaaagaagagaaagaaatcgagttctgaggcacaggccctagaagttgagagtacctggcttcatgcactgaacttttatggtaatgaagatattcaccaagaatcatctgccaagtttaatagagatcagatgcattcagtcaagtggaagggcataaatgtgcttctgagccacctttgtcctaagtgttctaagaaacatgatgacacaacttcaggaagccaaaccactggatgcacatgttggcaatggttcttcacaccatctactagtaatgatactgcaaatgtagcaagtgccaatggtggaaatacttctcaggtagaagaaaaggttcttgctcctagttacaagttggacaatgcagagacttcagtttcagctgttggccaccatacgaaatcaagcatgcaccatagactgaaaatatggatcagcagcgggcataatggaataatgggaaaatatgggaataagttagaattgggtatgccccatgaagctaggccattattattagatgaacatgcaaaacctggatggccagattggctcataaatgtggcaccagaggcagtgcgaggttggtttcctcggcgccaagattcatttgagaaattagacaaggttggacaaggaacttatagcagtgtctacaaagcccgagatcttaaaactgacaagtttgtcgcactaaaaaaggtgcgttttgtcaatgtggatcctgagagcgtgcgctttatggctagagagattcttattctacggaaactcaatcatccaaacatcatcaagttggaagggatcgtaacatcttcggtttcacgaagcctgtatcttgtatttgagtacatggaacatgatcttgttggtcttgctgcgactcctggccttaagtttactgagccacaggtcaaatgtttatttcagcagttacttagtggcctcgatcattgccatagcaatggagtgctgcatcgggacctaaagtgttccaacctcttgattgataacaatggtgttctgaagattgcggactttggtctagcaacctcatttgatcctgacaatcagcaaccattgactagccgtgttgcaacactgtggtacagaccacctgaacttcttctcggtgccaccaagtatggcccttctgtggatttgtggagcacagggtgcatttttgcagaactgcttgctggcaaaccaatcttgcctggaagaactgaggtggagcaacttcacaaaattttcaagctctgtggatcacctcctgatgactattggagtaaactggaagtaccacaagcagggatgttcaagcccagccgacagtatagtgggtgcattgctgagacatttaaagattttccaaactcagttgttcttctagataacttgcttgcactacaaccatatgctcgtggaacagctgctgagactctccgaagtgattttttcaggcaaaaaccacttgcttgcagcccctcaagcttaccgaagtgtcctccaagtaaagagtatgatgctagacttcgaatggaagaagcaaggcggaaaagaaaggcagctgagagtgtaagtggatttggatccatcgagacagaagatgtaaatcctttagcaagcgggaatacaaaggttgctatgattagacctgaatctgctgatgcaaggaatgcaatacttggttctcagaacaacaatctgggtttgaagggcccagctgtgaacaagggcaagagcagaatatatcagcactcaggttcaatgattacagcaaaaggaaacgtggagcagatgctcaaggagcatgaaaagaatatccaagaagcagtgcgcaaagcgcgcctcagcaagcacagagagttgtgaagcaggttgctgaggataaagtgttgatcatactgtcatttgcgtgttttgactcatgctactccgaaaccagataaaaagattaagttgccgttgcattgattcaatcctgggaagatcaaccacctgttagattggcatggagttccacacttccactacaggttatgcccagcagtttctgaaacatcacccgctttgtagtgccctgtgttgcagcagctttcttc

SEQ ID NO: 19710 - DNA, 2236 bp, Zea Mays
agatggccggctttatcagctgcggcagcgagattcaccgggggaagtatttgcagcgaccgcgccggtccccgccacaaaatcagctacccaccaccgtccgtcagcggcggcggcgagagcatggcggccatcgtggcggcgcgggcgtcggcccccggcagagcggccgtcagcaccatcgccgcgttccacagccacgcgtccccttcccgcgcgctcccgctcgcctcctcctccatcggcggcgccaggcggtaccaccacgcccccgcgtgctgcttcgccaccaagcccaccgcgccggccgctgccgagctcgtcgaccaggacctcgccacggccacgcaggaggccgccaagccacgccggaaacgccggtctcggaaggcgaagaagtccgccaccgccgccaaggaggaggatgggacggacgacaagccggtggcggcggcagaggacgaggcgaaaaggaagaaggaggcggccggcgccgaggacagcgcccgggcattggtggccggcctcgacgacgtgatcgtcaaccccgtgggtctgggtcggcggtcgcggcaggtgttcgacgaggtgtggcgcaagttctcgcggctgggccagatttcgagcgcctcgtccaccgcgctggcggaggaggagcaggccgtgcttatccgtggaggacctatgtgcgagttcactgtgccaggggcgcaggacaccaccgtcctcgtcgtcggtgccaccagccgcatcggccgcatcgtcgtgcgcaagctcatgctccgcggatacaatgtcaaggctttagtaagaagaaacgaccctgaagtgatagatatgctcccaaggtcggtggatgttgttgttggtgatgttggtgatcctgcaactgtcaaagcagctgtatcaggctgcagcaagataatctattgtgcaactgcacgctcaactattacaggagacctaaatagggttgataaccaaggagtaaggaatgctagcaaggctttccaggattactacaacgaattggcccagctcagggctggtaaaagcagcaagagcaaactcctgatagcaaaattcaagtctgcaaagtccttgaagggttgggaggtgcggcagggttcttacttcccaaatacttttgtttctagatttgatgaaggtatcgatgcatcactggatttttcagaagatcagcaggctgttttctcaggatttgtattcacaagaggtggatatgttgagatatcaaaaaggctttctcttcctctaggttctaccctagacaggtacgatggtttactcttttcagtgggaggaaatggaagatcatacgttgttattcttgaaactggtccattggcggacacgacccagagcaagaagtattttgctcggatgactacaaaagtaggtttttgtagggtaagagtgccgttttcatcttttcggccagtaaacccacaagatcctcccctagacccttttcttgtgcatacactaaccattaggtttgaaccaaaaaggcagagacctggtgaggcatctcaaaattctagtgatcctcgaaactttgagctaaaactggaatacatcaaggctttacctactggtcaagaaacagacttcatattggtgtcatgttcaggttctgggattgaatctaacagaagagaacaagttctcaaagccaagaaggctggagaagatgcactgcggaggtcaggccttggatatacaatcgtgcgcccgggtcctctgcaggaagaacctggtggccagcgcgcgctgatcttcgatcaagggaacagaatctcccagggtatcagctgtgctgatgtggctgatatctgtgtcaaggcactgcatgattccactgcgagaaacaaaagtttcgatgtatgctacgagtacgtcagtgaccaagggaacgagctttatgaacttgtggctcatctgccagacaaggctaacaactatctcgcaccagcactgtctgttctagagaagaacacctgattgatgcgcaccatcagactcggacatgtaatatacgagtcatacgacgtgtatattttctcctcctgtaaagccatacgtttttcctatacaagccttgtgtcattcacatggtatgccgtttggcccttctgtaaagatcattgcacagaccgactccaggaaacaaaattttatttttgcaatattgcattgtatgataaaaaaaaaa

SEQ ID NO: 19711 - DNA, 146 bp, Zea Mays
catacatattcattgcattcgatagattgcaacctcgctgacggagagtacgtcctcgtgctggagcaaggagctgctcaggaggtgaccccggacctagcaccagagcccgcatcagaggatctgcctgccactgctttagaagg

SEQ ID NO: 19712 - DNA, 563 bp, Zea Mays
gagcagtaccctgccaggttctaggacgtgtagatactctcaggaaaaggattacttctgttggaaagcaacatgcttcagtctgtgctaagtcaacaacaaaacgtgaagcagaggagcgcctcactgagggcagaaagaaactcgaagaggctttccagcatgggaagcacgccattgatgatttagtaaatgtagcaaaggctttgcgttctatgcctgttgttgatctacatattccaacactatgtctagttggatcacccaatgtagggaagtcatctttagtccggatattatcatctggaaaacctgaggtctgcagctacccattcacaacaagagggattctaatgggtcacattgtatctaatcaggaacgttttcaggttacggacactccaggactcctgacaaggcatgatgatgacagaaataacatagagcgattgacactagctgtcctttcttatctacctatcgctgtcctgtatgtgcatgatctatccgaagactgtgggacctcagtggccgatcagatgtgccaaatcacatgtttcaca

SEQ ID NO: 19713 - DNA, 1362 bp, Zea Mays
ccccgcgtcgcagacatgcggccgcttatccgaaccgctcgctgctggctcctccgcgcgcgtgttcgcggcatggccacgcttccaatggcgctctcccccgccgccatttcccccttcaccaccctccccctctactattcttcgcgtcctcaccgccgcctcctcgcccgcttcttctccgtcgcttcggcaccgggcggagcgaaagggcaccgaccggcggcctccgccgttgaggtgggcggcgtcaagatcgcgcgcgaggatgttgtgaaggaggatgatccgacaaacaacgtgcccgacaatatcttttcgaagatcggcctgcagctgcacaggagggataaccatccccttgggattttgaagaacacaatttatgattactttgacaagaacttcactgggcagtttgacaagtttgatgacctttgccctcttgtttctgtcaagcagaattttgatgatgtcttggtcccttctgaccatgtaagccggagttacaacgacacatattatgttgatggtcaaacagtcttaaggtgtcataccagtgctcatcaagctgagctgctaaggcatggacatacacactttcttgtaactggagatgtttaccgtagggattccattgattcaactcactatcctgtcttccatcagatggaagggttccgtgtcttctctcctgatgaatggtcagggtctcgcatgggtgggacagcatatgcagctgcagaactcaagaaaacactggaaggcttggcaagacatctatttggtgctgtagagatgcgatgggttgacacttacttcccatttaccaacccatcctttgagctcgaaatatactttcaggatgattggttggaggttttggggtgtggagtcaccgagcaggaaattttgaaaagaaatggcaggagggaccatgtggcttgggcctttggattgggcttggagcgccttgcaatggtcctttttgacattccagatattcgactcttctggtcgaatgataaacggttcacgtcccagttctcagaaggcaagcttggtgtcaagttcaagccattttcaaagtttcctccttgttacaaggatatgagtttctggatcaatgatgcatttacagagaacaacttatgtgaggttgtcagaggaattgctggtgatcttgttgaggaggtatgataacagtgcatttgatgcacattggcttagcttagtcatttcaagtttttatgatccttcagctttcatgttgtcatttcgtataataactgaattcaaacaatagcataatcaatctatactatacttaaagcaccagtttcaacggtcgtcccgcgtcat

SEQ ID NO: 19714 - DNA, 5510 bp, Zea Mays
agggagggtacagacggaggccatgaccacatagcagaacacggggagagagaccggccgggggccgggcccgtgacccgtgaggacgagggcagcatcaccggagacggagacggagagcgtcggtgggcgcggccgacccaggaggaaattttcactgcgctattgactcctgtggtgttgggcctcactgggcctggcgagctacgaagcaagagcgtcggtgagagttgttcgttttagctgcgcgacagggcgttaaccccaagaggcccagcgcctcgccgccaccaagcgcagggccgctacctccttgccgtcagatcctccgcccgccgccgctcttctctctgttggggtgcggtgaagactccttgctactcgtgtcgcaagtgtattatcgcgaaattgttgtctgggacaacaagaatgccataaggaaccacagataatcgtgcggtggttaactggttatggataatgacaatggcgatgtggatgacctgggttcagggtggtttgaagtgaaaaagaaacatcggtccagctcaaaatacacattgcagaggtcttcaggtggttccagccataaaattccaaacttactatcacggtcaggtgctaacagtgacagttcaaggtggcatgacaaactgcaacacccatctccgagcataaatgctaatgttggtgttgatgggtctggtagtggagagacaacaaatgttcatggtgaagggtgcaatgatgtaagcaccagccccagtggcctgaatagtggcttaaatgcttcagcctcagaggatagagtagaaagacttgaagaactggcggtggctgaaaaaacaagtgaatctcccgaaaatgatctggctgatcatgcagatccttcactgcctcatgaaccatccacctgttcaggcagtcctgcaaaatgcgcagatctttctcagcatgtaaaatgttctccaaaaacagagtctgtaggtgttttgtccattactcctgtcaagtttggagactttgatgaagttccaggtctatcattaccttcagattcatacagagacaataatacttctagaggccacagacatactgaagatgttgcacatttaaaaaatgtgcaaaaagatgcaagtgaactcaaaccggagacagacacttgtactacaattgatgaggcatctccaattatggtacaaggaacagagacacccaatcatgatagtggtttgatagcctcagttgattctgttaccctatcctgctccaaaaatgatcatgaagttccagttacatcttcatctgttcctgttgcttccatggaaggtagaacgttacttcatgacgaagcaccagcttctgcagattttggatctgaaactgctgagagcaaagaaagattcaggcagaggctatggtgttttctttttgagaatctgaatagggctgttgatgaactttacctcctctgtgaactagaatgtgacatggaacagattaatgaatccatacttgtccttgaagaagctatttctgattttcaagaacttaaatccagagcagagcattttgataataccaaaaaatctcctggtgtaccaaaggagggcatgccaatggctgtgaaagctgaccataggagacctcatgccttgtcttgggaggtcagaagaatgacaagttctccacacaggcaagaaatactgtcttcatctctagaggccttccagagaatccaattggaactggcatgcaagcaggctggtatagcagcagaaagatttacatccagctcttctgaaaaagttttgggtagttcatcaaagctgactacagcatcggcaactgttaggaatataagtttgaaagttgagagtcaggtgaaacttcctgataccagcgtgaaaaagattgctggcgagaagctaagtagggatgcattcaagtctggtaagtcgtatccacaaagtatgccttcatattctgcaaggagtagaagagggtcattagaaccaatctctgaaatagagaaacacacctttaagaaggacagggagttgctagaaaacaaatttgacaggctcaagtcaaccgatgttgttaaaaagactacagctcatcttgaaaaggaaaagcaaattacagcaccttggaagtccatggatgcctggaaggagaaaagaaactgggaagatatactgaaatctcctgtacggagttctcgtgtttctcactctccaggtgttggaagaaaagttacagaccgcgctcgtgttctacatgacaagttgatgtctcctgaaaagaaaaaaagaagtgctttggatatgaaaaaagaagcagaagaaaagcatgcgcgtgcactgcgaattaggagtcaactagagagcgagagggttcagaggctacaacgtacctctgaaaagttgcatcgtgtcaatgagtggcaggctgtacgcagctcaaaactgagagaagtaatgaatgcacgtcatcaacgtggtgaatctcgtcacgaagcatatcttgctcaggttgcaaaaagagctggtgatgagagtactaaggtcaatgaggtccgttttataacatcactgaatgaagaaaacaagaaattcttgctgaggcagaaacttcatgattctgagatgcggagagctgaaaagctacaggtgatcaaaacaaagcaaaaggaggacactgcaagggaagaagctgttttggagcgaaggaagttccttgaagctgagaagatgcaacgccttgctgaaatacagcgcaagaaagaagaagctattttcagaagagaagaggagcgcaaagcatctagtgctgcacgggaagcaagggctgcagaacaacaacgtcgaaaagagataagagcaaaagcgcaacaagaggaagctgaacttttagcccaaaagttagctgaaaaacttcgtgaaagtgagcagcggcgcaagtattacctagaacaaatacgagagcgagcctcaatggatcttagggatcagccttcaccttttcagcgtcgctttccaagtaaagattgccaaaaccgttctagttctgctaacagcggagaagattcacagacaactggcaattccagtgctgcagattctatggttaagtcatcgaataatgcacagataaaacgaaggattaaaaagattcgccagagattaatggctctaaagcatgaatttattgaaccatccataggtgaaagtacaggaatcacgcacaggtctggtcttggagctgccaaagctaagctaagtagatggcttcaagaccttcagagacttcgtcaagctagaaaagaaggtgctgccagtattggattgattgtcagtgacatagcgaagtatttagaagggaaggatcttgagctgcatgcatcaagacaagttggtttgcttgactttattgcgtctgcattacctgcgtcacatacttcaaagcctggagcttgtcaagtcactgtctaccttttgcgcctgttgagagtgttgctctcacttccagctaatcgaacttattttctagtacaaaatcttttacccccaattattcccatgctatcagcatcactggagaattatattaaggtggcagcatccaactctggaagttcaaatcttttgtctaataaaacatcagctgagactacagagtcatcgggtgaagtgttagatggatttttatggactgtggccatgatcgttggccatgtacacatcaatggtgaacaacttcaaatgcagggaggtttgatagaactgattgtagcttatcaaataattcatcgtctgcgagatctgtttgcactttatgataggccacaggtggaaggatccccactcccatcatctatactgtttggcctcaaccttttgtccgtattaacatccaaaccgggaaatttctctactatcgattgggagtcctgcaaatgcaggacactaggtggaaatatagtgcaagaatatgaatatcttagttcacaggacagtttggggtgtcaatcaatgacacttgatcagtttggtgatgccaaatcgccaaccatatacagtgaactggctgaagatagcaaatcctgtaaacaacatgacttgagcattcctgtggacagaaaattggttgatgaagctagtaaagacttgttagtgatggctgctggcctgaacaactcagcaatgcaaccatctgatttgggcattactacagagaagcattctggaaatcctagccagggagatgaaaataacacagtggacagttttcttgaaggaagaaagacgaataatgtatgtgcattgtatagtagttcaggaaaaggcaatgagatgaaccttaagcagcctgcaatgctcttactttctgcactggctgagactggccttgttactctaccatcacttttgactgctgtgttgctccaggcaaacaacaacaggtcatcatcagagcagacattggcgattcttccatcaaattttgaagaagtagccactggtgtattgaaagttttgaataatatggcacgtttggatataacccttttgcagcacatgctgtctagatcagatctaaagatggagttcttccatttaatcagcttccttttgagtcattgcatgaacaaatggagagtgccaaacgatcaggttggtttgctgcttctagagtctctgctacttcttggctacttttctttgttccatgctgggaaccaagctgttcttcggtggggaaagagtcccactatacttcacaaggtgtgcgacctgccatttgttttcttcagcgaccccgagttgatgcccatcttggctgctgctctgatcgctgtttgctacggttgcgatcagaacctaagcgttgtacagcaggaaataagcacggatatgctgcgctgcttgctcaagtcctgccaaacttcaggatcaaattctccagattccattgctgtggatggttctggaaacaattccactgaaagcattctggatatcaggaactcacagggtgacatcccaacaaggtcaagccgcaaaattggacggccagttattgggaagggtgtttcagggggtatcagattcaacagaaataaggttcagaaggatggtaggggaacaagagcaattgacgatgggcctctgaagcaaagagctcaagaagctgcatcgaacttcatgttgcatagaaagatcccagcttcttttttggacagagccgaggagttcttctgcagtgagacatgaaatcggccctgtggttcgcctaacttgtatggcacgagctactgaatttactgttttgcaaggatggtgtttcctgacctgatattttgatcgaatctgtagtctacagattaaaaaaatgagtcatgtacggaaacgaatgcactgtttgtacagaaacacagaagaaaaaactgataagagaatctgatttcgtatgaaagaaaggaactgtccataatttactta

SEQ ID NO: 19715 - DNA, 1721 bp, Zea Mays
gtcacggagaaaagaaaaagtaaccaacctccggtccaacccgatagcccaaaccccctgcgagcacaagcacaaagctaaagctgtgtaagcagcagaatccaatccaatccccagctcgcgccgccccctctaatccctcctccgcaaggcagacaggggccggcgttcactcgggcatccgcgggacggacggggagcaaagcctcagcggcgagtgcgggcgatgaggtcttcggaggcgtcgtcgcggctcgtgcaggagctcgtgctgtacgccgccagcgccgcgctcagctgcctcgtcctcttcgctggcctccgccacctcgaccccaaccgcgccgcttcccagaaggcgcagcaacagaagaaggagatcgccaagcgcctcggccggcccctcgtctccaccacgccctatgaggacgtgattgcgtgcgacgtcatcaaccccgacagcatcgacgtcgaattcgactccatcggcggcctggaccagatcaagcaggcgctctacgagctcgtcatcctgcccctgcgccgccccgagctcttcaccttcggcaagctcctcagcccccagaagggcgtcctcctctatggcccgcccggcacaggcaagaccatgctcgccaaggccatcgccagggagtccggcgccgtcttcatcaatgtcaggatctccaatctcatgagcaagtggttcggggacgcacagaagcttgtggctgctgtctttagtctcgctcacaagctccagcctgctattatcttcattgacgaggtcgacagtttcttggggcagcgacggacaactgaccatgaagccatgactaatatgaagacagagttcatgtccctctgggatggcttcaccaccgaccagaacgctcgtgtaatggtcctggctgctacaaacaggccttctgagctagatgaggccatccttaggcgctttactcagatatttgaaattggaattcctgttgagagtgaaaggagcaagatacttcaggttgtgttgaagggagaaaatgtggagcataatattgattacgatcgcattgcaagtttgtgcgagggctttactggatcagacatcctagaactgtgcaagcaggccgcattctatcctatcagggagctgttggacgatgagaaaaaagggaggaaattagataaacctaggcccttgagacaatcagacttggagagagccttgtcagtgtctagaaagggcaagaaggctgcaagttcagcactgcagtcacctttgtgggtacggccgacagattcagaagacgatcagatctcgtgaaaatctgcagcggagtaaatgcaggcattacgtcgataccgttaggtttccttatgcagtttgcagaggttaaacatatttatatatgtattaattcgttttgcgtttggaacctccaccggttttttttgaagcaaactgcagctggtgaagtggcaagcgtgccctcgtgtttaagttgatcatttcaaaatacgtgccccctgagggccgtaaaactgagaactctatagttgtctggtcaacagtcggtcttggttgcctctgtattttatcttcggtttgactactctagggtggcgaattacaacatacagtataatgcagaaaggttcccaaacgtgcttcggtttttttttacacaacgttggctaagcgccatgtagcagaatttgcttgt

SEQ ID NO: 19716 - DNA, 1370 bp, Zea Mays
acattcatttatctcatttagtatgtctgcagaactattggtgtagtactagggccagtatcggggccttgttggcttcaacatcaaaggcaatttttaacaaaaggaaagagttccaatggcagaagattgacgcgtttctaaaattggcttcagcaaggaccaacttcaagtataacagtgaagttttgccagagcctgacatgaagtccatgaatgtggctagccttgtggagatcagtgatgcatattcacttgaccgtgctatagctacaccagagagagcattgcatactgcaaacctgtgtgtgaggcttttattatctaaggagagcattgtgattaggagacttattatgacagcgaatgcaaaatctcttgcccgtgatctgatctccagagatgctttgatgttccgggtgctccttagtaaggttattgcggatgttgtctaccaatggatgttgagtgccacaggcttgaaacgagttatggagaccaagatccagacgcccatgaccacaggaaagaacgagggacatctggtgctggctgaagaaccatcgaccctgatggtactccaggcggcagtaaaagaccgaaggattcagctcatgttcaccaagtttgtgagggagttgagagaggagcccgtcttgatgattagggtgagctggaacgtgttcctcatctcggtctcatctgccgctgtaggcctgcaccgtttcttggtgttcttcttgaaggaggatggtgccaggttcttggatgacaaggtcaagaaaatgaagatttggctgatggagttctcgaagcggacggctaatctggagattcaaggaattctgtgaatgttggtggcttttggttgaaggatttaatagctgcttcgcactctggtttttggagttactttctgcatcgagtgaatccagttcctgtttacgctggctgtctgagcttgcttggctgctggtgttcccagagatttataaaaacagggttttcctccgtcattccgccgcagctagtatataatagatggttcttggttgttcatgtactgtgtagctgtatataatagaaacattgcaggatcagtgagtaattctgtggccgagtaaagtgcagtggtggaaggcatgtgttacctactggatataaatatgatgatgtgaatgttcagttgaaaaacttgggtgacatgaactgatgaactatagctgatgcctccactttagaaatttagctgttttagtttgtctaaaatcaaacctttctttgacaagtaacttgcataaactcgggcgaaatcgtttgggtagatcatagatgtttgtaaatttgtccgattattaacatgaacagtg

SEQ ID NO: 19717 - DNA, 377 bp, Zea Mays
ccattctagcgctgccagcctgtcactgaaactacctgtgtccggacgcccgatctagcaactagcaagcgccgcatccctcgcctcttcccgacttcccccctcgattcgatccgagctcacttctagggttcttggccccgctccaccgtcgcccatggcagacgatgccaaccgagcggccttcatggagctgcagtcccggatgatagataccaccgcgaagatcaagcagttacaaacccaaatgcgttctaaagaaggggaaaagaagcgtgcctaccttactttggaggaacttcgccagttgccagatgataccaacacctacaagactgtcgctgtccaactttgagtgagatgttatatgtgccttg

SEQ ID NO: 19718 - DNA, 3900 bp, Zea Mays
caccactgctgcaagggcagagatgcctcttgcaccagccatatcccacttccagaactcatcaccggccaaaatcagcgctgcggacagattaggaatctgcagaacagccacaagatgctgtattgataatggacttgttgtccttggaacatgtttcttcgttctggatggttcagaagcagagccagaggagactacgagttagtgttgagcatgacctaggtgctagtgatgctgcaccaaagacactgagattgtttgtcccttactggataaaaaaccactcgtcaattccattatgttatcgcatagtagaaggggaatccacagaaagcacagaagcagactcacttagcagaccagactcgctaagtagagtgtctaagtcttcaaaattttcccttaaatattcttcaaagtctcttgtcagaagaggaacaatgtcgcacagaaatatgcaagtactggaagatattgaagattgtagcacagactatgtgatgctatcaccacaagattacttgaaccgatctgctggtatgcgctctgagtcaagggataacaatttcagtccagctcgagttgcaatatctatggctgttggtggttgcacacagtacagcgtaggagtatcgctttttgagcttgagaacaaggagcatgttgatatcaaaacatttgcttctgatgggtcatattactggttctcagttcaattgaagatggcttcagataggacaaaggtggtaaatttactgccgagagcacttcttatcaatagaattggaagaactatttttctatctgaatatcatgatgagactgaagagcccttacaaccatatgaacctccaaaagtatttcaatggcgatcagaatttggaagtgaacttttaaagttgaggttggagggataccaatggagtacaccttttagtatcaatgctaatggagttatgtgtgtgctcatgaacagcacaacaggaaatgatcaggcttttgtcagggtaaatgtgagaagtggaacaaaaagttcacggcatgaagttgtatttcagcttgattgctggtccagcccatacagggtggagaatcgctccatgttcttgcctatacggtttcggcagtttggtggtgatgatcattcatggcgtaatctgcttccgaattcatcagcttccttctttttggaggacctgagcagaaggcatctattggaagttttggttgatggaactgaccctatgaactccatgacatatgacatcaatgtcgtaatggatcatcagccccttactaattcagatgcccttaagaaggccttacgtgtcactgtcttgaaggaggggaaattgaatgttattcaaattattgattggctgccagataatagaaatcgaggacagataactgaaaggatgttatcaccaatctttcagccatcagaggtcgactatgggcagtcatctcctgatctggatagtgaatttcatgttactttggaactaacggagcttggcatttctgtaattgaccatatgcctgaggaagttctttacctctcagtgcagcaactgttacttgcatactcatctggaattggctctggagtaaatcggctcaaaatgcggatgcattggattcaagttgataatcaattaccatttgttcctatgcctgtacttttctgtcctcaaaagattgaaaatcagtcagactatattttcaagttctctatgacagttcagaccaacaattctcttgatttttgtgtctatccttatgtcggtgtccaggttcctgagaattgtgtgttctttgttaacatccatgaaccaatcatttggcgcctccatgagatgattcaacacctaaaattcgataggatatatagcaatcaaccttcagctgtttcagtggaccccatactgaaaattgggcttctgaacatctccgagatccgatttagagtgtcaatggcaatgtccccaagccaaaggccaaggggagtatttgggttctggtcgtcgttgatgactgcattgggaaacatggagcatatgccggtccgtatagctcaaagataccgggaggaattgtgcatgcggcaaagtgcacttatgaactctgctatatctaacattcaaaaggatcttcttagccaacctcttcagctactttccggtgttgatattcttggtaatgcgagtagcgctctgagtaacatgagcaaggggatagctgcattgtctatggacaagaaattcattcagggccggatgagacaggatagcaaaggtgtggaagactttggggatgtcataagagatggaggtggtgctcttgcaaaaggcatcttcagaggtgtcacaggcatattgacaaagcccatcgagggtgcaaaatcttctggtgttgaaggttttgtgcaaggagttggaaagggtataattggcgcagctgcacaaccagttagcggagttcttgatcttttatcaaaaactactgaaggtgccaatgcggtaaaaatgaaaatatcatcagcgataatggctgaggagcagttgctgcgtaggcgtcttcctcgagctattggtgggaatagtttgctctatccttatgacggacacaaagctactggccaggctatcttgcatctagctgaatgtgctacattccttggtcaaattgatatttttaaaatccgaggaaagtttgcttctaccgatgcttatgaggatcattttttacttcctaaggggaagatttttttaatcactcacagaagagtactattgcttcagttaccaatgatgacccagcgtaagttcaatcctacgaaggatccttgttcagtaatatgggatgtattatgggatgatttggtaacagtggagatgacccatgggaaaaaagatcctccagattcctggccttctaagcttattttatacttgaaagctaaaccttcaaattcgaaggaaattgttcgtttggtcaagtgtaatcgaggttcagatcaagcatctatcatttactcggcaattgacaaagcttataaagcttacggtccaaactcgttgaaggaattcttgagatggaaggtaccaaggccatatgcccctcgcaatagtagtggccgaagtatccaagacttatcatttggttaaaaggtcaacacaaatgcacactttagtgttaaacacagtagaatcttaggatgaaggtattttaggttgacacttttggttaccaggcaaatgatatattctacatatacactataggtatcagaggataggtactttgccttcatgtaaatagatatattttaggaggcgccggtattcatgtaaatgtgaacatctctgttataaagaaaaaaaataataatgcaaattatgcaagattcattgctgctgtcttgttgcaatgtttaatgtgttctcttgcgattgtctaaagacccaaaccgttaacgtgtctttactactatggtttcatttcacagatctctatgatcataccttgctcattaaaagcatttactattcttgtgatggggagatccatgtccgagttttggccaaaccactacagatctggtttccttcggcatatacaatcacattcaatatggattttttgacggaccggttcttcgcgaagagtttatcacttcactactacaccgtgtctcttatagatgtatttatgatcggtttcaggattatgtcatgcagtttattaattgtttttcatttttagaaaactaaactagtgtctcagggttgtacatggcttaagtccctttgaatataataatagtatgcgacaatgcaaagttggtaagatgggagttcaattcatttggtgatgcaaccactactgttagac

SEQ ID NO: 19719 - DNA, 1289 bp, Zea Mays
ccactcctgacctgacccctcccaaatcccaacacctcgtggccttccgccttcgccgcccgtctccgctccgcttccccccgcggggcgggagccgggagtgcgcgctcgcgtccccccaccccctcacctcttcagatctccccggccgctgcctcggttggacctggttgtcgcgcccaggccaagcttggttgtgtccccggcgacggcgatgcggcgaggcgctgcgctgctcctggtggccgtcttcgccgtggtcgccgtagcgaagggtcgtgctgataccccaccagctgaaacaaatagtgatagctctactgcacagccaggccttgggaaattggagcagcatgagcaggcaaatcctaataaggagcatgtgacccaccaggaaggaggagtcagcaatgatattggtgacaacaacaagaaggataactcaacagaagtaaccaacatcagaagagatggctccatacagcagccaaagcacaaagatagcatcatgacaaagtcttcacaaccactagatttcttggaagattctcttatcaaggagtgtgatccatcacatagatgtatcattgaaaacaagaaattcatcgcctgcttaaaagtttctggagaagacacaagtgagagtttctgtcaatgatgatgcaaatagcacgacaatagtcatcaaagttgcagaaaaatcctgcaacatcagcattcacagtgcaatcacaagggagacggctggcagtggcagagtcataaggatgccacttacgccaacatacacgctactgccagtcttccttctcctcgttgcggtggcagtgtgcatcgtggtccggaggtggcgcaaccaggacggcgaccctgcgtatcagaagctagacatgtcagacttgccggtttcggttggaggcaagaaagaacatgacgatcggtctgacaagtgggacgacaactggggagatgactgggacgacgaggaagctccggtgacgccatccaagcctctgcccaacccttcgtccaaaggtctcgccccgaggcgatcggcgaaagatggttggaaagattagttagccacatgacgccacttaaaaggagcattgcggaaatagttccagtgcatgcagtatatttttaccttcatctttgttgttaaatatttctggaggatgctaatgtcagagagtgcaatacattgataccaagcagaaaattttgtgatcttcctctgccaaactgagtaactggcagctattgaatatagttattggacttccgac

SEQ ID NO: 19720 - DNA, 4516 bp, Zea Mays
ttcatattgagctggacttgaaggaacttagaagagcagggagtagggaaactacatgcgagatattcaatttatgcgaattgttgataaacaaaatggatcaattcacttgccttgttaaataattcttttccatctgtagttcaattatactccctctgttccacaatagaagtcgttttagactttcaacaaattcattcaataattgatgtatatgttatgtaatgtgtctagattcgttgccattcatttgaatatagacataaaaagaagacctaaaacgactactaatttggtacagagggagtagtactgttggatgtagaagggcttctttttggaggaaaatatatcttttatctcatcttacttgttcttgatattcctttcaagttgctaactttttcatgccttcacatgaaacaaagatatgccaccaagagtacaaccagccaacatgtatattccttggtgttcaagctggattgtctttgttgacgtcagagctgactatgatttttggcatagcactcggattcaacctcctgtttgaatatgatgatctcatcacagggatatgctttgcaacagtggtacctaatctgctaccatatgctatatcccacctgggaaagaagatggaagggacaataaatgcctgcatagcaggatttgcacttcttagttatgtgcttggcttattggttagccagccacaaattcctctcacgatgaatgtaatattccccaagatcagtggtgagagtgcttactctctgatggcgcttcttggtgcaaacataatggcacacaacttctacattcattcatcagttgtccagggtcagaaaaagtcatctgcagttggtcttggagccttatttcacgaccaccttttttcaatattgttcatttttactggaatctttatggtgaactatgttctaatgaactctgcagcagcggaatctactaatactcttctcattaccttccaagatgttgtagagctaatgaatcagatatttgtaaaccctctggcaccaactatatttttagtggttcttctcttctccagccacatcatctcgctgacatctgctatcggtagccaagtgatttcacaccatttattcggtataaaccttcctctttctggacatcgtctcctactgaaggtttttgccatagttcctactctgtactgggcgaaagttgcaggagctgaagggatataccaattattaattatatgccagattattcaagccatgcttcttccatcttcagtcgtcccactttttcgtgttgcttcatcaagatcaataatgggagcccatagagtgtctttgcatctggagatactggtttttcttgcatttctccttatgctattttcaaatatcatatttgtggcagaaatgctatttggcgacagtgggtggatgaacaatctgaaaggatatactggaagccctgtggtgctcccatataccgttttagttttagttgcacttatatctgtggctttttcactgtacctggctgttacaccattgagatctggaagtcatgaagctgaatcccatgaatggtctgtgcattctcagagagaactcttgaatacttctcaagaaagggaagatgttaaggtggacaatgttacatatgaggaagatcaaagatcagatgttgtcccttctcccagggatgtgcctgacagccatccggaactggccttggactatattgatacttctgacactgctgtagaatctgatcacgactctcaacaatctactgcttatgcatccactgctcctgaaacctgctcctccccgtcgtttactcgcgaggagtcaaaatcagttgttgcagtcaactggccggagcctttggagaaggttcctacttctactgtgatggaggaaagcacagtagaaaatgtggtctctaggatcacgactgaaagagatgttttagtagaaacagatgttgtctcgggcaaggataaggaagatatccgtactttggagtctgagaagtcaattgttgatagcaccccatatgtgtctgatgacggtccgccatcccttactttcagcaggggaaagggctcagatgcaggaaatggcagtggtagtctctcaaggttatctggtttgggccgtgcagcaaggagacagctagctgctactcttgatgagttctgggggcatctgtttgattaccatggtaagctcactcaagaagctagcaccaaaaagtttggtatcttgcttgggatagaccttagaacacctagcacatctgtaagaacggataaacaagctgctgaaatacttaagagcccactggtgagagactcaatgcggggggcagcttttttgtcaagctcagtggacatgatgtcccctaagaatgaaacgtcgaatttggaacttgcatatgggcttcagaggggacctggcatgggattgtcaagctggtctcagggtatgcagctaccaaatacacagctgcagagctcaagcaatagcctacttgagcagagtgcaagattaaactcaaattttagttcatcttattcagacaacaatcagttctaccaacctgcaacaattcatggataccagctcacatcttacctgaaacagatgaatgccagcccaagcctttactctagcatgccgctggacccacaacggcttccaaaatcatctgtgtctgctgtgccaaactatgctgattccatgatgcatgctcgtaatcataacctgcttgcttcactgggtggtactactacacagcttcctgcaacatcccgcgtaggctcaatgatgcctgaaagatcgtattatgatccttccagcgttgatgggaatgaaaacgctggttcacctgcttactcaaaaaagtaccacagctcacctgatatgtctggaataatcgctgcaagtagagctgcactcttgaatgaagcaaagttgggtgctgccattggaccacagtcatacctcagcaggctggcggcagaaagatctcaatatgcaagctcaacagccaggcccgcggctccattagcatttgacgagctttcacctcctaagctccagagtgatatcttctcggcgcagtcaagcatgagaccaagtgctagatccctttgggctaagcaaccatttgagcaattgttcggcatgtcaagtgcagagctcagtaaaggtgacttcaatcttccaggcagatcaggtggcgtggccaaggatgatttctcttataaggaatctgagacgaagcttcttcagtccctcaggctctgcatcatgaagctccttaagctagagggatcagggtggctgttcaagcaaaatggtggttgtgatgaagatctaatcgaccgagtcgctgcagccgagaagctattgatgcaagggactgccgagaatcaactgctgcttcatggtggtgatctccagcaacattcttccgaccaggccggcatccagtacatgcgcacgcttcccaactgcggggaggactgtgtttggcgcgcgtcactcgtcgttagtttcggtgtctggtgtgtccgccgagtgctggacatgtctctggtggaaagcaggccagaactttggggcaagtatacctatgtccttaaccgtcttcaggggatcttggaccctgcgttctccaagcctcggggtgctctgacaatatgcacctgccttcagaaagacaccagagtgcgcaatagcccaccccacagtgggctaacagccatgggcccggtccccacaccgatccggggcgccttcacgaccgcaggcgtggttctggagatgatcaaggacgtggaggctgcggtctcaggccgcaagggcaggagcggcacggcggcgggcgacgtcgccttccccaaggggaaggagaacctggcctccgtgctgaagcggtacaagcggcggctcgccagcaagggccagtagcgcgcgggtgtcagacaggcaggcgatcgcaagcaatgttaggaggagcctgactattgttctccaggggggctgccactggcgccggcctccctgagccctggattttttcgttgcacgacgttcctagggaccggtggttgcccgatggtcgtcttggtcccttccagcaggttttttttttccttccctctttctgttggtttctttttgttggctttgtgatgttttgtaaggggcaactagggtatgtgctcagaaggactcaagatgtacacgcgaagatgtactagtctgctgatgcagcgttgtaaagtccacactctgcaggttaaccctttttggggccgtcaagtgttagtgcgtgccctatgtatgttaatcacccctgcagagaggttgcgaatactgaactactcacagacctgcacctgtcgagatcgtttgtaatatccgacgtcttgttcagaattgttctcactcttttttgcccgttgtgtaatttaccctgaagggacttcaag

SEQ ID NO: 19721 - DNA, 4760 bp, Zea Mays
gtccggcctccagacatcaggcagctctcccgagcatgacgctgtctctgttcacaactcttccgagcacgccgccgtcagtcctttgtcatcatcatcagctcagatctagcagcttcgccttctcagtgatggaaggtactaccatttctattgagattgatggggaggccatctgtcttgacagtgtcggagataatgaacaagaagctgcggagaatggagaaatgcaccaaacaatttacactgatgaaaatggggaacaagtagcctttgacaaccaagaacaggggagggaggaagatctggcaggaaatggagaagaggatagggaccataattctatcattccaagccgtgaggagttgactgaagaattaagaaataaagtcgcatatagtgaggaagaagcttacaggttgtactgtgactatgggcaccgcatgggctttagtgttcgaaaaggaaagcagtactactttactggaaccaaaaccatccgtactaaagattattactgctcaaaagaaggcttgaaggatgatgaacagcttactgaagcaaactttaataagccggagaccagaactaattgcaaagcgatggtccgttttagggttgattctgaaggtcaatggcgagttattcaaataattcctgaacacaatcatgagctagttcgaccggaagaaatacacttactgagatcagtgaggactctttctgttccgaaatctggggtgctgaatgcaatggtgaatgctgaaattcaagcaatgcatgataatttgcatataaatgaagatggtacagaatgccacagccaacttagcatccgtagttacacactgcttgaaccaaaggaatgtgaggcccttgttggatatttcaagcgcagaacaaatgaacaatgtatgttctattgggatgtagaagtagatcaagaaggccgaatgactaattttttctggagggatgggaaaagccgcgttgactatgacagtttcagagatgttgtgatatttgatacatcatatctcaccaacaagtataatatgatatgtgctccatttattggtttgaacaaccaccgacaaaatgtcatgttcggctgtgcatttttgttagatgaatccttaacatcctatgaatggttatttaagtcattcttggagtcagtgggtggtcgtccccctgaaacaatctttactgatcagaatgaatttatctccaaggcaatcgaagttgttcttcctgggacacgccattgtctttgtcaacagctcattgaaaaaaaacttatgtcccatttaggcagtatcaatgattctggaacacttcatagcttgttttcaaagtgcatgagagaatgtgagtcagaagcagaattagatgaaacatgggcgatgatgcatcatgagtataacatgcaggaacacccgtggctcactgatctgtaccagcaaaggcataaatggtgctcggctcttcataaggatgcatttgatggtgggattgaatcaatggataggaatgagagtttgaacaatgttttgagcaacattgacgatgaatcagcttcgctttccacttttgtccttgagttggataaacttgcagggagttggcgtaaaactgagtctttagaggacattcagtgcaaccaagctgctccggagtgtacagttaagcataacagaattttgcaacatgccgctgaagtttacacacataaggtctataagtctattgaaacagattttctagatggatgtagtgctacttcatatcaggcagctcagtgtaatgaaacattgcataagtttgagttccttctggaaaatagtccaaatgtttcggtagttttccttaacacctctaccatggagttgagctgtacttgcaaaaaatttgagaccatgcgtatactttgttcacatgctctaaatgcacttgttctcaagaatgtagataggattcctgaaaggtatattttaaaccgttggacaaaatatgccagaaaaggaacatatccatttccagttgatgaatttgcagaacaagatcgcacagaagttgcatttgtgtaccgtaatagggctatgtggtttgtttatgatctgctgactaagagcaaaagtcatcataatacaagaaaactaattctggatgcacttgaaaatggagaaaaatcactggaaagtatgtgtgacctcaaaagattgcatatgaataccttggggaaagagaaagatggaagcagggttgaaaagagaaagaaaaaatcaactaagcaagagaaacattcaagaaatgttaaacaagcggttttgccccagacagctgacccggtttttgttgatccaccaaatcaagatcaatattttgctgcagaagatattgcatcaaaccaatctgttggtagacctttcttctaccagggatatcccatgactgttgtttcaacaagccagattcaggggcatactaatatgcattctgagcctcagtgtgcatctcaggtgcttaattgagcttttttattctatatcttgtcatagttgatggtggtatgtattgaggagtaaatacaattggaaactagaaatcgttcctagtaaactaaattaatatgagcattcttaacgttaagcaaatgaacacatgtaataagctaacctggcatcattgcttactcttttcttttattcttaaatttccaagacatgcacaaaacttgcttcgaagttctaactatttatcaagacagacttcgcagcaaaagaacaaggctggatttttgtaggttagcttggtttaggccatacaagaagggatcgagtacgaaatgatgatattcgttgataggctagggttaacaccaattgaataaaaacttttttaacactggttgagatggtttggacatgtccaacagagacctccaatgacgctaatgcgtagtgaaattctaaggcgcgatagcaatgagaagagaggtagggaaagaccgaagttgacatggaaagagacaataaaaggagacttgaagggaagaaatataaccaaagatttagccttgaatagaagtgtatgaaaaatagctatccatgtgtcggaaccttgtgattttttgttgggtttcaactctagcgggactaaaaggttttttgttgttgttgttgcttggtctagtttctagatattccaagtccttttaatcagattgtgtatattcttgtcccctcacttcttcaattgggggattgaccatagtcacaacgttcacgggtaatcggggttgatgttcgacaaatgaaagagtacggtatgatgggggggggggggtatacctcttcggaacgtgaatcttgaattgggtacttgaattcaagtactatgggttgatgaacccggatcggttcaacatattaagggccgtgaaccttgtgtttttgggaaaaagagagagggaaaatctatcgtgaatccatattccagaaaaaacaaatgactcttaatctctttcctgatataaatagagggagaaaagttatctcttcgtctcctgtcctgtgactaatcatacccctgtctccttgactccccatccatggctcgagctcgatgctaacgtggcgacggctgtgcacggcctgcggcaatgtcgaggcctgcggcaagggctatgcacagcttgcagggacgtcagatgcgagtgcgggctgcggcgacggtgacagcggccgtcgctgcgatggaggtggttgtgcccgtggttgtgcggggacggcggatgcgcccgcctgtctctttcctcctctcccgtgccggtgagccagaccacgttttgggtcgtcgatcctgggtcacggaacgcctttgaccccgaaccttgtgactatgggattgaccttggaagtgtcacagagtctagttctctacatgaatattctgcttatggcacagttcagccaccatcacaatttggtggtggaagaaatttctgaaaggtgtagtgtcattgacatgtgaatatctgaagctcatatcagttctactgattgttgtatgtgaatgacttgttcatttaggcagtagacacccaacctagcaacagaagaaacaggttgctctcttccattttgtgaatgtactgattgtaaatctgttgtccacttaactgtatggaatatggaagcatcatgttgtaggaaactaaataagaatttgtttttgaagtctgtaccatttatatgctagctaaacaaaccagtgagcactataatagacttcaccacgtgacactgattgccaaattcaaccataaagttctttaccttggaaggttattcactgaagcatggtcttaagggactcccaacatttttggtacagtcagctcttgttcagtaaattatgtaactgtttatgggtggcatacttatttaagagtttgagttgagaagcaaaactgggtcatgaaaaaaaatgttctgtacatacttcagttttaggagcatataaatccattggaatagctgttgaagcaattggctaaacttccgggcctcctttggatcaaaggatgatttcctgaatcctgtgtttttcttgtgtttttgaactaattcttatgaaattcttgcgtttcaaagtttcaaaggaggtcttaagtttgaatcactgatagagttgaaggcttgagtcatatatccactatccaggaaccaagcctggtgcatgaaggccatgcaaat

SEQ ID NO: 19722 - DNA, 176 bp, Zea Mays
tatcctggctcttgtcgctagatgccgcacctcgcctgtgctgaccgtcatcacgtataggcccggaaaccacctctacctacacgagctcgaccggatctccatcttcgcgaattcgccgttgatatccagctcgcccttatgtcgccctcccttctgtcatcccctgctcaacc

SEQ ID NO: 19723 - DNA, 2064 bp, Zea Mays
cgcggtggttgttttatctactgcccgtactggtcgaaatcatttgttgctgatgcaaggctttcaaaagattaacagtctcaattgatgcaaaagcaacacaatcacactaaaggtttggattagacatttcagagcatgggttcgcggtttccatcccaccagctaagcaatggcttgtatgtctcgggccgacctgagcaacctaaagagaagtctccagtcatttgctcctcggctatgccgtacactggtggggacataaagaaatctggggagcttggaaagatgtttgatctccatagaaaatctggtccattgggtaatcaaacttcaaggaatacttcctttggtggtgctgcctccaactctggaccagtttctaatgctgtcggtcgctccaactactctggttctatttcgtctgcaattcctaacactggaggatcttctaggacaaaaactaattctggacctctcaataagcatggagaaccaacaaagaggtcatctggcccccaatctggtggagtaaccccgatggcccgtcagaactctggccctctgcctcctgtacttcctacaactgggctaatcacatcaggtcctatcacctctggtcagttaaattcatctggtgctcaacgcaaagtatcagggcctcttgattctagtgtatcaatgaagatgcgtaccacatcttttgcacacaacccagctgtcacaaatctcaatgtgggagatggttactcgattaagggcagcattccgaccacaataatctggttggtcgcgttgctctttttggttgggtttgtagctggtggcttcattctcgctgctattcataatcctatcttgcttatagtcgtggtggtgatatttggctttgttgctgcacttgtgacctggaacatctgctggggaacaagaggtgtgattgattttatcggtcgctattctgatgtagaccttagaactgcaaaagatggagagtatgttaaggttactggggttgttacttgtggaaatttgccccttgagtcctcattccaacgggtgccacgatgtgtgtacacttcaacttgcttgtacgagtacaggggttgggactcgaaagccgcaaacgccacacaccgacggtttacttggggtctcaggtcaatggaacggcacgcggtggacttctacatctccgatttccagtccgggctgcgagcactggtcagggcaggatccggcgcgcgcgtgaccccatacgtggacgagtccgtcgctatcgacgtaaacccagacaacaaggacatgtcgcctgagttcctccggtggctccgcggaaggaatctgtcgagcgacgaccggactatgcgcctcaaagaaggatacatcaaggagggcagcaccgtgagcgtgatgggcgtcgttcagaggaacgagaacgtgctgatgatcgttcctccagccgagcccatctccactggctgccagtggggcaagtgtgtcctcccgaccagcctcgagggccttgtcctgagatgcgaggacacgtctggcctggacgtgataccggtctagctagagaggttggttctggcgaatcctctggcgcggaaagggagtagaaaaaaaaagatgccttgacgtttggtttggtctccgtgggttgttagggttggaaggatgtgcaaatgcagggtgtgattattgggctaagtaagtaagtacaatatgagtggtcggtcggttacctggagcttgatcgtgatagtatatggtatgtaatttcctcttctcttcttttggctgagccatggatggtgtgcttgtaacaaggatggcttgatgtcagtatactaccctaccataccatggagcatgtttggagattcagtgggttccagtccgtattatgctcctgtttttttttgttgtagggttccaacaatgccttgaagcctgcaatttccttgtgtacccagatctccatagaaatctatttgcctaaacatggactatagcaggtgtattttcgatggtgagaaatcgatgtgattgattcctcct

SEQ ID NO: 19724 - DNA, 4174 bp, Zea Mays
atgggggtcatgaggaaaccgatgacttgctgcacaagcgccgcccactgggtgtactccagattgggttcccctgatgaattgtcacatttcctgctcagtttgctagagtcattgccatcacttgctatacatggttttgttcttccactagctctgcaatggatatcgccaatgcttaaaagggactcaaattcggttttgtatgctatggctgttcgattactctgcaagatatgggctgtaaccgactgggcatttccaaacttacaagtggttctggatcctgagaatttttccaatttcatctctgacagagagatctctgcaagtattgccacatcaatacgcgatgtttgcaagcaaaatccagatagaggcgttgatataatattatctgtctctttttgtattgagagtcgtgattctgtggttcaagctcttggcctcgagagcctctcgtacctttgtgaagcagatgtggtcgatttctacacggcgtggaaagttatatcaaagcaggtgcttgattattacgttgagcctgctgttgctcacagtttgtgtattctgttgaggtgcggagcgatggatgctgaggcatattctgtaatatctggtaaccttgtaagaacattgtggagaattggaacatccaagaaaaataatcccgatccactctgggataaagcaagaggaactgcttttcactccttgtccaactacaaggtatcacttattcaagatgctattcctgatttctggaaactaaactatgagttctttacgaacgaacataatctggcagttctcaaggccatggagcaccttcaagatgagatcatcagatatgagcacatatgcttagtgtcactcttaactgatgaaccctgttcacatagaaatcgtcgtcgagtgactactgacaaaagaactgcagtgcataaatttgagaagctactggaggtttttcctcgggcggtatttaaagggatgttatctcatcatcagttgcctggtgctgctcttttaactctcaattttactccaaaggacatacttaatgaagggaaacctaaggatttgcctagagttcattccgcttttgagcaagcttttgtggaaattgctgaatctatgtatgtgtcaagaaacatagtggtagctcttcttgccttgcagtcatggaagtcatttgtttccaactggatgcaagcagttgtggcattgcttgacactaaagactcgtcaaagttgaacaaagcaatgaaagctgctaatgatatatttaagattctgtgcgaccaagttccggtgtctactcctcaagttgttgttaacatagctcttgttattggggcactggccttgattgttccgccaactgctcatttggtagtatcttcggtatcagattttcttttaaaatggttgcttcaatacgagcatgagcacaagcaatggtcagcagctctctctcttggattaatattcaattgttttcatcctacggacaaaaagagcagacttcaggttattaatgggtttcttgaggttatctcaaaaactgaaagctgtcttgtaaaaggagcttgtggactggcattaggctatgtttgccacggtcttttgacaagagcacataatgctgttgattcagaagtagaggctattacacaactcaatgagcgtgcatcagttgaggatattcttcatgctttggttaccttgttaattcaactatgtccatcctcatgctattctctgaagaagcttagtatatacggaatatcctccatgggagggatggaagaaaatattcatagcttcagtgatgatccttgggctgtcgctggacttgtcattggtctgggaaactctgttgttgctctgtatagacttggagcttatgaagcagttactgaagtcaaggatgtattgatatcatggataccaaatgttgattcgaactctgcattatttgatgaaatagattcagtatcactatgtatgggttcatgtcttgctcttccatctgttgtggctttttgccaaagagtggagctgttgaatgacgacttggatgcattgttcaatcgctacacttctttagcttctgagctcctgaacctcaataaatctgggattatctttcagaatttgttaatggcaatctgtattggtgctggatcttttctctcttctatattgaatgatggcgtgcatgctatggaatttaatggtgttaaaggctttctggacactctcagacatatatatacccacccttttcctccccttgttcatttgggaggcatgtttggtgtggtcaacgcttttggtgcaggtgcaggagatcttactggggtgttttcaaagcctatgacttctcaaatcaaacatgaggagtcatcttttgtgagtggttcattactgacaagtcctgttggtgagactctgtcaacatcaatgattcaggaaatatttcttcttgctaaggatgctaaggataagcacatacaagattatgctgcatgggctatttcatttctcagaagcaggtggtcgaagaatcagaatcagattctttatgaggacaatggttctaatagaagtcctgatgatcatgatcaagcttcaagtttttctgaacaaagcttagtttggaacttaagtctctggttgagtgatctaaaatttgaaaagtctggtgatgtggtgccaataagtacagttggaacagttttaaaatgcctttccaaagctccccgattgccaactacagactggggagctattgtacggaggtgcattaaagctgaggcgcagatttctcataagttaaccaatcaggaagatcctaagatactaaaggaggcatgcttatatttgactctagctcatgctgctcacataagtccccttctgcagtttttggatgatctgactgacatactcagattccagagattagatataaatgttcagtctattttgctcaaacatttgttacacctaatgaagctattctctgattcaagattggataaattgcatgaggattttaccgaatacttgtattcccccacttcttcatacttgaattactcatctgaacagaaaagcatgctaagaatgtcgttctgggaaggcatttatacgtgcctggtggatgtttctgaagaatctggtgttttttcattcattgaaaaatgcattcagtgcttgttgcctcttttgacgctccatagtgatggtcaacctgaattcatgaaagagtggtctgttgctatcttatgtcttacaaacgcccagaaaaaatggctggatgatattttgcagattcgcagtactgccttagtcaatgaaggacatgttgatgttgcaaaaaagattatcctcagagcaagattgtgtgcaactggttgtggttcaacacatgagctgggaaatataaagacagcaatattgtgtacaaaagctgatggtgtttggtggagtgtccttgttgagatcacttcagccttaaactcagccgaaaacatcatcaaaagacagtggcttctggatgcattagacattggctgtgttacagctcacccctcaacggtgctgtgttttgttggcttgctttgtggtagctgctgcatctatatgccgcttcttcttgttaattcgataaatgtactgagcgacttgccggtcaccctgcctgcctttctctccaccatcgtttctgatgatttcaggaactctgtggcagacaggctatggctgttgactactgacatctatacttgggctgaacaattagctcacggacacgatcaacctggacatgatcgtattcatagaagtgaaactgagattgcgacttttttggccaatattctgctctctacatgcattacagtcgaggactacctgtctgttgataagcggctaaagcttgcaaatcttgaagcactctaatcaaagggagatgtgtttcttttctattttatgtatgtatttatgtacggtatcagtcatgttttaatagttgatgtccctgctgatgatccagcaatgtttttttcatgtacataattaatttaactaactcatcttatgcactgaaaacaatctattgttcaaagatagatagacctatgaaataatattgttgtgtaca

SEQ ID NO: 19725 - DNA, 79 bp, Zea Mays
gtatttgattacagggtatctattacagactacatctaaccaaacagttgtatgggtatccctttacggacgtaattag

SEQ ID NO: 19726 - DNA, 9096 bp, Zea Mays
cccgtctcgaaccgacaccggccaggcgggccagccagccacacaccaacccgacacggcgcgggcgcgggcgccggtccaaacccgaatctctcctgtcgattcctccctcttcttcctcctcgtccctcccaaatccccgaacccgagcgcgcgactccctcccgcctcccagatcttccagaacccgctacgattcgggcaatccgccggcccgcgccctagtaggtctccgcgggcgggattggttgatgcctccccgcctcgcgtgaccgctgcccgagggctggaccggagatctccgcatggatcacaggggcggcggcggcggtggcggaaacaagaaccgcaccgatctcctcgctgcagggcggaagaagctgcagcagttccggaagaagaaggggaagcggggtcccggcaataaggccgacgccgatgctgacgcggaggccggggagggggcgcccaaggcggcggaggagtctgtgcccgagccgaaatcgcctgttgggttgaagctcctcgccggggagggcggcggcgggagcactccatttgaggaagcggagaggtctcaggcggagcagtgcaacggtgaggggcctggtaccgcggagtccagctctgtggagagttccaatgcggtgcaagaacaggagacggtgcaagagcaggagacggatgatgtctccgatgcacatcatgtcggtcctagtgagcaggggatttcggagcatcctgaaagccagacagctggtggcagggatctatcacttcaggctaccagtggagacagcattggtgatgataatgtaggacgagctcagctgggtgatgtggatagcatggagctgaatgcttcttctgaaggtaatggagcagatggtgattgcaatcaactaggggaacaccagcaggtggaaatggatgctgttgaaaggccaacaagttccagtttcgaagaattcaccgagttgccaattcattctcaaggcattgaagccgataatatccacggtgaaggggctcaggaaatggtgatggatgtttctgggaggccattagatggagacatacagcatgacatcgagcccacagcttctgctgaaatagatgccgagactgcacttgaagagtcaactgttgcagcttcaattgtgattcctgagagtactgcaagaggtactgagtacgaaagagacactgggtatgaaaccgatggagtagacaaagaggctctcctagaagatccaagcatggtgcatgtaagtgatgaagctgtcactatagatgatttgagtgttcaggccaagccaacagcatcagcggatatgccactttgtgagcagaagggggatccagctttatctagaagtgcggtattgcaaggcattatgccacttcacttcgaggatatacaaaatcatatgttctctgcaactctgtcaagggattttctccagttgcagctagatgaggctgctggcctttattcagattttacacaacagtcttctgacaataccacacagctccgggtactgctaaaagaaactgaagaaagcaaactagcagttgacagagagcttcatcaatgtagacatgagctctccaaggtgaacatagaaaaggggcaacttgaactgaccatggcttccttgaaagaagaaatcaacactagcaacacgaggtgcacatatttggagagtgagctacattcctccaaggagagcacagaacaaatccacagtgaactagctaacagcagattgttactggaagctctgcaaaaagagaacatggagcttactgcaagccttgcttttgagaaagaagccaaaaaagaagttgaagaacagcgggaccatctatcttctgataacaggaagcttttatcggagttgtcaggtcttgagcttagcttagcttctgtgaaagaggaaatggatgctagcagtagcagatgtaatgtttttgagtgtgagctgcgttcctccaatgagaatatgaatcatactttgacagagttggcaaattgccaggctttattggaaacattacagaaagataatttggagctgtctgcaaattctgcctccgaaagagaagcaaaaatgaaactccaagaagacaatttgtatctatgtaatgaaaagggcaagctttcttcaaatttacgtgaactaaatgacaagttggaagtttcgtatgccaagcataagcagcttgagtcacatgtcaaagatacagaaacatactttggacaacttaccgagcagctaattgaggaaaatctgtacacaagtattagcatcgatatttaccaatctacaaccaaagacttagacactaagtacaatattgtgctgggacaattccagaatattatgcgtcaagaacttcatttggactcgtctgaagtcactactgagaatgctgaaagagccattatgacccctagacatgatagccatggtaataatcagtgtttgcttaatctggtaaatgcgaatgactcatgtaactcaactgctttgctgtcgctgaagggccatctagaggtggcaaaaagtgatttgcataaccttgaaaagttgctagagaggatctcctctaggtctgatggacgtgttctggtatcaaaactcattaaatcctttgagtcaaagggaagtgacgatgatactggactgtctgagggggagcatgataatttacaaaagtcaactcgggagatgctatcatgcctaggggagaagtttatagcaatgagctcagatattacaaaaactgaagaatatttggctgaactgtgtaacaaaattgaactttacgtcaagtctactgtgcagcatgatagagatagacaatgtactgttgttcttgaggccaaaatggatgaacttgctggcaagctgagcaactacaaggagacaattgacaatctgcacaatcaggttgctattgtgcagcaggatgcaaacagtaatgctggaaagctcattgatcaagcagaactgttgcagaaggatgcggtagaaaggatttccattcttgagaatgagagaatgtctttatcagatttactcagtgaagtaacaaacaagctcacctctttgggagatgctgtatttcctagtggttccagtgaaattgaaggtctcaatttctgcactttgagctgtgtggaccttgttgctagatcatttcaaagtcttcaggagaaattagaggctgctcaaatagataatgctcagctcaatagttctctggtggagctcaggaaggcaattggtgttgctcaagagaggagtgaacatgcagatggaattgtcaagaaactgtatgattccctacaggaacttctatgtgattcacttggaagttcaaatgaatttggggccagatatagtgttgaggaaccaattgaaagtcaatatggaagactcattgcgcatttaaagaatttgttgcatgaccaccattccgcgctgtcaactaatgctgaacttgagttgagtctgttaagtaaatgtgaagaagttgaggagctcaacatgagatgcagttctctattaaaaaaattggatgaagtttgtattctaaatgaggagcttaagtcagcttcttcaagtaaaaacgtcacactggataaactacacagtagatgccttactgtagcagaaatgttggcttcatgctcagcaaatcattcctcgacagttcagttgatatctgatattggtgaaggatctagcaaggaagatcatattcttaccacccttctcccatgcattgaggcggacgtggcttcatgcatcgagaaatttgaaaatgcagctgaagaaatccgtttgtctaagatatgcttgcaagaaatcagcatatttgaccagatttcatttgaaaaatggtcttaccccttgcccacattgattaaagaggaagttttaccaaagatatgtgatttgcaagacagattcgaccagctcaatgcactaaacattcagctggaaactgaagttgcagtcctcaaggatggcatgaaagagctggatgaagatcttggaacttcgcgatctgagcttcagaaaaaggtttctgaacttgaacagttagatcagaaattttcatctgtgaaggaaaaacttagtattgctgttgcaaaaggtaaaggtttgatagtgcagcgtgacagccttaagcagtctttgctggagaagtctggtgagatcgagaaactcacacaagaactgcagttaaaggaaacattgctgaaagagttggaagccaaactcaaatcctatacagaagcagatcgaattgaagccttggaatcggagctgtcatacataaggaattcagctacagctctaagggattcatttcttctaaaagactctgttcttcagagaattgaagaggtcttagaagaactagatttgccagagcaatttcattctcgagatattgttgaaaaaatagaactgctgtcaaagatggccattggcactcctttcactctacctgatggtgataagggatcctctgttgatgggcattctgagtctggtgtggctatgaatgtcatagacgatgagcagaactcaaattcaaattcagtatctgatgaagtaaagagcaaatatgaggaactgaataggagattctgtgagctggctgaacagaacaatatgctggaacaatctctagtggagaggaacagtcttatacagaaatgggaagaagtccttggccaaattagcatccccccacagttcaggatgttggaagcagaagataagttagcatggttaggaaacagattcttggaggtggaacaggagagagattcattacagttgaagattgagcatcttgaggattcctcagaaatgcttattgctgatctagaagagtcacataaaaggatatctgaactcagtgcagaggtggttgctataaaggctgagaaggatttcttttcacaaagcctagagaaactgagatttgagttccttgggctctctgagaaagttgttcaagatgagtttgttagagataaattgcgaatggatctatctgaactgcgggataagttcgctgaaaaaaccgaggagagcaggcactaccatgaaatggacaccgaggtccacaaactgctgaatttggtgcaaaacacattgcaggatagcactaactctgaaatttcatctggaggcatttctgctgtgttgtgcttgggcaaaatgctgaagaaacttttagatgactatggcactcttctgtacaagtcgactgaaggcaattttgccgagagagacattcagttagaggatatcaagccatctaaggatgcctctaaatcggacactggtgcatacgagaaagagatggaactaaattctttaaataacgagttagatcatgctcacaacaatctggccttagcgcaacaggagtgtgatgaagctgtggagaaggcacaatcactaatgatggaaattgagaccttacatgctcaaataagtaaattgcaggaaagtgatgctgaacaaatgcaaaagaaagagatggaactaaattctttaaataacgagttagatcatgctcgtaacaatctggccttagtggagcaggagcgtgatgaagctgtggagaaggcacaatcactaatgatggaaattgagaccttacatgctcaaataagtaaattgcaggaaagtgatgctgaacagatgcaaaaatatcagtcgcttgtccttgaactagaaagtgtgggtaagcaacgggacaatctacaggagcggttaaatcaggaggagcaaaagtgtgcctcattgagggagaaactaaatgttgctgtcagaaaagggaagggtctagtgcaacacagagacagcttgaagcaaactatggaagagatgaatgtagtgatagagaaacttaaaagtgaaagaaaacagcacatagaatcacttgagaccgagaaatcatcgttaatggatcgattggctgagaatgaaaagagcttgcatgaaacaaaccagtacttgagtggactattaaatgctttaaatagagtggatgttgctcgggaatttgatatggatccaatcaccaaggttgaaaagatggctaaatttttccttgacctacagtcaacagtggcttcatcgcaaaacgaagtgatgaaatcaaaacgagcaacagagctgcttcttgctgagttaaatgaagctcatgaaagggctgacaacctgcaggaggaattggtcaaggcagaagctgcactttctgaatcttctaaacaatacattgttacagaatctgcaagagctgatgctgttcgtcagcttgaacttattatgcatgcacagtcacaaacaaggaggaggcaagcagatcatttgctggagttaaactccaccagcagtcaactaagagaagtctgctttgaactttcacactgtcttgttaatacattcagtaaggatgtggaccttatctgctatgtggtgaacttcatgaggtcttctggtaaattgatggatgacacaaatacgatggacataccgattgcctctaaacatgttttgtccaaccgcacaaacaacaagaaggctcatattccaaatgctcctttggaaattaagacggatgatacggatgacagtcagtttttgcatcatcttgctattgcatgccatgctttatctgattgtgttaaggactgtaatgatctcaaaagaaacattgatgagcatgacttttcagttgaacagaaagcaaccgagctatttgatgttatgtccaccttaaagaataggttcacttctcagcataatgagttggaatctttgagagcaaaatttgttgaactacagtcagagatggaagaaagagacaaggagattatatttgcacaaaggaatatgagcttgctatatgaagcatgcgcaagttcagttgctgagattgaaggaattagtgatatatatcctggtaaacacagctatgctgttgaacattctgcagatgaatgtataaaatcaatcgttgaacagttagttatggctgtaaaaacttctcagaacagtaacgaaggtagcacaaaggagctgaaggctattgttcttgagttgcagcaggagcttcaagctaaagatgtccaaattagcacaatcagttctgatctatcatatcagttaagggtggctgaatcttctgcaaagcagttctcagttgatcttgaagatgcaagaatggagctccaaaatttggagaaacaagttgatgtgttgcagaatcagaagaaggatttagagactcaattaaatgagcttaaaaatatggaatcaatggcaagtgaacaacatggaagaattgagaaattgactgatgaattaagcagaaaagatcaagaaattgaaggtttggtgcaagcactcgatgaagaagaaaaagagcttgaaatcttggagaataaaagccttcagttggagcaaatgctgcaagagaaagaatttgccttgaagacctcagaagtttctaggaccaaagctttggcaaaacttgcaacgactgttgacaaatttgatgagctgcatagcttgtctgagaaccttcttgctgaagtggaaaaccttcagttgcaattgcaagaaagagattctgagatctcatttctgcgaaaagaagttacaaaaagcactaatgaactgctaaccactgaagagagcaacaaaaattattcatctcagctaaatggtttcatgaagtggttagaaagagaactgttgcagttcggcttccattctgagagtgccaatgattatgattacactcaatttcctgtctatatggatatgttggacaaaaaaataggatctctgatagccgaatcagatgatttaagggttacagttcaaagcaaagattctttactacaggttgagagggccaaaattgaggagttgatgcgtaaatcagatggtctagaagcttcattgagccaaaaggattcccagatagggttacttcgccgggacagagcatccaatcagcagagcagatctataaatttgcctggcacttcagagattgagcaaatgaatgacaaagtaagcccagctgcagttgtcactcagattcgaggcgcacgaaaagtcatcaatgaccaagttgctattgatgtagagatggagaaggacaagccttttgatgatgaagatgatgacaaagcccatggtttcaagtcattgactatgtcacgctttgttcctaaattcactcgaccggtatcagacagaattgatgggatgtgggtctcaggcgatagattgctcatgaggcaaccgaccttaagactcggcgtcttgatatattggattgcactgcatgctttgcttgctagttttatttgaactctgtaaagatgtagccatctcctggcgagtgactgtacagtactctgtgtctatagcaagttatatctaaacagaagcagtttgcactgataccgtgattcctttcgaaaatgttaccgaatacttgagccgtattggcagctgcagaaatcttcatgatgcattttcacccttcatcctggtgcaaatcctgtctagcttagtttgtgttcaattgatacaaatggatggaagagaactgaaggaagcagcagcaaagaaccccctgtacatacatttttgtttgctctattctttgcttttagaaaaaagatggagggcattctacatgctagcgactacttactacactatatgatacaggattacagggaagtgacatgtagttttggaagttagggttttgggatggtagcaggtcatcccctcccttgagttggccccctcaatcccatcatgccttctaatctttttcgtttacatgtataacacagtgattatatcatttattgtaatccacatagtgtgcaatgggggagcttgcacattttattaacgtcaagtgaagcctgagtgctgaaagttcatgtcaggtctgatttggggagtgcgttgagccctggcgtatgctgtgaggcttcagcggttgttttgctactgttgc

SEQ ID NO: 19727 - DNA, 2380 bp, Zea Mays
ctcgtctccccctccgtttccagcctcaaactcttgccctccccccggcaccacactagcctagtgagaagtgcagcagcagcaccagcggcagaagtgttacttagttgctcctcctacctgtgctgctgcgcaggagcagagcctgaaaggacgacggccgtcggcgtaaggggagcgagcgagcgagcggccatgaagtacgtgctggtgaccggaggggtggtgagcgggctcggcaagggcgtgacggccagcagcatcggcgtcgtgctcaaggcctgcggcctccgcgtcaccaccatcaagatcgatccatacctcaacaccgatgctggaaccatgtcgccgttcgagcacggggaggttttcgttttggacgatggcggagaggtggacttggaccttggaaactacgaacgttttctggacatcaaattgacccgcgacaacaatataaccacgggaaagatcttccaggctgtcattaacaaggagaggagaggcgactacctagggaagaccgtccaggtagtgccgcacatcacggatgagatacaggactggatcgaacgcgtcgcggtggtcccagtggacggcaaggaagggcctcctgacgtctgcgtcatcgagctcgggggcactataggggatatcgagtcaatgcctttcattgaagcgttaggtcaattctcgtaccgtgttggacctggaaacttctgtctcgttcatgtcagtcttgttccggttctaaatgtagtcggtgaacagaaaactaagcctacacagcacagtgttcgagggcttagagggcttgggttagcgccggatgttttagcatgtcgcagtactgagccattggaggaacatgtgaaggccaagctttcacagttttgccatgtcccggtctcaaatatagtgaacctccatgacgtgacaaacatctggcacatccccttgctgctaagggaccagaaggcccatgaagcgattctgaaggttttagacctccagtatgatggaaaggtgcctcgggaacctgagctaacaaagtggactaaaagagccaccaagtttgacaagttgaagactccggtcaagattgccatggttggaaaatacactggcctgtcggattcctacctgtctgtcataaaggctcttttgcatgcatcggttgctatggaaagaaaacttgtagtcgagtgggttccttcctgcgacctggaagattcttcagctaaagagacccctgaagcccataaaaaagcatggaaattgctgaagggcgcagatggcgtactcgtccctggagggtttggggacaggggagtccagggcaaaatcctcgccgcgaaatacgcacgcgagaacaacgttccttatcttggcatctgcctgggaatgcaaatcgcggtgatcgagtttgcccgctcggtgatgaagctacgaggtgccaatagcacggagttcgatccagctacgacgtcaccctgtgtcatcttcatgccagagggctcaaaaacccaaatgggagccacgatgaggcttgggtcgaggaggacctatttccatgtcagtggctgcaaatctgcgaagctgtacggcaacgccagctctgtagatgaaagacatcgccacagatacgaggtgaaccctgacatggtcccagactttgagaaggccgggcttcagttcgtgggcaaagatgagagtgggaaacgcatggggatcgttgagcttccctctcacaagttcttcatcggtgcacagttccatcctgaattcaagtcgagaccagggaagccatctccgcttttcttagggctgatagccgcggcgtctgggcagctagaaccattgcttcagcgcagcaatccgacaacgaaagcatgttcgatcagtaaagtcccgaaactgaaactgtaccccactgggcctgtgaataatccactgaacagcttggtgaacgggtactacccaaatgagaagagaaggctaagattcagcaagcccccagctccagcgacacatggttccgacatttttaacgaggaacgccttccagtccgttgaagcgagctagccatagggtggtgaggtctagtgtgatgttgttgttgtttttttctctttcctttttttttggcctggaactaaggcgcgaagtgttttgagtagcgctagtagagcctggaagaagttatctaaactatttgtacattatggaagaacttatctaaggactgaatacacaaatgcttggccatgattgctttgttgccacaatatgaacaaccacgctcagatgaagagtattggtgttgttaaaaaatgccagtgaaattgttgttgttaatgtttgtgcctgtgttgccct

SEQ ID NO: 19728 - DNA, 1545 bp, Zea Mays
tggcatcatttttttttggggtctggggtttagaaaggttgatccagacagatgggaatttgcaaatgagggttttctgagaggacaaaaacatctgctgaagactatcaacagaaggaaaccatccttgcagggtaacagccaaccacagcaacctcagttgcagaacgctcctgtgccttcgtgtgtagaggtgggtaagtttgggttggaggaagagattgaacggctgaaaagggacaagaatgttcttatgcaagagcttgtaaggctgagacagcaacagcaaacaactgaccatcagctccagactttgggcaagcgtcttcaagggatggagtcacggcagcaacagatgatgtctttcctggccaaagcaatgcaaagtcctggtttcctagcacagtttgtacagcgaaatgagaacagcaggaggagaatagtagctgcgaacaagaaaaggcggctgcccaagcaagatggtggactcgagtccgaaagttctgctgcttcgttagacggtcaaattatcaagtatcagccttcgatcaacgaagcagccaaagcaatgctaaggaagatcctaaacgtagattcttcgcataggtttgaatctatgggcaattcagataatagtaataataataatattctgctggaggattatatgccggccgcccaagcttttgagagctcttcgtcgacaagaaattctggggtcacccttgcagaggttccagcaaactcaggcttggcgtatgtcggcacgagctcggctatctgttctcctccagcggcccctgaaatgcagtgcccagtggtgctggataacaaggcgtacaagcaagtggccagcatgagtgctgtgcctcctgtttcaagtgacatgggtattattccggaattctcagatctggcagacttggtctctgtggatattcttggaggggcctttgagatgatgcctggtcctgagttccccctgccagaagaaggtgatgatgggaccaccatgtacaacaacaacgacgaggaggctcagagccttccaggcatcatcaactccatctgggagcagttcctggtaggcagccctctatctaccgataatgaggaagttgattcagcaggcggactatatgcgcaggaggatggatggagcaaagtggggaacatcgctaatcttacagaacagatgggacttgtatcatcaacaaatcaccgggactcagggaatgggctgtactagtatcttaattaatacagtagactgaggattctggtaataagtgttgcatgctcttttcttatttaattattttcccccttttcgccaactcaatatgggaggtgggggtgaggagattcaaaggcatgtttggctcgttacctaagttgacacactttgccaaacttacttttatgactaaggttagttatttaatttggacgactaactttagacaaagtgtgacacatttagccacaaaccaaacagaccctctgtctttcagccatgtatgatctatatgactacttgttctc

SEQ ID NO: 19729 - DNA, 260 bp, Zea Mays
agaaggcggccacagccagactagcagatagagaggcggagccgcggaggccagcatatctccctcgttttggtttgcgcccaagcaagcgcgtcacgcgagcaccgccgctgccgccgttcactttccccctgaacaccagccgccgccgccgccgccgccgtcgccgccgcatgcacgcacgctgcctctgcacgagcggcaagcggcgatccggcgatcctcgtcgatccccgccctaacgcgctgcggtggtccgt

SEQ ID NO: 19730 - DNA, 4257 bp, Zea Mays
cccgtaccaggtaccaccacccacccaagcgtcgccggccgccgcgggcgaatccccgcgctggaatcgacaccccgcctgttcgctggactcgctgcctcggcccttctcttcgcacctctctcagcctcgccacccgggtccaattcgccccgcggtataggaatcccatcctagattccatcgaggggctgcaatgccggcacctgcctagctggaaatcgggcgctaacggacaccgggcgccgagatgggccgttccggccgccgcaggcgggaccgcatgcggtggagcaatctctacaccttctcctgctttcgcgcccagcacgagcacgccggcgatgcgggcccctcctccgacggggctggcgccgtcggcgggccgggcttctcgcgcgtcgtgtactgcaacaacgccgccctgcagaagccgctcaagtacatcaccaactacatcaccaccaccaagtacaacgtcgtcaccttcttccccaaggccatcttcgagcagttccgacgcgttgccaacctctacttcctcctcaccgccatcctctctctcaccccggtgtgccccttctctgccgtcagcatgattgctccgctggcatttgtcgttggcctcagcatgatgaaggaggggttggaggactggcgccgcttcatgcaggacatgaaggtgaacaaccgcaatgtcagcgtgcacaagagtgatggcgaattcgactaccggcactgggaggacctttgcgtaggcgatgtggtcagggttgagaaggaccagttcttccctgctgatttactgctactgtcctcaagctatgaggatggcatttgctatgtcgagacaatgaacctcgatggcgagacaaaccttaaggtgaagaggtcacttgaggttacgctgccgttggaagaagacgagtcctttaaagatttccaggcagtgatacgctgtgaggatcccaacccgagcttgtacacattcactggtaactttgagtatgagaggcaggtttacgcccttgatccgtctcagatacttctgcgggactcaaaactaaggaatacagcctttgtctatggagtggtcatttttaccggtcatgacagtaaagtcatgcagaactcaactgagtcgccatccaagaggagcaggattgagaggaagatggatttgatcatatacatcctgtttactgtgctcgtgttgatatcactcattagttcaattggatttgctgtgaggatcaagttagatttgccccgctggtggtacttgcagccacagaaaagcaataagttagatgatccatcacgccctgctctttctgggatattccatctaatcacggctctcattctttatgggtatctgattccaatctcgttgtatgtctcgattgaactggtgaaggtattgcaagcacatttcattaaccaggatattcatatgtttgacgaggagactggcaataccgctcaggcgcgtacatcaaacttgaatgaggaacttggccaagttcatacaatcttgtctgataaaactggtacactgacctgcaatcagatggatttcctgaagtgttcaattgctggagtatcatacggcgtgggttcaagtgaagttgaacttgctgctgcaaagcagatggcgtcaggtgctgatgaccaggatatccctatacaagatatatgggaagagaacaatgaggatcaaatcgagttggtagaaggagttacctttagtgttggcaacaaccgaaagccctccataaaaggcttcagttttgaggatgaccgtctcatgcaagggaactggaccaaggaaccaaattcttccacaattctactcttcttcaggatacttgctctgtgtcacacagcgataccagagataaatgaagcaactggttctattgcctatgaagcagaatcacctgatgagggggcttttctcgtggcagccagggaatttggatttgaatttttcaaacgaacacaatcaagtgtctttgtcagggagaaacacacttcttcgaaaggcacaattgagagggagttcaagattctcaatctattggaattcaatagcaaaagaaaacgaatgactgtaattctgcaggatgaagatggtcaaattcttcttttgtgcaaaggagcagacagcatcatatttgatagattggcaaaaaatggaaggatgtatgaagttgatacaactaagcacctgaatgaatatggtgaggcaggcttgcgaacattggcactatcgtacagggtgcttgatgaatcagaatattcttcttggaatgctgagtttcttaaagcaaagacctctattgggcctgatagagagttgcaacttgaacgtgtctctgagttgattgaaagagagctgatccttgttggtgcaactgctgtagaggacaaattacaaaaaggggttcctcagtgcatagatcgtttggcgcaagcaggtctcaaaatctgggttctgacaggtgacaagatggaaactgcaattaacatcgggtatgcatgcagtttactgaggcaaggcatgaaacaaatatgtttgtccatacccactggtgagcaggtagcccaggatgcaaagaaggctgcaaaggagagtctcctgtcgcaaatcgccaatgggtcacaaatggtcaaactcgagaaggatccagatgcagcattcgctctagttattgatggaaaagctctagcatttgctttggaggatgacatgaagcatatgttcttgaacctggcaatcgagtgtgcttctgttatatgttgccgtgtgtcaccgaagcagaaagcactggtgactcgtctcgtcaaagaaggtataggacaaaccactttagcagtaggtgatggtgcaaatgatgtgggcatgattcaagaagctgatattggagttggtataagtggggtagagggaatgcaggcagtgatggctagtgatttttccatttctcaatttcggtttcttgagagacttcttgtcgtccatggacattggtgctacaagagaatcgcccaaatgatttgctacttcttttacaagaatattgcctttggacttacaatattttactttgaagcattcgctgggttttctgggcaatctgtatacgatgattggtttatgctgcttttcaatgttgttcttacctcgcttcctgttatatcactcggagtttttgagcaagatgtttcgtccgaaatctgcttacagttcccagcattataccagcaagggccaaagaaccttttctttgattggtaccggatccttggatggatggggaacggcctcttctcctctctagctatattcttcctcaatctctgcatattctacgaccaggcaatccgtgctggagggcagactgcggacatggctgcggtgggaactaccatgttcacctgcatcatctgggctgtcaacatacagattgccctaacaatgagccatttcacatggattcaacatctctttgtatggggcagcataacaacttggtatatcttcatcctcgcctacgggatgacattgaggtccggcgacaactaccagatcctgttagaagtccttgggccagctcccatatactgggcagggacgcttctggtgactgctgcttgcaacatcccctacctgatacacatatcctaccagagatcgtgcaatccacttgatcaccatgtgattcaagagatcaagtatctaaagaaagatgtcgaagaccagacaatgtggaagagggagcggtccaaggccaggcagaaaacaaagattggtttcactgcgcgggttgatgcaaagatcaagcagattaagggaaaattgcataagaaaggcccatctttaacaatccaaacggtatcttaggaatctcggtggcctgacaggctcgtcaacagtagttgccactttgttgtttgcttctgcaaggcagtggttttagcttctcagggcaatatagcaaaattcttttcttttttttccttatttctttattccccccgggagtcttttttttatcttcatttgtgtaagaaatgttggggtgtaatcggtggtgttcatcctagtagaagcttcatagccagccgtgtaaaaaatatagctcatttcagttggaaaaacaagctattgatatagctgacaacatatgtatatctgcaattttgattgttccctatcgatatttacggcggtgttggtaatggtagctg

SEQ ID NO: 19731 - DNA, 2647 bp, Zea Mays
agcgtgcctctggagacggtgttgtagatggagtacatatcccctgagagaaatctggaggggacttgtggagatcctgggccgttatttgccgaccaaggtggcagcttgttggaccacttgggttatcaagggggaggaattccacaacatgagtctccaacactggatcatggacttttggttgatccagctggtgcaattccgtatttatctacagattctccgcccttcatgaatgatcaaatcacttgcaatgttataaaatctgcttcagctagtccagaatcttgtacaaaacaacctcaagaacctcttaatgtagaatctgatgtacagaatgacgcagctgaacaaaatgttcacaatagtaactctgaagaacagatcacttctctgggctgtgatgtacagcagaacacagaagtaattgatgaactgttgcctccaaagcttcctgaaagcagtggtaatgatatatcaaactttcaaccggaaactacatattctgatgcctaccatggtgactctttgttaactgaaaatagttgtaatagttatcagcttaacaatagtggtgctcctgctgctgatattccaaactctcctgcacttcagatggaaaatgaggagatgggaaagttacatgagacttctcacaatgaaaacagtgggtcagaggatgatcaaatgaatggtaggaagccttgccccattagtggtcgagacaatgagaagtttaacacttcagctgtacctccctcttgggaacagacaaaacaaaaaaatcctggtaccagaaatggaagttcaactccagacgatcaatttgattctcctccagacaggtttgcaagattggaaagggacacaccatctccagatgggagagtatcccctgaaaggtttgcaagactggaaagggataccccacctccagacggggatatatctcgtccaggtgaaagttcacatgtccattctgagacgatggagatggagccagaatatcgcgccaatgatgataccccacctccagacgggaggatgtctcctccagttgaaagttcacatgtccattctaagaagatggagtcacaacaccatgccaaagatgttggtgagttagctcgttttgaaagcccacaggtaagacatcggtcccgatcttctgaaaaacatgaccccagccgcaaaagaacctcttcaggggagttgtctccacatgcgcgtcagaattctcctgtagaaaggaaaagacggagagagtctcgccatggtgatgggtcacctcgacagagatctgcatctccccgaagaagatctacaccccctcgaagaagatctatatcccctcgaagatcctcacacaagaggagggaatcaccaagaaggggagactcacctaggaggaggcactcacctaggaggagggagtcaccaaggaagagagactcaccaaggaggagagactcaccaaggaggagggattcaccaaagaggaggagggactccccaaggaggagggataggtcaaaatcaaggtcaccttcaagaaaacatgacacttctagacataaaaaagaacatgacagatctcggtccaggtctccccactcaagggatcatcacagacgatctccaagaaggcattcaccaagacgcagatcacccccagccagtcatcgccatcattcaccaagaagacattggtcaccacctgccaacaggaagactggattgggtaagcctggaaagaatctctttattgcaggatttagctatgccaccactgagcgagatttggagaagaaattttgcaagtttggacgtgtaacaagtgcacgtgttgttcgtgataaacgaactggagattcccgtggctttggattcttatccttggataaggatgaggatgctgatgcagcaatccgtgcttgtgacgagactgagtggaatggaaggatcattcttgtggagaagtcaaaagcacctgcatggtgaatcttccgctttgggggcgcacacgccattgttcgagagggatttcattgcttcacctttcacagattttaccattcagaaaaaaagaaactaccggtatgacatactcggtacatgtcaaagttcacccgaacctggcttttgatgctgtactaggaggccctgctgctgataagagggacttacgacttagtggtacttttagtgtctgcaacctctacacgtgaaatgtgatacgtgcctgttcgtgagctgtcagttctcttcttcaccttcatctcgcgcccactgaatactgatggcatgaacggattccgggagactcaagctttatggtgttgttgcgactcaagggttatgttagcagttcaataatctgcatattagcttttcaatgttgtgcatcctctgaatgagggtttggaaaatgtcctatatagtttgtgttttggattccagatgttgtttaattatggtcacgacacgatacctatgccccatctgttgactgttggtgatgttttttttcctgatgacatgtcttttcatcctgtgttcttgaatctagagttgtctgtctattggcgcaatattagtgagatggaaactgagcgtggatgcctgccagtgtctttcgttttag

SEQ ID NO: 19732 - DNA, 2984 bp, Zea Mays
ctgaaatgccagtggtctcttctccatttcacctgatccgtatctgtttggagttagaagcaagggttctcatggcatctccacaagaatccaattctctgtgcttgaagcgaaagcttgttgatgactgcctgtcaaaagactgcaaatctcgccgtgtcaaatctgagaatgagccctcatctgattcatttgctaaacgctgcaactgttgctgcactcgacctaatcttgccaatgattgtgtgaatttcctgaagagtggagcgccaaaccgtgtcatgtattacaaaaaaggttcgtggcacaattttccagagcaaataatgaattccctcatcgatgaatttaaaggaaataaatcaagtgttgtctctgtgatggatgatgaaccaatccttgttgatttcttatcaatgaccctggtcaacctgaaaaccagaaagcagcggtctgttgcctggtttgatgacactggcaagcgtttctttccttctctgttctttgatgaggaaagtgatgaaatgcccaaacaggattctggcaatgttaataacactgcacaaggaataatgttagataaggtcacgagttctccacctgaagtggtcaagcaagttgttcttgaatctagtccaccagtccctcaaaaaccttcaactgtggatgtcttgcgcaagaagatcacatctgtggaaagaggtagcgaagggtttctatttgtccaggacctttttctctctggtatgaacccgtttgcaacaccaaataacatacttcatgtccaccgctactctccaaacgatatcaccgcacaatgtagatttgaagcttttgaaagacagatgaagtcaactaaagaagcacgtggtgatgcaaatgttaagtatggctggctaggatctaggaagagtgacatagttaggattctcattaatggtttgggtactactgcaaatcctgttgagaaagctggtttgagtgctggtgtatatctttcacctgaaaatcgagcctttaccagtgtcggtctttgtgatgttgacgaaaaaggagtgcagtatatgttgctgtgccgtatgatattgggcaatgtagaagctgttgaacctggatcccaagagtcttttccaagcagtgagatatatgattctggtgttgatgattgttcaaaccccaagtgttatgtgatgtggccatcacatctaagcactcacatccgtttagaatatcttgttagtttcaagcttgccccaaaagttcgaaattatttgcttgacctgaaaggtttatggtttaatccatcactaaaagaacttggcacggacatttgtacacttcaacctgtaatgtgtgaaacaggtgaaggaccaacttccccatggatatcattcagagttctgtttgcagttattcaagacaatatatcatctgtggcaagggagttaatcttccatcattatgaagagctgaaggaaagcataattacccgtgaagaaatggtgaagaaaatgataattgtagttggagagaaagtacttttggaggccttgaagaagcttcattactgtccatcattatggtacaggccttctgttgaagcagtgtctagtgattctgtaatggcagcaccaggaaaattatccttggataaggcaggtggagttttttcattaactcttagtgttaaccatgttgattcacatgcaccaaatggtgtgtctgaacaatccacagttcttagcaccaaaggatgtgaaacccttgcagcggatatggtgcccaatggtcaagattgtccggcaccaagtggtgtgccagaaacatctagttctgctgttgccatgcgtggggcttctacaagtgtggaacccaagcgcagagatcctcctgtacagattgtgccacctggaagctctgcaaccccatgtgccaaaaatcaagattcttttgtaggaagagtgacacctatagctcgtgatgggcttttgaggacaatttgtggaagctcttcatctcctggcggttatgcttctctagcgcaagctaatacctcccaaaccaatggagtttctgccccaggtgtcactcctaggggctatgaatctgctgtaccaagcttgtcacttggaaattccgaaagtacaggcgtgaaacaagtaaattctgcaccaagaatgacacctgaaggccagaagttcctttcgctgggtattgcgccacgaagcccagcactgcgtgatttagtaaaatgccaggccagttcgacactcgttgccatgcctccagcgggcctgggaaaatcacggtccatgaagatcgagggccatgattctctggcaccgagtgtgaaggagccaaaaggcaatggtggtctagcaccaagtaaaacgccaaagctgcatgaacctgtgatagctgatatgagcatcaagagctgtgattctctagcactgggtatcgcaccaaatggccatacccatgatggtccagcatcaggaagtggggaggccaagaaagagcaggcagcactagtaactggctcgcagagtaaatcatctgtaccaagtcttgacgctagcagccatgttaccggggcagcgagcgcccttgtcgcactatcaactctgcgggagaagggcgggcgttagaggagcagcagcagcagcagtgtagttcccgttggatcagatcctttttctctactgtacatgtttctatgtacaggaatcatccccgtcgactctgatccccagtgcgtacggttgctgttggtggccagtcccctatatgttgcttggcagcaaatgttttggttaataattagtttttataaaaggaatattcacccttgttatgttctctacatgtaaattatctgaggtatacttgcattattatgagtgctataatcttttcttttactacatgctctaaactgtatcgtgtattcaataataaaatgttaatttactccctccatt

SEQ ID NO: 19733 - DNA, 216 bp, Zea Mays
atccgtgcgacgcggggctggatctcagtggatcgtggcagcaaggccactttgccacttacaatgccccgtcgcgttttaagtcgtctgcaaaggattcaacacgccgcccgttgggaagggagcttcgaggcggcccgccgcggcgtgtcggccgggcgggctgagccaatggcacgggcccttggggcgcgaacgccctaacgtgggttgggg

SEQ ID NO: 19734 - DNA, 1900 bp, Zea Mays
aaatcagcagaagcagctgatcgatttactcaccaatatgttctctccccctctcaccctagggtatgccctgtctgccctgctgtatcctcatctgcgctgcgggagccagtaaagggcacaggaggagttcttgtggcgtactgcagcttctcctcgtcctccctaactcttgtttgttagcggctaatttcagagcttttgttggcaactgggggaaccatagtgcgggggttcctcgcccccctctttccatgggagcttagaagctgttggatctctgcaagtgaccatgagccagagttttgacatcaacgtacttcgtgaagaagcaaggagtaggtggttaaagccttctgaagtgtactatatcttgcagaatcacgagaggttccctatcacccatgaggcaccaaagaagccacccagtggttccctattcctttacaatcgtcgtgtcaatcggtatttccggagagatggtcacacatggcggaggaagaaggatggaagaacagttggggaggctcatgaacgactgaaggttggaaatgttgattctttgagctgctattacgctcatggggagcaaaatccatgtttccagagacggtgtttctggatggaaaagatggttgctgcacttcttgctgctggtgcatcggcaacagcagttactgatcccactgcacaagacccagtgggtaaaacagcagctttcctggcttctgaacgagggcatacgggacttgcaggttatctttctgaagtgtcgctaactagctatcttgcatcactcactatagaagaaagtgatgtctcaaaaggatcagctgaagttgaagcagagagagctgtggaaggcatatctcagaggaatgcccaacggcatggtggcacagaagatgagctatcaatgaaggattctttggcggcagtgaggaatgcagctcaagcagcagctcgcatccagaatgctttccgtgccttctctttcaggaagagacagcagaagactgctcgacttagggatgtgtatggaatgacccaagaggatatagatgaacttgcagctgcatcaaggttgtaccaccaagctcatgcttcaagtggtcagttttatgatagagcagctgtttcgattcagaagaaatacaaaggatggaaaggtcgcaaacattttctcaacatgagaagaaatgcagttaaaatacaggctcatgtaagaggccatcaagtgagaaagaaatacagaacaattgtaagcactgtcagtgtgctagagaaagtaatacttcggtggcgccggaaaggtcatggcctacgtggcttccgagctgagcagcaaccaatggtcgaagcaatagaggaagatgatgaggaagacgacgatttcgatgatgatgaagcagtcaaggtcttccgtcggcagaaggtcgatcaagctgtaaaagaggctgtgtcaagggtgctgtccatggtagactctaccgaagcgaggatgcaatatcgacgaatgcttgaggagtttcgccaggcaactgcagaattggaaggatcaaatgaagtgacatcaatatttgacagtgacttagagttattagggatcaacaatttcatgtaaagagcatttcggtttcaagatctgagcaatgacataaattaagtatctacggaatgggtttcacctgctactaactaggacctgataatggtcgtcagtttatacagtgtttacgaaatggaaagtagattattgctgctatgatgtattgccactctatatttaggtgtattttcccagtggcagttcaatgaacactacattgtggtgtttgtaacttttaataccccgtttggatgtagatattagagtacaaaattgaaaattagaatcagc

SEQ ID NO: 19735 - DNA, 1389 bp, Zea Mays
atccctaatcgccagttcgccaccagcctccgcctctcccctcccactcggccactcccagtgccagccgccgtgcgctcgctcgcgcgcgctctctttctgggacgaccagtgggatatctccaccgccgccttacgccagtaaaaatggtggcccttgcaaatgaagaggccttggcccatgatgaagatatcatggatgatgttgattctgatgttgaagaatcggactcagaagacgattcaggtgaagaagctcaggataagccttcagacaaagctatatacaacaaggaggccatccttgaaaaacttgaagatattgcctggcccaagtatgtggactggatacacaagctcaccattgagcatgatcagggggaaaaggttgatgtgaatgatgatcttgctcgtgaacttgcgttttacacccaagctttggatggcacaaggcaggcctttgagaagctgcagtcgatgaaggtcaggttcctcaggccaacagattactatgctgagatggtgaagactgatgcgcacatgcacaagatcaaggggaggctgctgtcagagaagaagaggatcgaggaggctgaggaacggaggaaggctagagattccaggaagaaagcaaaggaggttcaggctgagaagaagaaggagagggctaagcagaagaaggagcagattgagtcagtcaagaagtggaggaagcagaggcaacaagggggattcaccaagggaaatgatgatgcaccagaccttaattttgaaggagaagaaggatttaaacaatctaagaaaaggagacctggtgtttctcctggtgacaggtctggtggtcttgctaagcgaggtaaagaaggaaagaacaggagggcaaaggattccatgtttgggcacggtggtcgtaaagggctgaagaagcaaaacaccgctgagaccactaatgatttcagaagctttaaccaggggggtcagtctcaaaacaagaagagaaagaggttttgaacttttgatggatatattaagaatttgggtgagtctcaaaaccagaagaggaagaagttttgaacttttgtgttattactattcccccctgcggcattattttgttatggtgtgtgccagaaggaaaaatagtctagggaagcagtccaaacataagacttaatgttttgctttatctggtaatggtcttcttttatcacggaatgcggattatggccctcttcggtttgagggactaaagattagtccctctattttagtctcatttagtctctaaattaccaaatggtgggactaaaacatggactgaactgatttagtctctagtccctcaatgagtggctaaaagagattaaactatattaattttactttttt

SEQ ID NO: 19736 - DNA, 166 bp, Zea Mays
ttacattgtatttatcggagtggttacaaaagtggttcaaaggaataactttgaaatgttataaattatttgtaagtttgaaatatatgctagctcaagtgaccatcctcaataagaagtgtagaagagttacttagacttataagaaggccgagcccaccggcac

SEQ ID NO: 19737 - DNA, 3656 bp, Zea Mays
gtagcacgtgagcatagcttcagctggccactaaaccctcgtcttccccttccaagcgaatcccattccctacctttcgccgccgcctacgcaccatcgctcgaaaccctagccccattccccgtctcgctcggaatcccagctacctccagcgccgccgcgactgcaggataggaggccatggacgacgtgtgcgaggggaaggacttctccttcccggagcaggaggagggggtgatcgagctgtgggcgaagctcgacgccttccacgagcagctccggcgcacggagggcggcgaggagttcgtattctacgacggtccccccttcgccacgggcctgccccattacggccacatactcgccggtaccatcaaggacgtggtcacccggcaccagtcgatgcgaggccgccacgtctcgcgacggttcggatgggactgtcacggactccccgtcgagttcgagatcgataaggcgctcggcatcaccaaccggcagcaggtgttcgacctcggcatcggcaagtacaacgagacgtgccgcagcatcgtcaccaagtacgtctccgagtgggaggccatggttacacgcacggggaggtggattgacttcaagaacgactacaaaaccatggacctcaacttcatggagagcgtctggtgggtgtttgcccagctatgggagaaggacctcgtctataggggtttcaaggtcatgccttacagcacaggatgcaaaactgcactgtcaaactttgaggcagcactggactataggactgttcctgacccagcggtgatggtatccttccctattgttggcgatgcggacaatgcagctcttgttgcatggactacaacaccctggacacttccaagtaacctagcgctgtgtgtcaatgccaatcttacatatgcaaaggttaaagacaaatcaaatggagcagtatatgttattgcagaatccaggcttgggcagttaccagttaaggccaaagcttcaggaaagaagcaggcaccttcaaagggaagcaatattgaagctgttcaggatggtttggacaaggaatcatatgagctgttgtcaaagattcctggggtatccttggttggcttaaaatatactcctctatttgactttttcattgaacttcaagggactgcctttagagtgattgcggataactatgtcacggatgatagtggaacgggtgttgttcattgtgctcctgcttttggtgaagacgaccatcgtgtttgccttgctgctgggatatttgagactgctggacttgttgttgctgttgatgacgacggatgttttattgaaaaaatatctgattttaaagggcgatatgtcaaagaagccgacaaggatatcatcaatgctgttaaggataaaggaagactcattagtaaagggagtattgagcactcttatccattttgttggcgatcgggcactcctcttatttatcgggctgttccaagctggtttgtcaaggttgagaagattaaagaccagttgctggaatgtaacaaggagacttactgggtgcctgactatgttaaggaaaaaagatttcacaactggcttgaaggtgctcgtgattgggctgttagcagaagtagattctggggtactccacttccactgtggataagtcaagatggtgaagaaattgttgttatggattctatagagaagcttgaaaaattatctggagtcaaggtcactgatcttcaccgacactatgttgatgatattacaattccctctaagagaggacctgagtttggggtgctcaaacgtgttgatgatgttttcgactgctggttcgagagtgggtcaatgccatatgcctacattcactatccatttgagaatcgggaactatttgaaaagaactttcctggcaattttgtggcagagggtttagatcaaacccgtggatggttctatactctgatggttctctcaacagcactgtttgggaagcctgcatttaagaatcttatatgcaatgggcttgtcttggctgaggatggtaagaaaatgagcaagagtaaaaagaactatcctccacccaaggatctcattgatgagtttggagcggatgctctgcgactatatttggtaaactccccagttgtacgtgcagagtctctacgattcaaacgtactggtgtctttgctgttgtgaaagatgtcttcctcccatggtataacgcatatagattttttgtccaaaatgcaaagagactggaagttgagggtcttgcctcattttctccgatggaacaagtggtacttctgaagtcatccaatgtgttggatcactggataaactctgcaactgaaagtctagttagctttgttcaccaggagatggatgcatatcggctttacacggttgtgccgtatttggtaaaatacattgactatcttactaacatatatgtgcgtttgaaccgcaaacggttcaaagggcgtactggagaagaagactgcagaatttctctttcaacactctaccatgttcttgtaacaacttgcgtggtgatggctccatttacaccattctttactgaagttctttatcaaaatttgcggaaggtgtcaagtaattctgaggagagcatccacttttgcaagttcccttccacaactggcgagagagatgagcgtgttgagcaaagtgtaaagaggatggtgaccataattgatcttgcacgtaatattcgtgagcggcataacaaagctctcaaaacaccactcaaggaaatggtggttgtgcatccagacaatgacttccttgaagacatcactggcaaactaaaggagtatgtcatggaggaaatcaatgttaagaatgtcactccatgtaatgaccccttgatgtatgcttctctgcgagccgagcctaatttcagcgtgctaggaaaaagacttggaaaagacatgggaaaagtatcaaatgtggtgaagaagatgactcaggagcagatcttagcatttgaaaaaagtggagaggtttcattcttcggccattgcttgaagctagatgatatcaaggttgtccgacaattcaagcgtcctgaaaatgtgtcagagaaggagattgatgctgcaggagatggtgatgttttagtcattttggatctacgaaccgaccagtcattgtttgaagctggagtggctcgagaggttgtgaacaggatccagaaattacgaaagactgctcagcttgaacctgctgatccagttgatgtgtattacgaatctgtgggcaatgacaaaaacactctggaagagatattgaagtcacaggatcagtatattagagacgcacttggctcaccaatcgttccaaaggaaatggcaccaacagatgtcgtagtacttggcgaggaatcgcacaacgtacatgacatgtcatttgtcatatgcatcgcaaggtccaccccgattatttcaccagatcttctttctcatgcctcaggcaacagcaatcatgtcgaggcgttgagagtatatcttctgtcaaaatctctatccagattgaagaaccagttccaaagtggaaatggcgtgattacggtcgactgcatcgaaggttatccactaatcagggaagggagaacgacagacag

SEQ ID NO: 19738 - DNA, 2019 bp, Zea Mays
ctatgcacgaggcatgcaaattaacaagactcatacaagcacggaacagtgtgctgatggggcacaagagaaacacatgctcaggtcttaacatgtttggctttcgagcaaactttctccagaccccaaagaaatataatatccgatcagatgtgtcgatgctcatctcaacatactcccgtggcaacgcaccgacacacaactagtaaagaacacaagcctcgtgcgcttcggctttcttaccccctcggcttcctcgctcgctggttcgctccgggtctccgtctccctccacggtcagctcctcgtgtgatctcgtcgcgtggttagcagggaaacccagaggtggaaagaagctaacccggtgaagactctgaaggaatctgagccacctgcactccgatctgccatctgaaggacgcggaggaagccccgaatcggggaatttcgtccttccggcacgcccgccctgacgtgcaaatcggcgattgcttttttttgtgtgtgtgtaggcacactgttctatcagtgagaaatttgccattatagaagtcctcagacgcggcttcgacgatttggaggcgtagacgagggattcgctgttataaaaaactagggactacccacactccaaaatgaacatgaccacgccattacaaggcacgcaccctagcagccaccgtcgtcttgctccgtcctccgctcgccaggtctcgacgcgcgcgcagactctgcctcggcgtgccgctgccgtgccccgtctaagagctgccgctccggacgccacggacgcggcggcggccctcatggtcgcgcgcgccgaggccggggacttcgcggaggcctggtccctctgggcgcagctcctgcacagctccgccgcgccgtgcctgcccgccgtggcgccgcgccttctgccggcgtacgcgcgcctgggccgcttcgacgagatcctcctcgcagtgcgcgagctctcggcgcgggaccgcggcgcggcacgcacgctctacccgctcgccgtctcctgcctcggcgccgcgggcgagctggcgcgcatggaggacgccgtcctagaaatgggccgccttggcctccgcgtcgactccgcgaccggggacgccttcgtccgggcctacgcggccgccggaaccatcccgcagatggaggcggcctaccgccggcacaggaagtccgggctgctcatcacccgtggcgccatccgcgccgtcgcgtccgcgtacatctcccgacagaagtactacaggctcggcgcgttcgcggcggacgccggcctccgccggcgcgacgtcggcaacctgctctggaacctctacctcctctcctccgcggccaacttcaagatgaagtccctgcagcgcgcgttcctggagatggtggccgccgggtttcggccggacctcaccaccttcaacatccgcgccgcggccttctccaagatgtgcatgttctgggacctccacctcagcgccgaccacatgcaccgcgacggcgtcgcgccggacctcgtcactcacggctgcttcgtcgacgcctacctcgagcgccgcctcgcgcggaacctcacgttcgcgttcgaccgcctcgacggcgacgccaagcccgtcgtggctacggaccccatcgtgttcgaggcgttcggcaagggcggcttccacgccagctccgaggtgctgctggagaccgccggcgggaaggggcgctggacgtactacaagctgctcggcgtctacctcaggaagcagcataggagaaaccaagttttctggaactactgatgctaatcagttcagcgactagggtagtgcttacattgtaatttttagtgattaaaatgtgcttgccattgccagcaactccatatatctaggagcttgcaacagacataccaagactggaagatgatttatactcgcatcaatagttctgtgcactgattctgaaatggtggtggctaggcccatgaggccgaactcgttgtccatgtgcacctcgtcggtg

SEQ ID NO: 19739 - DNA, 1864 bp, Zea Mays
cagcctacagcctaaacgcaccgcaccagacaagaaacaaggggagggagaaccgagagcggcggcgaccggcgagagagagggagggagggacgagatagattcataggtactagcggaggaagcgagtcaagggaaagatgcggactcccgcgatgcgcgttgcctaaaagttccatttcattccttccggcggaggccgggcaatacgctatctctggcgagagagatgccggcgacaggagaaatccacggcctttattagagagaagagatcctattcctacggttctcctcgcatcctgttgcttctgcgtgcggccagacgcgggcacgatatgcaggccgccgccgccgccgccccgtggacgacgaagaccctgccggtgtttgggaaccacctcggcaaccccacgcgcttcacaggcgcctcctcgtccttccacagtacgcccgcctccttcgccaagtggaggaacaaatgggactgccacaagtcattgtcaggggacaaaatttctcctttttgagggcagttctacgcatataatttacattctgacagatttcctgctgccaaaacattgtgcagagcgaaaaaggagcacgaaaggcatccaggaattatgagaggtatgtggttcggcaaaaacgagcagaaggaaagaaggccctaaaggattatcttctctatggaaagtcattgcctcatttacaggatggaagcacaggtagctttgctaactcacatgcaattccgaggttcaaaacgtttaggaaaggacctcaaactcactggtcatcgaattcatggcaaggcgtacacaatcacagaaagaataaaaaggacaaggaaaggttctgcaacttcttccatgatgaccatcatgtgcaccctgatgacatctttgaagctgtcttcggggcacattatggttttacttggtctcaaatatcgtgggaagggtttcacttcagggacaaatcgttcagatttagatggagcggccgtgaatcacgcagagagaaaattccatgtgacagcgaagatgaagaaagcgcggatgagagcagagaaacagccagcgttggttcacatgctcacagggtcatccttggattacaaccatgtggtccactaactctagaagatgttaaaactgctttccgggcatctgcgctgcggtggcaccctgacaggcacccggggtcatcacaggccatggctgaggagaagtttaagctgtgcgtgaatgcgtacaattcactctgcagtgtcctcaaggctgcttaggttgtgtttgctgtcactggaggatgttagcttgttatggtatatcagttttgaagggctcaggggctgaacaatttggcggggaaaccactggcgaccatggatgcagtgcagtgggttgttttgtttcactttttatttcgattgagatagtaaggggaaacttaaatccccggacccctgcctttaaaggctagtttgggagccacaaaaccagagggggttggagggactaaaatctacttcttattcaaaattgaataagaaagtgattttatcccctccaatcccctccgggttttgaactcccaaactagccctaaaccctttgggatctctgccttttctcggggtgaggaagcagtccatcggggtaccatttgaattagacatttatttccttatgtgaggttttcctccctgtatttggcctcccttgctttcaaactagtcccaaaagggataggagcgccactgtttgttgttgtactaacttgtacactagtgtgaattgtaacatttgattcataaaagtggaacaaataaaaatacaaaggggcatgtgaggca

SEQ ID NO: 19740 - DNA, 186 bp, Zea Mays
ccttctacctactacctattaaaatgttagggtggatgcttcgtccgcctagtcaaggttgtttggatctacattatgatgtgccagagagtcttatatcatgtatgagagagtatgccataggaaaattttactaatgttcataatctcataactgctgaaatgtcagttagatcttgatgacat

SEQ ID NO: 19741 - DNA, 1364 bp, Zea Mays
gatagtgctctcaagttcaacagcttctgttatagccttcagggcccagaccatgagcttttcccagctcaggaagcggtgctgcacattcaaactcatattgtagaccttggcccagacatggataacattatcacaacaagactacttgtacctgcaagtgaaattgcttgctttgatggaagggaggggtcattatctgatatacagaggcagactagtgcaaacgtgcagatattaccaagagaagatcttccgtcatgcgctttagagtctgatgaactcatacagattgttggagagattaaagctgctcggaatgctctgatacaagtaacaacaaaattaaggagttttctataccgtgagatgcctgatcctattcaagttggcaatatcaatttacatggagccatttctccagtagcaggctcacctcgaggaccataccaaggaaatgatatcccaatgggtgcttatcaccaagcatcgcaactggcaacttcatggcattcaaaggatagtggaggcagtgcaagtggatcatttgagcaaggcagcaacattaatgatgatataaggcaaagtgctacaaaaagatttgccgttcctctagtgactagaagcacactagaaattgtcataccaaacagtgctgttgcaagcctcaccatgagagctggtagcaagcttgctcaaataagcgaggtgcgattgtatcctgaattttattgagtgccaaaaggcggacaatcattaccctcctgctgccttctaacagtttttctggaaacagatatctggtgctgcagtaacgctagccgaggatagatctgacatcttgcagaaagttgttcgaatatctggtacccctgagcaggctagcaaagctgagaatttgctgcagggatttatccttagcattccagatgacattccttcaggttaatcgaagatactctgcatgtcatagttgttaattcgtcaattttcttttatattttcgaggcagaatatgtcgagtcatgtgattatttgtttaattgagcagcatgttttcatgtgcggagacatgcatgccattttctttgtatctttgtagctgtgaccctaaatttcggttgtctccgaagacactctgcatgtcatagttgttaattcgtcaattttcttttatattttcgaggtagaatatgttgagtcatgtgattatttgtttaattgagcagcatgttttcatgtgtgtagacatgccattttctttgtatctttgtagctgtgaccctaaatttcggctgtctccgtttaactggccgatggggctgtaagattagcaagtgttttatagactgattggacattaa

SEQ ID NO: 19742 - DNA, 1674 bp, Zea Mays
tagcgatctggaatgcgaaactgcttccaagtctctagctctctgcgggtgcatctgcggttgtatttgtaaagatgggttgctgctttatgttcggaaagaaagctaagcaggccgttgaaggcgatgaagatctacatagcgtcaaggtgttttcttacaacgacttgaggaaggctacacaagatttcagtgacgcaaacaagattggcgagggcggtttcggttctgtcttccggggagtgcttaaagatgggacactagtggcagtgaaagttctatctgctacttcaaggcaaggcgtccgcgagtttctgactgaacttacagcaatatctgatatcaagcatgcaaatctcgtcactcttatcggttgctgcgctgaaggctctcacagaatcctggtttacaattacctcgagaacaacagccttgcgcagacattgctaggtgacacattgctctgcttaatgcctcaacacgttgtctatatcttcatggttttcgtacttacagatgtttcggctatgccaacgcaggatccagatacagtaacattcggttcaattggcgggctcgtgtcaaaattgcagttggcattgcctgtggacttgcgtttctccatgaggaaatccgtcctcacattatccatagggacataaaggcaagcaacattcttcttgacaaggacctgaccccgaaaatttcggatttcgggttggcaaggctcctaccacccaacgcgacgcatgtgagcacccgagtagcaggcacattgtaagcatgccccccctaattcctgtttgtgaggcctttctcatgattgatggtagctctgacttttctattctattttatgtccagaggatacttggctcctgaatacgcaatccgtggtcaagtgacaaagaaatccgatatctatagttatggtgttcttcttttagaaattgttagtgggagatgcaacaccaacacaagattacctagtgaagatcaattcctccttgagaggacatgggcactctatgaggaagggcgtttagaagacatcatagatattgacatcggcgatgacctggatgttgatgaggcatgcaggttcatgaagattggcctgctatgcacacaagatgcgatggcgcgtcgtcccagcatgaccaatgtcgttcggatgctctcaggggagaagagaatcaacgtagaccagatcactaggcctgccatgatcactgattttgctgatctcaagatcagcaacaaggagcaaagaccaggcgagacacgctctcccacgacaactcctacgacgaaatcattcaccaccaccgaaccattctcgtcgtcagagacgcccacgcagtcatccatgtgaaagtgtgggcgtaagaagcagttttttttgttgttgtttttagtttgtatagtgtgtgaatgtggtagatgggccaggttacatgaattttttttgaagagtttattgtttgttttgttatgaggaaacatctcataggtctcttattgcatctttgttgctgtaaatatttgaaaatgaagatggtcaagataagctttgcacgattctcattcttgaactcctgcaactgccgtgattatttggatcagttcaccttgtatctgacttttgtcccagagaatacgaaggagagctgc

SEQ ID NO: 19743 - DNA, 997 bp, Zea Mays
tttttttttttttacctgctgcgcgcgtgccaggactccggcgcggcccggacgcgcgccgaggccgcggcgctcgccgccgcgctcgacgaggccggcgtcgtcctgctcttccgcgacagggtctacctccaccccgacaagattgtggatcttgtaaggaaagctatgccccttgcactgacacctgagaatgatccggggaaggaagagctcaagcagctccaggtgcagttggaagacatcaacaagcttgcacacaagcaggtccggcgcatcctctggtctggtctgggtttcttgatcacccaggtgggcctcttcttcaggctcacgttctgggagttctcctgggacgtcatggagcccatcacgttcttcacgaccacgacaggcctggttgtgggatacgcatacttcctcatcacatcaagggacccgacctaccgagacttcatggagaggatgtttgagtctcggcagaggaagctgatccagaggcagaacttcaacctggacaagtaccttgagctccagaggcgctgcaaggatcccctggagaaggcctgcggcacgaccaaccctgacacggctcatcttcatgagctctccgttcacaaatgacaaagaattcaccattgcttcactactcattccattctatgggagaaatggtccctgctagcaatagtaagcggtgtttcagataccttttccacggtcttctcctatgcaaatgtgtaggtcagtataatttttttgggggtaaatttgtagcgatgctgaaacacaagctagttaaaagccaaactcatccgcatggctggatgcttactcactacccagaaccgcgcgattctgtggtctctactaatatactgtttcattgtgcctaattagctttattatgaaaactcatttgttggtggctaatattgtcctaattagagacttgtatttgatcacgatcacgtgcctttagaaatgtatacttgga

SEQ ID NO: 19744 - DNA, 170 bp, Zea Mays
tttatgacatgtagagatgcaagtttgatgagaagcgggtcagcccgaaacccacttttccacactgaactctacctaatagtgttttgtttttttttcttttttcctcgaactacaaacccttgcaaaaagagttataacttataagcctctgttgctcggcctctgat

SEQ ID NO: 19745 - DNA, 2201 bp, Zea Mays
cagaagatcttctccattcgtgcatgtggagtactgtggaccgaggaagtagccggagagatgaacgcgaaattccagcaccattgtaagagatggctgagctgagctgaactgaatctgcgacggcgcctctgcactttcatctgattccggcgaattaggagacagacacagacgcgttgttttctgtagtcgagccggtttccccacgttgacaagtgatcgcgtcagatccgatcaggacgacgccatggccgccaaccaggaggagcaggagcaggagcagcgccgccgccttatcgccgccgcgacccgcttccctctcccaagcggctgcaggttctcctatggcacggcgggcttccgcgccgacggcgccaccatggcgcctgccgtctgccgcgccggcatcctcgccgcgctccgctccgtcaagctcgcaggcgccgccgtcgggatcgtcatcaccgcctcccacaaccccatcggcgacaacggcgtcaagatcgccgaccccgacggcggcatgatggcccagcactgggagcccttcgccgacgcgctcgccaacgcccccgaccctgacgccctcctccagatggtgcttcagtttgccaaggacgagggcattccattgggaggggaagacacagcgcaagtgctgcttggcagagataccagacctacaggagcttacctcctcgacgctgcactgcagggaataaatgctatagttggcgcacgcgcagtcgatatgggaattttgaccacccctcaactgcattggatggtccggagcaaaaacaaaggcgtatgttggaattagtgccaaaaggtaaaggtggggatgaggttgccaagaaacttattgtcgatggagcgaatggcattggtggggtgaagctcgaacaaataaaggtggagctttcaggcatagatattagtgtgaggaattcgggcaaggaaggagaagggatactaaatcacatgtgtggcgcagactttgttcaaaaggagcgagttactccacatggatttaaccctgaagatgttggtgtcaggtgtgcaagtttggatggtgatgctgatcgactcgtctacttccggttgtcatcagctagtgacaatagggttgatcttgttgatggagataagatactatctctgtttgccctatttatcagagagcagctagatatcgttaataacaatggtggccaagcaaacaagtcattgtctgcaaggcttggaatagttcagacagcttatgcaaatggagcgtcgacgctgtttctgaagagccttggcctcgaagtggtattcactcctacaggagtgaaatatctgcacaaaagggccttggagtatgacattggtatatactttgaggcaaatgggcatgggactgtggtattctcagaggatttcatctctcaactagagtcattaagcaatgagctctcctctcaagctgacattggttcagcacagtaccacgctgtaatgagattgttggcagcgagtcagctgatcaatcaggcagtaggtgatgctctgagtggtttgcttttagtagaggctattttacagtataaaggatggtcatttcaggattggtgtggactgtatagtgatttgcccagtagacaactgaaagtgaaagttaaagatcgaagtgtgattgttacaacagatgcagagacaaaagttagccaaccttctagtttgcaagaattgatagataaggagaccgccaactacacccacgggcgatgctttgtgcgtccatccggtacagaagatgtggtacgggtgtacgcagaggcatctacgcaggtagaagctgacggtctcgcaaaatccgtggcacaccatgtggaacgcctccttggataacaatttgcagccttgtttgcgactattgagtagactacatcctctaatttcatttctcttacattttgacctgtaacttatacaaaacgtgagtccaattttttgaattttgtgattgatatgcgctgaacagagatcttgtatcgagacatgatacaagatatttgaacgggtgtaaatcattccgtcgcaatactcattcttcttgattggttgcactcattgtcatactgtgcagttccttgtttgttgataaattttgaattttgtgattgatatgtgcatcactgatcactctcccctgc

SEQ ID NO: 19746 - DNA, 1398 bp, Zea Mays
tcatcgtcttcgtcatcagcgacgatccagtattgaattgggacggagcacgaaaagttcggtttcgaagtcgacactttacgccctataaaatatgatcagattcgtgacatactgaacggtcttgctgagagatttgattgggacaagataatggaagaaaacaatgttatcggtctcaagcagggaaagcaaagcatctcactagaacctggaggccaatttgaacttagtggcgctcctctcgaaacattacatcaaacttgtgctgaggtcaattcgcatctttatcaggttaaagcagttggagaggaaatgggaataggatttcttgggcttggctttcagccaaaatgggcactgagtgacataccaataatgccaaagggaagatacgaaataatgaggaattacatgcctaaagttggtactcttggccttgatatgatgttccggacatgtactgtgcaggtaccatcgactggtttgaagacgccgtttcgtgatggatatgtaagagatttagctgaggaagttctaaaactggccaagaatggactggaaagaagagggtacaaggaggttggtttccttagagaggtcgacgaagtagtgagaacaggagtgacgcctgcggagaggctgctgaacctgtacgagaccaagtggcaacgcaacgtcgaccatgttttcgagcatttgttatactgattactgaggatgacgccgccgaacgacgttggactgagcttgtagatgtaccccgtaccctaatacagagtctcgtcttgattcattcaatgcctgagccggaagggctcagtttcaggcacacaggagcagagctttcggttggttgttgacggggggcaaccgctgcacagcccggtgctgtgcctacaaataacttcgcctggaactggaacggatcactcatcactgtgctttgctttgacttgatctgcctgtctctccagggagatggaacaaactactgtttgtaccggcccgttttgttttgcagctatgaaaatcgccgtattgaaaataagtccgtcttctgcacgatggaactgtttgtttttcctttttttttggattgttgggacttgggatgtttgttcggggttaacatggcaaaagtgatctcatcgacgataaataaatgaactgatggtttgatccggaatctgcgatatctgcatgttcctttgtagccggtctttatggtctgctacctctgctacgataccttagggtacatgattttccgtacgcatcgtctcttagctgcatttgttgcatttgtgatttaggaaactcagagttgtatcatgctgttttttattgtttcttgtacttagaaaactgttctactgtcttagggttgtatatgcc

SEQ ID NO: 19747 - DNA, 2597 bp, Zea Mays
taaatgcccacgtcgtgcctaccgccgcacgcacgcagacgcagacgcagacgcagacgcagacgcctccggcctcccgccccgcacccgcagcacgtctcactcctcggtttcttcttcctcctggcagcgggcagagaagtccagtccagcccccaccgcgacgcccgatgccgattccgcattaaactactcgctcatcgcccaaaagcttcgctgatcgggacggcggcccccttcgcataaacaccgtcgcttcccctcctcaccaacccttccaagttcccactctctgctcggtcgctctccgtcccctttccactgcctgccccctcttcctcctcctgctgctggtagcagcagccaggggggcggtactaattgggaggtaggtgggcggaggccgcggccgccagggatggtggccgtcggcggcggcgggggcggggcccggcggaggcgggcgtggcggtgggccatgcgggcggcggccagcgccgtcctgtggacggcggtcgtgcaggtggcctccatcgccgggctgttccgcccgcgggtcctcgccgactgcggcgggaagggcggcgctgccgccgcgtccggcctcgccgcgctcgccggcgaggacagcctagcggcgaggctgtcgccgccggcgctcgtacccaagagaatttacaaaagcaatggctacctactagtgacttgcaatggtggcctcaatcaaatgcgagccgggatatgtgacatggtgactatagcacgccatctaaatctaacgcttgtggtccctgaactggataaaaggtctttttgggctgacccaagtgattttggagatattttcgacgtggaccacttcattaattccttgagagatgagctgatgatagttaaagagcttcctttgaaactacagttaagaactaagaagagactgtactcgatgcctcctgtcagctggtcgaatgaaacatactacctaaagcggatattacctcttgcgaggaagcacaaggtaattcatttcgataaatcagacgcccgccttgcaaacaatggccttccgattcagctgcagatgctgcgttgccgagtgaactttgaggctctgagattcacaccacagatcgaggcccttggcagaaagctcatctccactctccagagacgaagtgggcagtttgttgtgcttcacttgcgctacgaaatggacatgctctccttttcaggctgcacacatggctgctctggtaaagaaactgaggagctcactaagatgagatatgcttatccatggtggaaagagaaagagatcgattcggaagtgaagaggctccaaggactctgtcccctcacaccagaggagatcactctagtgcttaaagctctagggttcacaaaggacactctgatatacattgcttccggtgaaatctatggcggtgaaaggcgcctggccgtgctcaaggctgcgtaccctaaactagtaaggaaggagaagattttatctcccgatgaactgcggccgttccagaaccattcgacccagatggcagcgctggattacatggtctctctagcaagcgacattttcattcccagctacgacggaaatatggcaagggttgtcgaaggccaccgcaggtatatggatttccgcaagaccatcgtcttggacagaaagaagctcgtcgagctgttggaccttttccaagggggcgctctatcctgggacgaattctcggacgcagtgaaggaggcacacaggagccgcacgggccagcctgcggaaagaaaggtcgtcccagggcagcccaaggaagaggactacttctacgctaatcctctagaatgcctcggctccaacgggggactacgggacgtctcctgacgacgctttcctggaaacacgccgccgatgaacgatgacaccacctcagccctacagcacaccgtgtgtgttcgtgttcatcctcaccagtcaccgccaccgccacctttgtacagctgaccaaaggccctgcccatctaccacaagtgcatgcaggttcaccagatcagaacgcctgcgaccacatttcctcctcacagaataaagcaggaaaagaagctgggaaccctacggggttcttcagaaagaagagatgccgctcgtgcatccagtctgctcctttcctaccatctgtcgtagttgttgttgtaacccttctgtcagttttttcattctattgttcggttgctccccttcaactgctccagttttcagttcttctagccggggcgggtagctcatgcaaaagtaggagtccagctttctggaagtttcttgtactaggtccgcgatgcataacagagatttctgaatcctgacagaaccttattactttcccttgagggatcaaatttcggcgacggaataattgtttggtttccagcatctcatctatggacggctgtggttgctgaacggagagcaaactctatttataagacacatatgcatgggcgtcggaccagaaaggctactgtatttgtcggttacagcggtgggccggtggcgctagctagctgccgttggagacgggtggcatcag

SEQ ID NO: 19748 - DNA, 1728 bp, Zea Mays
ttcccatctgtgctgaagacatgtcatatttgttgtaggattgcctcggatcttgtactattcaaaggagacattgggcccccaattcattgggaagagtggcaatcataaggtcaaaactatctttttctcaagtactggagagcgtgctgctccattcgttcgccaagctgcccaagagtattcaagttattcatcatttggatttgtcctatggagagaagacgaatcccagatttggtggaattcgttaggggtggaatcggctccagcacttgttttcttgaaggggccaggcacaacgccttttgtacaccatggaatttttagcaagtcagagttcatagagatgatggaggagcacaagcaccatgaactgcgacagctaagaagtgacacatctttggaactgggttgtgatgctagaggtcattcacgtgctggcaatgatgcagcaatttggtattgtgtaattgttgctggtcgtccaggtgcagaattaagcaagaagagacaaattttgcggaaggctcaagacaaattgttaggtgatgttgacagaagtgctgggaacgttgacaattcagtagagacatcaagtgctgcaactgccttcaaagatgataggttaacctttgtttggttagatggagaagtacaaaagcaaatttgtgccttctaccttgccactgattatactggagcctgtggccctcgagactttggagatgacaatgataaacctgaaatttttattgttcgattccaaagaaatgcaacatatgaggcactgaaagctgaaaaaaagaacaatcttgtggatgttctccagggacagcatgctgatgcgtcccagttagtggcaaggtacaagggcccagttgaaattgaagagataaataggtggatctctcagattatcaaagatggagatactagagaaattccttactttacttcaaaggtgccagatcttgtaccagaggaaacaagcaaagcatggaattctaaaagtatccgctcagcagggaaaagtctaaaagagaacatcggtttccatttccaagattacctaacccacccaatgattggttcaactttgcttatgtgcggatgtatttctatgggaatattatggttcaggaacaacacacccactcaaagtactcgacaggagaaagctcggaaagacaaggcaaagaggccccgtccgaagcttagcacgtcgctcttcggtgaaccttctgtcccagacgtcgacccaaaagatgctcgtcagtgggaaatgtcaagctcggattcagactaatgactcgcttcttacatttggacctgacgtactgcaaagacgttttaaaattaagtaaactacatagtagtgcggtggccttagttttgggaaatggaacagagtataaccgatgtagtgaaaacagttggaccactgaagtaatccagttgccatctttccgatgcttcagctgccctgtgacgtgactccagggacgtatttgttgacacctgcttgaaaactgacaagcctctctattagacagagtgttaacctgtggtctcagaatggagtaaacaatggtagacagagtgttaacgtacatcatgtctgatgtaagccggcaggtattttcgtcgtgagccaaaactcggctaacgtcgtgacacggactattatttttatttttcttaaataataatcccttttcagacata

SEQ ID NO: 19749 - DNA, 3188 bp, Zea Mays
gtcgtctccgttacaacgcagacactgccgccgctccgcgacagtaactctgctctctctctctctcgcatggcgtactcctcgagccgcgggacgaaaccctaatggagaaccggcgccgccgccacgcccctgcgccgtagactcccctcgccgcagtgagccccgttgcaagcttcttgcaggatagcgccagcgcttgccgatccggtgggaaaaaaaagtgggagcacggagcggcctcgcctcggcgggggaggcgcccgccatggggagcgacctcaaggagatgaagtacaggcggaggatcggggtggaggagcggccgcaatgcagcgacccgaggggcggcgcggactgggccgcgctgcagcaggaccccgtcgagctgctgcgcaagctggacgagctgagggaccagatcacgcgctcctgcaacgtcgtcgtcggccagccgcgggagcaccgcagggtcagccgccgtgcggtctccatgctccccgagcatctcgagccaccgcctctgccagggtaccaccgctcccgctacggtgggcggtatgggcacggcttgccgccaccaagcccatacgcaccgccacgccctgaacatggggaaaggtatgcgaggcagtctagtgggcactaccgccagtaccctcccaggcactgcgagaacggtgggatggggcctgggacctaccatcaccatgggtgtgcctgtccgcactgtctgcatgggcagaggactttcccgcaggaggagaacatcccaatggcgagatacttcgccgggcagcacgaatcataccggttggagaggtcgccttctgtttcatccgattatgatcgtgggtctgtggcgtcatcactttactctcatcggtctgtatcgaagatgagggcagagtacttcaggaagaaggcagaacatatctgccgtccagtggatggtgccgcacctttctctgtatgcagttcatgttataaactactgctgatgcctatggaaaaatgcgtagggaggaagcagaatcggtttcaatgtgggtcttgttgtcagataattagtttgaagcatcaggaagaaaatggtatcccctttgcacttgcaccatcatcatccttacatgcgcctgaaatggagcaaagcacaagtgaccagatgaggcaagattctgtccatcagcgccatgaggatttcaattttatgttcaacaattcaaatgatcattgcgatatgcaaaacaacatggatttcaccgatgataattcacttccttcgaccgcgagtaatgacaggattgagattgacaaagagtgtgggtcaactagaagcattcagtcaaaagctgagggtctctctttctctccaagtaggtctgtagacattggtagcccaaaggatatattgtgcgagagggataaagacagcaatgtggagccttcctcagatggtccacttagtccacgatctccaactttagaggacaaacttgttgacccgttgtgtgcccaggaaaaaggtaacgatgaggacgatcaaggcacggcttacagatcgaacctaacatgcaaaggagaatatgatgctaacgacgagtatgatggggacgttagtacaagaagcaaaccggagagcaatgtaaatgacaaagataccactgaaggcgaaacctcatgcagaaattacaaggaagacaactgttgcaacattgaagatagtagcaaaacatacgagcagaatagtggagaagatgacaccagtagtctagtagatggaaatgagaagtatgagtctatgaatactaaagacgatgatagcagccctggaggtgaggacacatgcaataggtatgagccaaaggttgaagacgatgaaaattgtgttcttggagctgagagcattagcaacaattgtgatgaaaataataaagatgccataaaaactggaagcataagtgagagacatgaagagctgataattgaagaagaaaatgagaaattgcagcaggcatttattgaagatgccaattcccaagcagggagtggttcatcaattaatgagcggacgaattctgggttttctcgcggttcatcagaggctgggttagatgaagatcagtcctcaaccggtaagagtggggactcatcattttttgctggtttcttgaagaagggtttcaaggacctttctttattaaataagtccatggatagcgttaaggtttcaattaatggtcatccaatctctgaaagagcccttaagaaggcagagaagaaagctggtcctgttgacccaggttcatattggtacgactaccgtgctggtttttggggtgtcatgggacgagaatgtatcggcattgtccctccatttattagagaatttaattatccgatggccagaaattgtgccggtggggattctggtgtttttgtcaatggcagagaactgcatcaaagagatttagatctacttgtaggaagaggactaccacggacatctggaaaatcatactctcttgagatgtcaggaaatgtaattgatgaagacactggaaaaaaactacgcagtcttggaaaacttgctcctacgattgagaagttgaagcgtggttttggcatgcacgtccctgaagagtttagatagctggttctagtacaggatcttggttttgctaataatacactcttcaaagctgacaatggggtggcaaacgtgtggcttctgcgggacggtggtatcaaatctcagatttcttggactggagctctggaagcagcagtacttaagatccttggtgtgcggcgaaggttgtctggcactcaagaaaccaagataatctggtctaatgacttgactaccaatagtacccctcctgctaatttcaattgcttcaatggaagcgacgtgtgctgctagtgactctagattatcaggcagttcttaacttcactgctctgcctgtacgtgctattccttgaatgtgttatcattatcggtacattgccccatcacaggcatagaagtgttgtcagatgtaccatgagcaattgtcggcttgtaatatattggtagagatatgcttcccctaatatttatatgtatatatatgtgatcttgattcttgaatctcttgccaatacgattgattcctgaaccctgttaataagagtcttatttt

SEQ ID NO: 19750 - DNA, 1549 bp, Zea Mays
aaaaaattcggtatttgccacgggcaggcagcgagacgatggcaagcctactcaggcgatccgcggtacccgcgcgccagctcctcctcctcctcccgcgccacctcgcagccgccggctccgcccccgcctcgtcccgttcgttttcccgcttccacccccgcgacgacgatgacagctctatgttcgatccaccggagccgccggtgaactggggcatgaacatagttccggagaagaaggctttcgtcgtggagaggttcgggaagtatctcaagaccctcgactccgggttccacctgctgatccccgccgtcgaccgtattgcctacgtgcactcgctcaaggaggagaccatccccattcccgaccagaacgcaatcaccaaggacaacgtcaccatacagatcgacagcgtcatatatatcaagatcatggacccctaccttgcttcctatggtgtggaggatccaatctatgctgtcctacaacttgcacaaacaaccatgagaagtgaacttgggaagataaccttagacaagacttttgaggagagagatgcattaaatgagaaaattgtgagtgccatcaatgaagcagccacagattggggcttgaagtgtattcgctatgagatcagggacataactcctccaacagggattaggcaggctatggagatgcaggctgaagcaaaaaggagaaaacgcgcccaaatccttgaatcagaagggaagaaacaggcccaaatccttgaatcagaagggaagaaaactgcccaggtccttgaatctgaaggagctatgttagatctagcaaaccgtgcgaagggtgcggccgaagcaattcttgccaagtcagaagctactgctcgtggaatgagattggtttcagatgcgatgacaactgaaggcagtgccaaggctgctagcctaaaacttgcagagcaatatatcgaagcattctcaaatctagcacaaaagacaaatacaatgctgctcccaggcgacagtgccagcccagcatctttcgtggcccaggcgatgaagacgtatcagcaaatccattcccatagtcaggcattgaagtaccaccctcagatagaagggctggaggaatcaggagagaccagccctgctgctccatcttctgaggcaagcaagacaccaccatttgtcggggaagcagattctaaccataccttctcgctgcaacgcccaagaataagaagtgagcttccctcaagtgcttgaagcccttttcttgtctactgttctgcaacataggagtgtcactgataaacaccagtaggtttagttttctttagtcagagaagctgatgtgcgtcgaaggggatagacccgtaggcatttccatttggtttcgggaagctaaatgcgaccggagagagtttttgattctggtgaagtttatacgttggttccttcatatattttaaaatgaagtttgtaaaaaggcaagacgttggtgaaacaaatcgcacacgatggcaaatgcttagttcatggccactgttgctcttgttttg

SEQ ID NO: 19751 - DNA, 2258 bp, Zea Mays
caaaccccggccgaccaaccccaaccacggacccggactggctgtccgcctatcacccgccactattgctcttgcagcctgcttctctccccccttctcgccgcgtacgcacgggtcgcacgcacgcacaccccgttcgtgccacactgccacctaacccccctcccccacgatcccgaggctactagcactaggcgtcgtcctcggcagcaacggcggctgggctcccgccgatggcggcgtccctcgccgccgccgcctctcgcctcgccgccaccggcggcgagttgtcgtggtcggcgcggccctgccccgggagtctcgtggcgagcttccccagcgccgggcggctccggcgccccgcttcgggcgtgcggtgcggaggtggggttttgcccgcggccgcggggacgggggcggaagcggaggaagggggccgcttcgttggctggttccgggaggcgtggccttacatccggggccaccggggcagcaccttcgtcgtcgtcatctccggggaggtcatcgccggcccgcacctcgacggcattctgcaggatatatcccttcttcatggtctcgggatcaaatttgttcttgttcctggaacacatgtccagattgataagctcttggctgagagagggaagaaggctaagtatgctggtcgctaccgcattactgattcagattcattagatgctgcaatggaggcagctggccgaatacggctaactatagaagcgaagctgtctcctggaccaccaatgttaaatctccgtaggcatggtgttaatggccgttggcatgaaatctctgataatgttgcaagtggaaatttccttggtgctaagaggcgaggggttgttggtggcattgattatggattcaccggtgaagttaaaaaaatagatgtttcacggataagagaaaggcttgatagagacagcatagttgttgtgagcaacatggggtactccagcgcaggagaggtcttgaattgcaatacctatgaagttgctacagcatgtgctttatccatagaggcggacaagcttatttgcattgttgatggccaaatatttgatgagcatggtagagtcaatcgttttatgtctattgaagaagcagatatgttgatcagaacacgtgctaagcagagtgaaattgctgcaaattatgtgaaggttgttgatgaggaggacatcaatcatgtccgctgcctcccaatgaaacatggtacagaacatgggtttgctattggcggggaggagcgcttgagcaggtcaaatggttacctatcagagttagcagcggcagcatacgtatgccatggtggtgtccaaagagtgcatatcatagatggtactgttggtggagcattgttgctagaactattcactagagatggtgttggaacgatgatagctagggatatgtatgaaggaacaagaatggccagagaggaagatctttctggtattagaaagatcattcgtcctctagaagaatctggtgtcctggtgcgccgaacagatcaagagcttcttgaagcattgacatcatttattgtcgtggaaagagatggctcaatcatagcgtgtgctgccctcttcccttttcttgaggataaatctggggaagttgctgctattgctgtatctgaagaatgtcgaggccaaggtcaaggagacaaattacttgattacgttgagaagaaggctttgtcccttggacttgagaaactattcttgcttaccacaaggacagcggattggtttgttcgtcgcggctttaaggagtgctcgttcgattccctgcctttggtgaggagaaaacgtatcgacctctcgcgcgggtcaaaatattacatgaagtggctccaggcagcagaggttgggcatatggctgccgacggttttgccatgagatgatgagtgctgcaaacaagcatctctacgaatctagtcgatggacgtgaggtttctttatgagctgtgcagtcgcttatacatcgtagaaatgtatatttattgtgcaagaaaataatcagtcaataatcgaagatgtggttgtgtttcttgagttgatttcttcttgagcatagcaatgctcaaaagagttgttgatctgcacactgctgacaaagcctgcacgactgcgctttttaaactgataaatacttagctgcaaattcagcaatgttcttgttgagctccctccatcgcctcctctagaaaaaatgcgtatgttacgca

SEQ ID NO: 19752 - DNA, 2861 bp, Zea Mays
cagactgtgaacaacagttcacgctccccgcactccacgctatctgtggcggcaacagtaccccctccaagcgttcaccggtgcacgctccctcctcctcaaccgcgcgtgtagcttctctctcacactacatggagagtgagtgccgggagacgctaccattggcaggcgccgctctccctctctccactcccgcgcgtgaagactccagaggtgccgagttgctcggtgcgactccttcgtcgccgtccacggaagcggaggccggcgaccaacctccccgcgcggcgaagggtacaggcggccggatccgttgggcctcacgcgaggagagccacgcgaacggattcgacgaccgaggagtccggatcgaagctcccactggccgacttcatcgccgccgccgccgttcaaccctgtccgccggcgattcaacgaggctccttccccggctgggtgtccgccgatccagaactcgagctcccgtccatcgatctgcttcttccgatctgcacatctaccgtgtaattccgtatgttcatttgaacgcgtggactactaagcattgaggttctacctccttttcattctctttccgatgcttgattcattgttctatctttggatatattatttactctacatacttcaagcgtgttgtttttgattctgccatggtactgcagagtcaggttttatagccttgaagtcttatttcataactatgcatatagtagttctttcacaacatacttgaaatggtagttggcgtcctattcaaaccttaatactttgcattgtgatatgtaactagcaaactagtcactatcctaaacatttaactacagatggatggccaagatgccaaagtgttgcaaacagatctcctcaaccttgtctcctcggttgataaagctggttccaaaattagggacttgatagaagatgccttcttgcacttgggtgatgagcactatctcatcaattgtctccttgctatcaaacaagaggcagagttgctggagcacgatggaattgagtccaaagcacgctctgacccggagatggagaggatggattttcaagtgaaacaaatggaggtcgagcacgtagatacacgttttacaaccccatcgccacccgaatcgtggtccgctagtgatgttgactctgtagaatccgacaggtctactaggtataacatttggaaccaggtttaaacttgcccagtagcagtgtggaactctgtttgcaaataaacaaccactatggttctggagtgacttattatgcactgtttgtgttagttcagggtctatttgatgccagctccatggcctgctgccttttaatggctgagaacaatgataacatgcagtttccccctcatggtcctccacacacatcagctcctcaaggaatgcccccctatgtggaatccacagtactggcagcctaatccctacgactttcctagtggatctaatatccaatttagcagcagccaccttacaattcccagtttatcacaacaacaaaatgaagtaggaggttttgcaaataggggcccatggaatcatttcgttggtatgatgaatcctagttatccttgcccacctcccccgcttgctgctggccaaatgcaaccacctagccattttgtcacactgcctaacaactcttcgaaccctatggacccaatatttttggagtccgaggcagagcacagcgcacaggaggttaacagccccagcaaagaaggtggtacacctggtaaagggaagaaaatgaaagaacaaaactttacgccagaagaggatttgttgctatgcacaacttggctagaaattagttgtgatccagtaattagcactggccagaggaaggaaggactttgggcaagaattgataaacggtataacgaaatgagaggtgagtatcctaagagagttatcagggctttaacaagtcgatgggacaaaattaaggctgattgtgggaagtatgcttcgttgtatgcaagagtcctcagggaaaatcaaagtggtttaactgattatgataagacttcaatggctaccacactgtttacaaccgaaaataagagagggttccccttcatgcattgttggactaaactcaagaacgaacccaaatggcaagctattgttcaaggcacttcactacgaggggcagcagggatgtcaccggttggcagtgccacaccaactgcaagtgtaaacgatttggatagcgattctctaggtttaactgggaaaaggccattaggccgagactccacaaaggcatcaaggaagaaggccatgtccacgtcgtcccagtccatgaagtatttgaccagaattcatgacctgcaaatggcccggttgaaacaaagtgaagacaaagtggagaagaaagaagcacattatgaggttttcaaggatctcgaatataagaagctgcaagttcaacaagaacaaattgaagtggagaaaacaaaactgaagtttcaagaacgcaaagagaagaacgatgagttgaaggaagcaatggctgtggatttggaggacatagccgaagatttgaggcctgctttcatagcaaagaggaaagcacttgtggactggtttgtcaacaatccaaactgagttgttcgtttagtgaaaattgtggaccacggttttcactagttgagtttctgttttagtaatgcgtgctgtaataatcacattttttgaagtgtgactttggactgcgttagtgtcttcatttcagttgaagaactcaagattatgttatgtttgtaaacttattctcgtcacttatggttatgaattgtcagtttgaacttgtccact

SEQ ID NO: 19753 - DNA, 1975 bp, Zea Mays
accagacccacacgtttctttaccctaaccttttcgctgctccagcgaagaacacagccaccgccgtttcttcgtcttcctcgcagcgccggcgcgccatctcggtacgaaggcgacggcggcggcgacggcggcgttcaggatcgggatctcagcgacgacgtcagaggcttcccatcccgacccccgccagtcgcctcgcgccctcgactccggactccggtcctccgcacaccggccggtgaccctgcgtttgaacctgctatagaaatttataaaatggccgcggttgatgcgacaaccaaggagatggatgcactgcatgttggacaaaatgatgaaacaaaagagactctgattaaagaagacaaagctgcaaacagcaatcattctgttgttgcagctcagtccttgctaccagaggacgacgatgatgatgaagcacaagctgatggtccatctcaagatggagcagcagctgtaaagaagaaaaagaagaaaaacaaatccaaaagaagggcccccttcaacagacagatcctccatcaatacctgttgatgagcttttcccctcaggagaatttccagagggcgaaatccaacaatacaaggatgacaatctgtggagaacaactagtgaggaaaagagggacctggaacgactgcaaaagccaatatacaactctgttcgccaagcagcagaagttcatagacaggtgcggaaatatatgaggagcatcataaaacctggaatgttaatggttgatctatgtgagacattggaaaacatggtccggaaacttatcaaggagaatggactgcaagctggcattgcttttccgactggatgctccttgaattgggttgcagctcactggactccaaatgcgggcgacaaaactgtgctacaatatgatgatgtgatgaagcttgattttggaacacatatagatggttacattgttgattgtgcatttactgttgcattcaatcctatgtttgatccattgcttcaagcaacgagagatgccacaaatactggaatcaaggaagctgggatagatgcacggcttggtgatgtcggtgctgcaatccaagaagttatggaatcctatgaggttgaaatcaatgggaaagttttccaagttaaaagtgttcggaacctcaatggacacagcatcgggccatatcaaatccatgctgggaaatcagttccaatagtgaaaggtggagaacaaacaaaaatggaggaaggggagttttatgccattgaaacttttggatctacgggaaagggatttgtcagggaggacttggaatgcagtcattacatgaagaactttgatgtcggacatgtgcctttaaggttagcaaaggccaagcaactgcttgggaccatcaaccacaacttcggaacgctcgccttttgccggcggtacttggaccgccttggtgagaccaagtacctcatggctctgaagaatctttgtgacaatggcatcgttcagccgtaccctcccctgtgcgatgtgagagggagctacgtctcacagtttgagcacacaatcttactccggccaacttgcaaagaggtcatttccagaggcgatgactactgattgcggctggaggaggctccttgtaccaggttgtgtgtgtggagcgccatccgtttatggatcacactcggataaatggtttggtcctccagagttcaggatgttgtatgagttttataataactcgctaaagattgtggatgtacaagtagcagtaatacgttttctgggaacatggacattgttaggctatttccagcggggatttcgtccgagtttcaatctcgattaaatgtgttgccacataagaaaatatgataatatggcaataatttaataagagagtgagttttattggatgtgtttctctcacaactatatgatgggcaacatgtctttcactacccacgaggcta

SEQ ID NO: 19754 - DNA, 4942 bp, Zea Mays
tcccaaatctcattcccatgggccgtaaaaagcgaacatctacaccaaaccctacttcgccaccgtcgtacgccccccgccggccggcgggggctaaggtggctggcaacggcggggaagatgatggcgtgcgcgccgaggtcgaaaaggcactcgcctgcctgcagcgggggaaccacgcgcgggcggtgcgcctcatgagggacgccatcgcccaccacggggaggcctccacgccgcttctcctgcgggcgcatggtactgtcctcgcccgcgccgcctccgtccttgacgacccggccgcccgcgcgcgccgccaccgggcagcgctccaggcggcccagcgcgccgtcgagctcgcgccggactccatcgagctctcccactttcatgccatgctgctcttcgacgccgccaccgacacccgcgcctacgaggaggtcgtcgccgagtgcgagcgcggcctcagcatcgaggccccttccgaccccgcgccccactccctcaggctgcccggccccgacgtcgaccaggtccagtccgagctccgcaacctgatccagaaggccaatctcgcctcagtatctacctggtttaaaaccctgcgtagcgcgggcgacgataagtttcgcctcatccccgtgcaccgttttgccgacgaaccaatggaggcccggctcgtcccctcggcgccctctccgcgccgctcaaacgagatcaagaaggcgaccaagacctccgaggagcgccgccaggagatcgaggtacgcctggctgccatgaggctgctgcagcagcagaaggagcagagcaatggtgttgtgtctgccacccctgcctcttcccagtcacagggagatgaggccccctcatcgtctctgtcattggtgggtggacatcgagctgacaggagaaaaggcgggtctaggaaagcaacaggcttatctgcatctgaacgcactgaccaggcgcgtgcctactggggttcgataccagtggatcaaaggcttgcgttcttaaacactagcatttctgagctcaagtcacactatgcttctgcaatccataaggagaaagatgttgccagtgcagcatctgatgtgctgaatgaggtgatacgatttgccaacaagcatggcaactgggagttcatggtatgtggtaggtgtcggggacagtttacagatgttgaggcacaccggtggcatgtcatgggggaacatgttgggctactctcatctgagctgcaggaaatggtgccgcaggagattgatgctgactgggtagaaatgctcattggttggaactggagtccattggatgctactgcagcactgaaactgtttgaggaagatcaaactgacaatcttggaacagataggggcaaagaatcggatccgacggataattggagtaacaaagacaaccctgacatgtcagaatcctctgcctcgccacacaacggggagtgtaatggctttggagtggtggtgagggaaggtgacggtacgtggccactatcagatgatgacgaaagggcaaaaattttagaaaggatccattcattgttcaaaattcttgtgaagaaccataatctttcagtgtgcaatctaaacagggtgattcgatttgctgtagaggaactcagggggttgtcatctgggtcactactgcttaatcactcattggacaagtcgccgctttgcatttgcttcttggaggcatcgtcactgtggaaagtagctaaattcttgcaggatttagtgcaggcctctggaattaatagaaacctggagaatgatggactaggtgacagggatagttccccccaaaaccacaatgtactggagaaggttattcttagttctgattcttctgaactgatcattgatgggcaaacttttggtggaaagtttgactctgagagtgttgatactgacacactgttttcatggttgtacgctggatcctcaattggtgagcagctattggcttggaaccgtatgattgacgaaaggtcaaatcagtgcatggaccttattcgggcacttgggagggagttcaacaacttgcaaaactcatgtgaacggaagcttgaacagctgagaaatgaggaggcttttatttctgtagaggacctcttatgcgaagagcaaacacgaagggagcaggtggagcagtatgggttccaaagttttgaggagatcctcaggaagcggcaggcggagttgttggaacgcaatactgaggtgcagtccgacagtaacagatccgagatagatgcaatctcagctgttttgaagaaactccacacttcacacttcggttatgatgatgccttttctggaatggccccacgcctttttgacttggacggggtcgaagatgaatggaggctgcatgattttatacatccaaatgattcaatggtacacactgttatatcaaagatgaaggaaaaagttactgtggagattagcaagatagatgctcagattatgcgaaatttatctgtgatgcggcatctagagcacaagcttggacctgcttctgctcttgattatcgaatgattcttttaccccttatgagatcgttcttacaaagccatttgggagagctggtggataaggatgccaaagagagatctgatgctgcaagggaagccttcctggctgaactctccttggatgctaagaagaatgcaagcaaaggggctgatatgaaacaatcccatgaaaaatcaaaggataaaaagaagttcaaggattctcgaaaatcaaaggagctcaaggattcaagctggagcaaccagtctctcattcaccaagacagtaccgatgagggaacatcagagacatctcaaatgcttgctgattgtgatgatctgtgttgcaaatgctcgacaagtgaggattacttcaatgaacaagaggaagaacttaggcatagggtacaacttgaagcagaggaaagaaaattggaagaggctctagaatatcaacggtggatagaggaggaagcaaagcagaaacatcttgcagaacaatgtagaagtacacatgcatcttctgttattggcataaagtttggtgactttagctacaccgagaacgagaacaatttcagccagaaactcaatggaatcgagttcgactcatctgatgcacatgcattaaccagcagtgatatgagtgtttctatgttgacgttgaaaatgaatggggtttgcaataatgcacaacctataaagcctcttggtaattttggcacccaaaatcccaagagaagttctagtgaaccacaaaggtattctcaaggtcactctgcaggaatagagaagccaaattttgagaaagtggtgcaataccatcaacggatgtgtgcatcgaggatgattttgataaaaggtttcaagaagatcttgatgaagcagtgcgccaaagccttggatgcgatgcttatcctgctggtacagtaagcacttcaaatgggacagaagtgtatgggactggacttaaaaatgctgctggtgaatacaattgttttttgaatgtgattattcagtcattgtggcatataaggcggtttcgggacgagtttcttaaaacatcattactgcacaagcatgttgaagatccttgtgctgtctgcgctttatatggtatcttcattgacctgagcaaagcatccaagggacaaagagaagctgttgcacctacttcgttgaggattgctttgagcaaatcctacccaaacagcaaattctttcaggagggacagatgaatgatgcatctgaggtactgggtgtaatctttgagtgtttgcataagtcatacacttctcgtactgtctaccatggtgtatcccacgagaaaaattctattggatcatgggattgtgcaaatatttcttgcataacacataatctttttgggatggacgtatatgaacggatgaactgtcacaattgtaagatggagtctaggcagctcaagtatacttcatttttccacaatatcaatgctagttcactccgaactgcgaagatgatgtgtccagattcttcatttgatgaacttttgaaggttgttataatgaatgatcaactagcttgtgatcaagacgttggcggctgtggaacaccgaatcatatagaccacatcctttctaattccccacatgtctttactgttgttttgggatggcagaacaacaaagagagggtggatgacatatctgcaactttggctggtatttcaactgagatagacattagcatattctaccgtggtctagatcaaggaggcaaacacaccctggggtcagtggtttgttactatggccagcattaccattgttttgccttcaaggatggacggtgggtcatgtatgatgaccagacagtcaaggttattggtagttggggtgatgtgctcgtgatgtgtgaaaagggccatttgcaaccccaagtgcttttctttgaggctgcaaattaattattcttcagagtcgcaaaacgcgctacagcggttaacatgccctcaaatataggttttttccctgcggccatgaagattagaaatagggtagcagattcgttttgagcggggatatatagtactagcattcaacggtgcttttcgttgtgagtccgtaataagcagtcatctgagcattctagagcaaaaaagggagctgtttatcccccccttttttgctttaacctttggtgtaggcgctgaacttctgatctcatctgccaataaatcttcactgccgatcaagcgggtggagcattcgacttgaactgccatccaacagttgtagccgaatctgcatgaactcttcgttatacaccaatcatctatagaattttctgcttacattgggccgggcgggcgttctctctctctctgttttttttttggggccggacggtc

SEQ ID NO: 19755 - DNA, 1407 bp, Zea Mays
tagttgtgcataagcattatcatgtactaaatctgtgatcctatctgcagttcagtagagttatttctcagccaattgttgctgttcctgcattcctctgtgccgatgcattccagaaggtgcttcccttttgtactggtttcgcagcagggtgcatgatatggattgttatagcggaggttcttcctgacgcttttaaggaagcaactccatctcaagtagcttctgctggaacactcgctgttgctttcatggaaacattaagtacggtgcttctgggatttacagatggcaacaatgtggaagacgcatcaggcttcttagtatcacttgtgtttggactcggtccacttatcggtggaattatactcgtcacattctctcttgggttcagcatgccgcaccctcttctcaccggtgtcgcatccggcatagctttccgtctcgcggcatggagacctgtgcagctcctaatgacctcaaaaatgggtctcttcaccaccctcttcctcctcatcggaggttccctggcctaccacgccgccacatcaagcatcctccggttgttcaatcgcaaaaggtcttccgtgaacgtgatcgcgtcatcctccggcctctctctcagtgccctcacagtgcagtcccttcttgcctgtggcgccgtattccttcacgcatatgctgaagggcttgcgctcggtgtcgcggctcgcaaggcctatggcctcggccgctacatggttctcccagcctccctccacggtcttccacgtggcgctgccgcggcgagctgcgtgtatggtgccacagatagctggcgtggagcccttgccgctgccgctttgacagggctcgcagcgccgagcgccgccatcagtgcaatccttgcgaagatcgactatgatgggcttgactactggatggtcatagcgtgcggggctctgatccccagctttggccgcgtcttcaggcgctcactgcggttggacgtgcggaagagcgtcgttggcctgctggtaggtgttgccttcgcctccgtgtgcttgatgtcgactagattcatctgtctgcacactccttactgtaactcggctccagaagccgtcacataactttgttgctgccccgtgctgttgtaaaacacatgtaatactagtgtaatggcgatacaaaaggaggatgtggaagggttacgttgcgtcgaagagatctcttacggcgatacaacaaagggaaatggatgttgaacagaatttgcctttttcttgctgtcacttgtgtaaaattattcccaaacattgcctgaacgatagcccattcagccgttaacctcagtcccatttgatcattttctcctttgaaaaaggctcgtttttttcccagctcctgtcgccagaccgaacatat

SEQ ID NO: 19756 - DNA, 1129 bp, Zea Mays
ggcgtgaggacgggagcgggagccgaagcggtctccattctctgactgcttgtgtaattgccgtggcaaaagcacgtgacacgtttgagccattccttgatcagttgggttttaggcttttgtacatactgaagaggctgatcccaatctctgtttatctgttggagaaagatggtgagcactttagtagccatgaagtgctcataaggcgtgtccaggaagcattcaagaggtttgttgaatccactgagcaatcatgtcgtcaaaggtgtatggaagatttggagagtaccactcgttatgtcacttggtcccttcacaacaagaaccgtgctggattgagacatttcctcgattcatttgttgcaccggagcaactatcagtaaatacattgaacgagcggttttctgggttgaatgataacaaacaggataaggcaaagggtgactcgaagtcaaaccattctccagacacaaattcgtccactgctatgccagagacaaggctggttgacctattggatagcacactctggaacagacgcctggttccctcatctgaaaggcttgtttatgcgctggttcaccagatttttcatggaatcaaagagcattttcttgtcaccactgaactgaagttcaattgctttctcctcatgccgattgttgacaaactaccagcacttctaagacaagaccttgagtcagctttcgaagaggaacttgatagcatctttgatgtcactcagctgcgccagtcacttgggcagaagaagcgcgagctggagatcgaactgaagcggatcaagcgcttaaaggaaaagtttggagagataaataagaagctcaattctcttcaggttaggcagtaggccaggctcaaaatttagcagtagcttggtagtctaggactccaggtagagtgtttcaatgctgtaataaaataattggtcatctagagtgacttcttgttgtatcctatcagttgtaaatatgaagtattcctatgtcttaacgtatgttgttgctacacgggttttcggagtcttttttcccttgcatgattcgttacactgcgattccttcaggttgaagtcagccaaataggtccaaagtaacagcaagctct

SEQ ID NO: 19757 - DNA, 3604 bp, Zea Mays
agatccaactcttctttgaaagaagggaaataatctgtgcagtgtttaatattacttttattttgccgttcagcccctcgattcgtggtgctcctcctcctcccgcaatgccgcccccttccgcttccgccatcgccacccgcttcgcaacccactggatagctgacgccctcgccgacgacgagtccttcgacttctccgtgctccaggatctggtgcgggcctcgtcgaagcccctcgcgggcgccccggaggccacgcgcgagcgggtcgcgctccggtgcctccaggaggcgtcatccgtgatagccgctgggggtgatgccgcggccacggcgggcgtgcttagggttgatggcgcccggtcatgcgaggatgtgctgttgcggcttatcagagaggttgggagttccagagaattggagaaggatttgcttccacctttcagtcaagacatccaggaaactatatgtaccaagaaatctacactaccagaaacttctttccagttgctaaaaggacttgagccatggatcacatctatgaccccacaatcccaaatggagcacaatgacactgaacaatgtgacattgatcagtccctgcgcagcagccatggatgtgtaaatatagagaagcctatgttccctacagacaatgctgaggttcagcaagagactatggcagatgtagtcaatggaagtgaaacgggaaatgtccaaaaggatccacctgcaccaacttctgtttttcaccaaccgtgtatgcacgaaagcaggtcttacatccctccgcaagaagatactatagatgttgttggtctaggcgataggtccttagaaaggagtcctattgtggaggggaacatgtccattggatctgtgcttgcttcagctggctgtgatgcacctttgcagggaagaattactgagcccttttcccagcaggataaacatgatcatactgctacagttgaaccaaaatcttgtaggcaaaaatctccaaatctatctcactgtgccgatggagagggggcagatgatggtggctccagcaatcagtcatctaaggtttccattcatgaaggaccgagtgctcatgccccagtaacttcaggttttgacagaatcagcggtgtcttatcaacagatgcatctgaacctgagcatttgtctgagtgcataccagcacaggatacatccatgatttcacagcttgacagcaggaaagctcatctgagtgctctgcaacaggaaagggttgagaaagtaaaccaaggtccggaagatatctctgcaaatattgggccagtggaaaaggaacatgttcatggggatctgactttgcaatctgctagtgttttactttctattagctgcaatggttctaatcaaggaactaaatctgaaaccaatcttcaaccagggactgctacagaggataggatggcttttgaagagcagaatgcggagaagtctcacttagaactcagtggtaccaacaaggctaatcaagctctgttcgatgatggcagcgtcatgaaaaataatacggttcatggtgggctgactgcgcatactgctccagtgtctcaaagctgcagtgtaaccttacatgataaaacttcagaagccaattgtttttctgagtggaaaaatgaaaagaacggtcaaaaagataattgccatacttctattccaggctcttctcaggatgggggtggagaaagtgcaaagaagacatcaaatgaggtaaactctggggacacttcttcaaaaatatgtgtccattctaaggataaagacattaatgatactcttgagggcttgtctcaacaagatttgtgtataaaatgtggtaaagttggtcagttgcttgaatgcagcagttgttctttagctgctcataatagctgttttggttcatcggtgacatttgaagagaccaacttattctactgcccagtatgcttctataagagagccaccgaagcatataaaaaggcaaagaaaacatatggggaagctaggaagaacgttgctgctttccttggcacaatacaggtcaccaagcaacataatgaacaactaaatggagttcaaccaggaggtgccaacagagaggatcattctgacacatcaaaaaggactcatgaaaatgaagtatataatcttgctcatcaggatgaagagcctcatcagcagatgaagaagcagaaaataaatgctataggtattgattatcgtaaggaggtactcactgagaaggttcctttccagaactctggtcctgcatccattaataaacattcagtgctccagaataacggtaaaacacgagttaaggatccagagaaaaagcagcaagcgggagacgaagaagctcgcaaagaagctggtaatgaaaaatctcatgaaacaggagcttcatctcagagaagatgtgatcctccttcgaatcatgacgttgaggctgaccaggaaggtagtcttacaacttctatccaatctagtggttctgatgaattagaagctaaaggattgcaagagaagaaggcagctgtatcaagtaaatctagaaaaggtatttcaaagcgggatcaacatatgcctacttcaccaagaaaaagaaattctgtacacctgcaaaagcgctattccaatcctcttgcaccacctggaagacgcaaaaaactcttttggacagaagaagaagaagctgttttgagggaagggatggcaaaattcactccacagaataatgcgcaaattccatggattctgatactagaacatggccgtggtgtgtttcacaggacgcgcctgccatctgatttgagggtcaagtggaggagcatgcagaggaagaaatctgatgccgttgacatggaacactgacgtggtacttgtacatagcgaatgtgcaagtaggaatggaggagggtttcttctaattacttttgcagcccttaatcctgtagcactgacgtggattggttgtgggattcggtgaacctaggcctcctctaatatgcacgtagatgatggtagagagattggtagattcaaacctacgcgaagaattgccaatagatgactttggctgcttcgttcgttcaaatcgcacatatatgttgctgccgtgactccataccgtgaagaagcttgcccaaagtctgcagttttctaaacccctggtcaaaaaaggcaccgataaaatcatatctccaagttgtcagttgactgcaaaacaaattagattttgtttggatactctagtattgacctcaatccatatatgttgagatccatgtatgttgaggtggattgggttgtaaattagtttaagttgtactccaatttacctcaacatatgtggatttgggtcaatactagagtatctaaactaagttaaggtgcatgtagagataaatacggatggaaaacctccttctgtttacgtttcttgactcggtgtaggtacatcctagtgactttaatagtagcctaaggctctatttgtttgagcttctcgtcatctttttagtgtaaaaagccagaagctaaaacaaagagtttatatagatgatgttatatagaaagct

SEQ ID NO: 19758 - DNA, 1698 bp, Zea Mays
atctcgcctgacacacaagcagccccatatatggcccggtctcctacccagacaacccgtccgtctctcgttctctccttcctatcggctccacacctccacgcaactggaagcttcgctgcaatctgccctactcctcttccgccgcctccaacaccgcagacgcagctgccgcgggcgggagcttggacgtgctacgctgctctcatctcgtttccgcgcaggaattgttctcaatggcccgcgtgtatgttggcaacttggattcacgggtgacttctggggaactcgaagatgagttccgcgtgtttggagttctgcgaagtgtttggattgcacgtaaaccacctggctttgcatttattgattttgacgacaggagggatgcggaggatgctattcgtgatctagatggtaagaatggatggagagttgaactatctcgtaattccagtggtcgtggtggtcgtgatcggtatggtggatctgagtcgaagtgctatgaatgtggtgagactgggcactttgcacgtgaatgtcgtctgcgcattggctctggaggtctaggcagtggaagacgtcgcagtcgcagccgcagtcgcagtcgcagtcgcagcaggagcaggagcagaagccgcagccctagataccgcaggagtccaagctatagtagaaggagctatagccctcgttatcgctctccaaggcgccgtagtccttcgccagctcgcgcgcgcagctatagcaggtcaccatagtacaactgcaacgagtaatggtggcaggtactggtgtagcaggagctaggcctgaagcccgtgcctgatacttcttggtgtgagaacttagtccttggtttggctgtcaggaacaaatttggaactgtcgtcaactgcatgacttcagttcaggtttaaaaccttatctagcttaattgtgattgccttgattatgccattatagaacttaatatttggatgtattatgcgactaagacatattacctttcttctctgttgaaaaggcatgttctgcttaaacgactcggccaactacggctctcagttagtcttcatggttttgttcctccattcttggcacgtccttatctgcaaacaaatgtcaacgttccattactagctgccttcgatgtttcatcatgaaattcttcaccgaagatgctacttcatcacaaattagtaacatcctttcccctcatatagttgataaggtttgagtgtactgagcactaacaaatgcagctcgcgaaagtaagaccgtttttcgtcatagaacaagacagctattttaattgcagcactcgtgtgaaaatagatctactctgcatggtggggattggggcgattgaagtgtggccttcagctgcacctagttgggcatcccaggaacctagtcaggctcactacagcaagaggcgcatcctttgactaaacatgttggttttatttcttgtggtttgattcttcacttctgttcattgtgttctgccttcactgcaccctattggtagtggtcgaacaatgcttctgtctgtgccacaatcaaagaatggcatcaatagttttggtggtcttgaagcaacccttgttgacttacttgatataatgtatataatgggcttgaaagatggatttcagaaagctagaataagcagtgaaactgaagagaagcgacata

SEQ ID NO: 19759 - DNA, 224 bp, Zea Mays
acataagataagctggtaacagatctaaacaggcccaattaataagacaaaacttcagttcagtatacctcatcatttaaggcaacaaaaattgaagtcaagatgtcagcttgggccaagaaatcatcaaaagctggatttcgatacaaagccttgaagactgaacttctaacaccaacatcagcatcagcaactgcagccataagaagtttctccactatctg

SEQ ID NO: 19760 - DNA, 5417 bp, Zea Mays
ggaggacgtaggtatcgtgtcggtgtgcagtgtgttgtcatctccatctccagctccagcgccgccttgctctgtgtgcttccgcccgctctgtgttgctattgctaaactagtgtgttctgtcgctatgggctccctggccaccgcggacgggccgttgccgccgctcaagtaccctcaggctcgccgggacgaagacatcgtcgacgactaccacggcgtcctcgtgccggacccttacagatggatggagcaggtggattcgaaggaggtgaaggagttcgtggacgcgcaggcggccgtgaccagcgccgtgctgtccagctgcgaccaccgcgggcgcctgcgcgggcagctcaccgcgctcttcgaccacccgcgcttccgcgcgcccttcaagcgccggggcagctacttctacttccacaacccgggcctccgcccgcacagcgcgctctacgtgcagcacgggctgggcggcgagcccgacgtgctgctggaccccagcacgttcagcgaggacggcacggtgtcgctcggcgtggtcggcgtgagcgacgacggcgagcacctggcctacggcaccagcggcagcggcagcgactgggtcaccatcagggtcatgcgcgtgcgcgacaaggagcacctgcccgatacgctgtcctgggtgaaattctcgcgcatcgcgtggactcgtgacggccaagggttcttctactcgcgttttccggctccaagggatgcgctggattctgggatgaagactggcgtcaatctcaaccacgaagtctactatcatttccttggaacagagcagtcacaggacgtgttgtgctggagagaccctgatcatcccaagtacatatacatccctcaagtcacagaagacggcaagtacgtgatcctttcggtctcagaaacgtcagagccggtgaacaagctgtactactgcgacctgtcggctctcgctcacgggctgggcggcgtgaagagcgcccatggcaacggcatgctccccttcgtcaagctcgtggacaggttcgaggcctactacgggctcatcgctaacgacggcacccagttcacgttcctcacgaacaaagacgctccaaggtacaagctggcgagggtggacgtcgacgacgacgagcccgggtcgccgtggtggaccgacgtggttcccgaggacgaggacgggaaggcggtcctggagtcggcgtgcgccgtccacggccacaagctgctggtgagctacctgtcggatgtcaggtgcgtcctgcagatgaggagcctggtcactggggagctgcttcacgacatacccgtcgacatcggcactgtcagcgggatctccggcagacgatgcgacgccgaggtgttcgtcgagttcgcgagcttccttacccccgggatcatctacaggtgcgatgtcggctctgcggtcccggagatggacgtgtacagagagatctcggttccaggattcgatcgaaacgagtttgaagcgaagcaggtgttttatccgagtaaggatgggaccaagatcccaatgttcatcgtatccaagaaggagatcagcctggacggatcgcacccggcactactgttcggctacggcggcttcggcgtgagcgtgacgccgcagttcagcgtcgcccgcgtggtcctgatgaggaacctggggttcgtggcgtgcgtcgccaacctcaggggcggcggggagtacggcgagggctggcacagggccgggtcgctcgccaacaagcagaactgcttcgacgacttcgtcgccgccggcgagttcctcgtgtccgctggctacaccagcccggcgaggctgtgcgtcgagggcggcagcaacgggggcctcctggtagctgcctgcgtgaaccagcgccctgatctgtttggctgtgccctggcccatgtcggagtgatggacatgctacggttccacaagttcaccataggtcgtgcatggacatgcgacttcgggtgttcggagaacgaggaagagttccagtggcttatcaagtactcccccctgcacaacgtgcggcggccgtgggagaacaaacgggcggccgcagctgccaacggcgacgcaagctgccggggcttaggcggccagtaccctgcaaccatgctgctgacggcggaccacgacgaccgcgtggtgccgtcgcacacgctcaaattcctcgcgacgatgcagcacgtcctgcgccccggcgcggatggcagcccgcagacgaaccccgtcgtcgcccggatcgagcgcaagagcggccactgctgcggccgctccacgcagaagatcatcgacgaggctgcggatcggtacgcattcgccgcgaagatgatgggagtctcttggatggactgactgagtaacccaccaaatgagtactgcgcatttggctcaggctgttagaccaacgccagcagcgacccgcaaacggctccggctgcccaatctccggaaaaaaatttgttgcagcccggctgcaaaccaggttgtttgcagcccctcacaaaaaggaagataggtcccacccgcaggtaaataatacaactaaaacgttatctggtggacctgcaggtggggcctatccacctttttgtgaggggctgcaaacagcctggtttgcagccgggctgcaacaaatttttttcccaatctccgcgctcgcgtcaactgtagacgtctccagcagctcccgcatcgcgcccccatcctccgcgccccctctcgccaacgcccattccggcgcgcgctgctcgcgccccgcatctcgcactcgccaaccgagacgcgccgcgtgtccgccgcgcggggcccacagacgacgctccacaggcgagatgcgccgtcgctgcccggatgcgtgccgctgctggagatggtggccgcgcatctgtgggccccgtcctccacaacgcgcagaaagggggtcgggagcggggacgttgctggagatggtcttaggttacaatgtatcggtgctgtattgtaagcggccaggctggcaacttggcgtgacacatgtttggttctgcttctggtttggaaaattagaagctgaactaaaagggcttcttttctgcgactactttaaaaaaaacagcttttctttagtgtaaatttgagaccttgttattgatacttacgaagtttgttatattaatgcacagtaaattgaaactagattagaatttaaataattaagtgttataataaacgagatatttttaataaaatattattacaaatataattaaaaattgatttatttgtaaaaatatcagaaacacaaattgattcatctattttctagagtctagtacataaacaaaacttttttttaaagtgttgatcttttatctctactactctatatgtccttattgtaggcgtgcacacccgtgttctgcctctcgacgcctgtctgcccgcgccccccgcttgtgatgcccatctcgtctccccgctgtggcagccgccttcgcgtccgccgcgagatccctccgcgcacgggcgcgtcccccacaaaccgcgctccgtgaaatccgcactcccctcgccgcctccccagcccgcagcctctcctcaacctccctccccaaggagctggcggcggcgcgactgcgtcgggagaggacgcagaggacgccgcgcgggggctgcggcaggagctcgactccgagcaggcctccccggagatggcagccagatccggctattgagccccctaaccgagcggatccaagatagttttttttgtctccagttgctctacacagcaagtctatgaggaaggagcaaaagaagttgctctttcagttgtcagcggaattaatttaactcaagcatacttgcctatggcaaacaagcagtggacttacacaatgatcgaaatgacagactgttcgtgctatcggtttggaaagaacatgtggaaagctaatctcggatcttgcttccttcaggtacagacaacccttgtttttataggagttgtcagagaattgttttcgtgattaaacatgtgtgtttgtttagtggctggtattgttatcatatacccttgtttttagttctatacatattccttaagcatgagcaaattgggggcatttttagtgaagcaattactggtatgtacatgcaattactggtatgtacatggttaatcaaataatttgcatcatggatgttgttttagtgattaatcactcagaaccgatttcctgatgaactggatacactgtttagtgccagctattatttaagcacaagaagtagtcatatacccttgtttttatgtctgtacataccacctggaaatttacacatggggccattttttagtgaagcaattactaaacctgtatagttctggtggctgctataatttttcctgattaatcagagaattgttttagtgattaaccatgtgtgtttagtggctggtattgttgtcatataccttgtttttaggtctgtacatactacctgagcatgaccacatcagccttatgtttgaacaatttcacacatttacatttgtgaatgtgttgaccgtaagcatcatctttatttaaatcagaaacttggttttacaatgatgtctcattgaagttcttgcttttccttgtttgcaaatctgaaatacccttgtatgttctggcggaaagaagacccaaaggaccttgaacagcaaaatctaaggtttcaacattgcagacacacaagagtccagcatgcgccaacgctcctgcagttgatgcttcttccagtagtttgtgacagattgctcaaagaaaagcaagacagctcgccaatcctagaagtggaaaaaaacaacatagaataattagccagctacagggagtaaaccattaagagaagaaacatcgtaatgccatgtttccaaatgggcacaaagaaacttcaagcacctctagacggaagctgtctgcactgaagatcaggacacgaatatcgcgagctttatcaaggctcgccttgtgcggaaggtgtatttctgtgagatctccaagatgaagcattagggggtcaatcgccccagattttacatgtagctaacttagtagggcacccataatccataatttattctctgtagttgtagcagcgacctagaggtgttattctgtagcacattgtgtaacatgtaggagagagataaacacatatccccattctttctactgaaacaccagaaatagttgctcttgctccataattcattaatgtgaacttctgaagccatgccaaggtcttatattgatcctctgttgtcatattgataaaaatagggtatgtaaaaccttttctcataacagtttaacacatattttatatataagttatcgtaatattacatgtttcc

SEQ ID NO: 19761 - DNA, 1849 bp, Zea Mays
caaaggtggttctgtgcaatttgggagtttggattgtgaccacatggatgaaacaggggtttataagaaccttctacaggaggtagctcaaagagttggggcgccgttgccattgtatacaacagagcgatctggcgttggccacctgccggttttcacatgcactgttgagctagctggtatcacatttacaggtgatcatgctaagaataagaaacaggctgaaaaaaatgcagcttcagctgcatggtcagcactaaaacaattggtacgcgaggaagtgaattcatccaatgagacagaaaacagtgatgagcaggagcagatcaggattgcccgagccctcctcaactatcgcttgaaggagaagatggcgatggccaattatcctcatgtttcaccattccctaagaaatttcccatgcagccagagaggaagccttcttttggtcaatcttctcagtccagctactcaaagattctccctctattccgccctaaatctaactcaagatccagaccagagtcaccagcatctactgatggcgcatcacaaatgcctggccgggccatggatatccacactccaagcccaagatcaagatttccagctgcagaggcagccccctacgtgccagttgggcacttccgtatgccttgccacagcatggctccttcagtcacaattaggactgctgttcctgtgttctctgctccacctctcccaccgccgtctgcacgcccgcagcagcttcctccactcatgagccacccaccaccgattcggatggcatccccagttcgcatgaggccagcctctccaatgtttgcctcctcagctccagctcaagggccgaaacttgtgaggcctgttcaattgaaggatgtgcaagatcaaccaaggaaggaaacagctccatccgtgatccctgttcaggtaaaggacgtgcaataccaatcaaggaagagctcaatgtctcctgtgattcctgtcgtggtaaaggatgcacaacgccagcctctcccagttcagacgaaggatgtgcaaacccaaacccaagccccaaaggaatcacttgcagatccaattccagcaatcaggcctgcagtcaagattgatttgcctgctcaaggcaagaaggaagcttcagctggtgctaccagcgaagcgccatcttctgccactggcaataatggtgctatggaacgcggtacatcatcagacgttctcttggcaaggcgatcaagggctgctgtggacggggatggcgacaaggtggaagcaaagcacgaggccgaggctcaagcggtggcagaggcagccatcaggcagctggagatcaattgacttcagaaaatgcgcgccaccatcttctcccagattttgtaattagctgccttgcctcctgtgcacattccgttctgcttagtccgtgtatgtcttgttccggttagggctgtctgggcaagctgcattgtggtaggaacacctaggttttctgttgaggagaaaaaaacatggagtggtggtaggcggtttgcccagtgtttagttggagacggttattacttcgctggatatgcaattggtctgcttttacccccgaatgatgaggtggactgcgaggtgcctctaagggaaggattctgaattcctagttattgtcgaaccgccgtaatcctatccagcttcttttttactagtagtactacaatgcaaatgatgatgcattggtggttggtgtatgatgaaaagtggagatgggtttttatgccgcttttcgtcctggctactacagtatgatgaaaagagaaatcgttggatgaacaaaagactggttggtagatt

SEQ ID NO: 19762 - DNA, 1610 bp, Zea Mays
cggcagaccacattttttactgcgagaggctcctcgtcccactttgcattgcacccccgcaagctctcttcccagctcaactcaaatgcaagcaaagatcgagcagaaacggcagcggctgctgggcatcgcgcccgatctgccgctgcacaagctccagctcgtcgtcgccccgaccgcggcctcgcttccggcgctcgccgtggtcgccctcctcctcctcctcgccacggcgcgacgcccgtgctccttcctcgacgcgtaccgctccggcgtcgtctccctgccttccccgtccagaacctcgccgccccacctcgggcgctctgcggccgccgccagggtgccgagcgggtgcgacatcttccgcccgggccagtgggtccccgacgacgacgcgccgtactacaccaacctcacctgcccgctcatccaggagcaccagaactgcatgaagtacggccgccccgaccgcggattccttcgctggcggtggcgccccgatggctgcgacctgccccgcttcgacgccgccgccttcctggacgccgtccgggacacgtcgctggcgttcgtcggggactcgctcgccaggaaccacatgcagtccctcatgtgcctcctgtccaaggtggcgtaccccaaagacgtctcgacgacgacgaacccagagttccggacgatgcgctacgaggcgtacaacttcaccatggccatctacctggacgagccggacgcggcgtggcgcgacgccgtctcgggcttcgaccgcgtggtcctgtcggcggcgacctggttcacccggccggccatgttctacgaggccggcggggggcgcgtccgcgtcgtggggtgccactactgcctggtcccgggcgtccccgaccggacgctgcgctactcgctgcgcatggcgctccgctccgcgctccgcgtgctcacggggccccggttcaacgggacggtgatcctgcggacgctgtcgccgacgtcgcacttcgagggcggggagtgggaccgcggcggggactgccggcggacgcggccgttcgcggccaacgagacgcgggtggcggggctggacctcgacctccacgcggtgcaggtggaggagttctccagggccagggccgaggcggaggcgtctggcggggggacgaggctggcgctcatggacaccacggcggccatggtgcttcggccggacggccacccgagccggtacgggcactggccgcacgagaacgtgacgctgtacaacgactgcgtgcactggtgcctccccggccccatcgacgcctggaacgacatgctgctccagatgctcctcgcggacccatcttgatgtccgtgtgtttcttccgctagctccaatttgtcccaggaaaacaaactaatttgagcgcgcaaatttacaaaactagaccggaactaactgagctgagcgtgcacgaatccagcggccacagctgggtaaaatgccgtgccactatggcaatttgtatcagcttgatctacagaacaattggccgagcaatctccttcgtcggcctatacttgtttgtctgcgttttggcctgggttaattgagctactgatctgaaccgttt

SEQ ID NO: 19763 - DNA, 830 bp, Zea Mays
atcggccgtatatggccttctacatcaaggccctcgtgcgtcgcgtccagatatctatctttgtggtcgtggtcctcccgtcgtcgtcgactcgtcgtcttgctccgatgggcaaggactcgaagccgaaggacgccaaggggaagggcaagcaggcggccggctcctctggcggcgacgacggcggcggcaagggaggcaagggcaagggcaagggcaagggcggcaagtccgctgacggactcggcacttgcacctacgtcaaagctaggcacgtattgtgtgagaagcaggggaagatcaatgaagcttataagaagttgcaggatggatggctgaataatggggacaaagttcctcctgctgagtttgctaaggtagcacaagagtattctgaatgcccatcagggaagaaaggtggagatcttggttggttcccgcgtggcaagatggctggtcctttccaggaggttgctttcaacacacctgagggaactgttagcgcaccattcaagtccacgcacgggtatcactttatcctctgcgaaggaaggaagaactgatctggaaatgtcggttggggagactgcatcatcaggttgtatgagacgcaatgcaaactactcaccttctctaataagcgctggacatgtgtactttgtgttgggctattcgcattctgttccaaacaagttgccaaaacaaaagaatgtgtgattcgctgtaattaacatattgtactgataatctgatatggcatacctatctgggtcagttaacaggtgggttttagcataccaaaatgacagtacatcatacaaaaaaatctt

SEQ ID NO: 19764 - DNA, 1721 bp, Zea Mays
gtcacggagaaaagaaaaagtaaccaacctccggtccaacccgatagcccaaaccccctgcgagcacaagcacaaagctaaagctgtgtaagcagcagaatccaatccaatccccagctcgcgccgccccctctaatccctcctccgcaaggcagacaggggccggcgttcactcgggcatccgcgggacggacggggagcaaagcctcagcggcgagtgcgggcgatgaggtcttcggaggcgtcgtcgcggctcgtgcaggagctcgtgctgtacgccgccagcgccgcgctcagctgcctcgtcctcttcgctggcctccgccacctcgaccccaaccgcgccgcttcccagaaggcgcagcaacagaagaaggagatcgccaagcgcctcggccggcccctcgtctccaccacgccctatgaggacgtgattgcgtgcgacgtcatcaaccccgacagcatcgacgtcgaattcgactccatcggcggcctggaccagatcaagcaggcgctctacgagctcgtcatcctgcccctgcgccgccccgagctcttcaccttcggcaagctcctcagcccccagaagggcgtcctcctctatggcccgcccggcacaggcaagaccatgctcgccaaggccatcgccagggagtccggcgccgtcttcatcaatgtcaggatctccaatctcatgagcaagtggttcggggacgcacagaagcttgtggctgctgtctttagtctcgctcacaagctccagcctgctattatcttcattgacgaggtcgacagtttcttggggcagcgacggacaactgaccatgaagccatgactaatatgaagacagagttcatgtccctctgggatggcttcaccaccgaccagaacgctcgtgtaatggtcctggctgctacaaacaggccttctgagctagatgaggccatccttaggcgctttactcagatatttgaaattggaattcctgttgagagtgaaaggagcaagatacttcaggttgtgttgaagggagaaaatgtggagcataatattgattacgatcgcattgcaagtttgtgcgagggctttactggatcagacatcctagaactgtgcaagcaggccgcattctatcctatcagggagctgttggacgatgagaaaaaagggaggaaattagataaacctaggcccttgagacaatcagacttggagagagccttgtcagtgtctagaaagggcaagaaggctgcaagttcagcactgcagtcacctttgtgggtacggccgacagattcagaagacgatcagatctcgtgaaaatctgcagcggagtaaatgcaggcattacgtcgataccgttaggtttccttatgcagtttgcagaggttaaacatatttatatatgtattaattcgttttgcgtttggaacctccaccggttttttttgaagcaaactgcagctggtgaagtggcaagcgtgccctcgtgtttaagttgatcatttcaaaatacgtgccccctgagggccgtaaaactgagaactctatagttgtctggtcaacagtcggtcttggttgcctctgtattttatcttcggtttgactactctagggtggcgaattacaacatacagtataatgcagaaaggttcccaaacgtgcttcggttttttttttatgtgaatttttactgaatcttcatttgcgtgttcaaatc

SEQ ID NO: 19765 - DNA, 1486 bp, Zea Mays
cggcgcgcgacgaagggtgtgaatatcggagaaggcggagggggcgagggtgaaacggcacggcgcgtcacttgtttcaggcagcagcccacggagtccggcagccatccaatgctccaccaaacaacgctcatccctccctccgtctccgccgcctcctcctcgcctttcctccacgccgccaccacagccccggctccgggtggaggttcctgcaccccagccttcctgcgaggcgcctctgccatgccgtcgtacgcgcaccaccgtagcagccctctgtcgcacgacgtcgaggagctggagtgggtctcccgtatcatggacgactcgctctccgagctgcagccccaggcgcagccgaagccggccgctgctgtggtcgcgtcgtcggcagcgcggccccctctggcgcagcagcggcgtccgttcgcgcacgacggtacataccgggcggtggcggcggcgccgccgcaggccggcccgcagcggacgccgaccatatgcgcgctgtcaacggaggcgatgataccggtgaaggcgaagcgcagcaagcggtcgcggggcccggggtggtcgaggccgggcgcctcgttcctgcccgactcggcctcgtcctcgtcgaccacaaccacttcctcgtgctcctcgtcaggttccatctcgccgttcctccgtctagactcgtccccgttcggcggcgggctggagctcggcgagggccttttcagctacggccacctcctgccgcggccgccgtcgaagaagtccaagcacggtggcaagggcagcaagcacaggcccaagaagcgcgggcggaagccgaagcacctcccccctccccacccgtccgcggccgcgtcgcagcccgggcccagcgaccggcgctgcagccactgtggcgtgcagaagaccccgcagtggcgtgcgggccccgagggcgccaagacgctgtgcaacgcgtgcggcgtccgctacaagtcgggccggctcctccccgagtaccgcccggcgtgcagccccacgttcgtgagcagcatccactccaactcccaccgcaaggtcctcgagatgcgccgcaagaaggagggcggcatggttgccaccgccgcgccggccgtggcgtcgttctaagcttgtgcccaccctgtcagcgaaggagccgcaaggagggcggcatggaggctggccacgcagcggtggctgtacattttttttccccggacgtaatagccttgtaccgtacctgaactaccctccctttctcttgctagtatcgtcgtcgtaatcccccggctgggttattaattagagtttaggagtctcgattaggtcaggtcaggtcaggtttagctttggttccggttagggttctactgcggcggcagaagcggcccagcaactagcgcagaactttaattcctagcaagcatttataaagtcagtttttatttcatcttcctttctccgagctaggtgtaggagt

SEQ ID NO: 19766 - DNA, 1644 bp, Zea Mays
actctcgccgtcactccggcctcttccacggcggcggatgactggtcggagtgcgcgttctcgctgacctgcgaggaagactgcgccgacctcggcgacggcgagctattcccgctctacagtgccggcgacgaggaggaagatgagtacttggagcagctggtgttcaaggagaccagcttctgctcctcctccgactcagctgccgactgcgacggcgatgaagaaggagacgaagaatactcttcgctcacctcagaggagtggttccgccaagctcgcctcgccgccgtcaagtggattcttgagacccgcgggtgcttcggcttcggccaccggacggcgtacctcgccatctcctacttcgatagcttcctcctccggcgacgcatcgatagggagacgatgccgtgggcggcgcagctgctgtccgttgcgtgcgtgtccgtggccgccaagatggaggagtgccaggcgccggcgctgtcggagttccacgccggcggcttcgacttcgactcggcgtccatccggcggatggagctgctggtgctgtccacgctcgggtggcgcatgggcgccgtcacgcccttggactttctcccctgcttctcctcccgcgtccacccgcatggcggcgccggcgccggcgccggcggccgcgtcgccatcggtttcatctttgccacggccgaagctggtagcgtgctcgatcacaggccgtccactgtggctgcagccgcaatcttggctgcaacctacggacctctgctgaccaaagaagcactgagctccaagatgagctgcctttctccatcttatcttattgagaaggagcatgtacatgcctgctacagcatgatggttggggacatgagcaggagaggcagcaagagatcattgccatgttcaggccccgacgagattgccactagtacatatcattctgttctagttgatgatgccacggacaccgccgccttcgcctcggcggtggccgcggcgaggagtaagcagatcaggctggagctgacgggcatccattgaggaagctagcaccaccggggacacgatttttagccagatgtctagggggggcttggtttgatcttccctttcgttttctttccttcttttttttaacctatatgtttgcaaaaaaagaagagatttttttaggttcttttagccattgccatggggttggcgtttggctgctgtcagattggtttgatttggtttgtgagaggtggaagagatgaacaaagcagagggctgagcttccctatggagaggggagcttaggttaataagcccgctgcacagtgctccaacagggcactcgtttccagtgaactttatttcgaagttgcactgtttgataaaccattgttgatgcaatgctgcattgcatatggtggtgagatgcagagaagatgcaaaacaagcgaggttgagggttttgccattgtgtatagagagagggagagagagggagagatgtttccctttttcacttgtgcaagtgggtggtgtttcactctgcacctgcaagggtcacatcggtatgaacagaccctgtgtacttgtgtaaaaactcctcttgttcttgaggaactgagagagaatcagattgcatcaagc

SEQ ID NO: 19767 - DNA, 1902 bp, Zea Mays
gtgcatagagctttctataggatttgatgaatcgttgtgcttgtacttgtgatgaacaataaggaagaagctgatgagaaaatgaggtattggcagctaccatgggtccccccaccaaaggaagaaccaccatctgaggaagaacttgcaaggaaagcagctttgaaggaaaaggctggtcagcgtttgcgagacatggctgctgcaaagagatctcagaagatagtggaactagaaaaacaactttcctatctggaggaactaatggaacaacttgatgaagctgaggaagaagaagcaacagctattctaggtagctctggatatctttcccagcaggaaatcagatctgccattttaaaagcatcacaatctttaaggaaagcaaaaggggagtccaatggcaatgatgagaaaacagatgcctcagcagttgataagtatccacttgtatctgttcctgatgagacactgacgccagaacagttaaaggaaaagaagaaacagatattacttaaaaccacaacagagggcaaattgcgcgcaaagcagaaacgtgctgaagaggaggctttgcgggagaaacaagaagaaaagaggcgtgcggagaacccagagttataccttgaagagcttcgggcccgatattcagaactttctgataaatttgagcagaggaagcgacagaaagttaatggtagtcagacaaatgggaaccatagttcatctgcaggtgtaggccgtggagaaagactaaatgcagctcagaaagaaaggatgcggctgcttgcctcagctgcttttgatcggggcaaaggtgaggacacttttggaatgagagacgaggattggttagtgtacaacaagatgagcaaagacaatgatgatgacagcaatgatgatgatgaatcggaacttgttcgaatttcatcgaagctccaggagattgatcctacatttgtgtccaaatccgaagctgttcaactgactccggagccacccaaagtccggccactaaccgctgaggattacagaattgccattgggatcgagcggttccgttgccctgaagtcctcttccagccaggcatgattggaatcgaccaggccggcatcgatgagatggtcagcatctcactcaggagattaatggaggacgagtctgtgaaggagcgcctctgccagtcgatccttgtcactggcgggagctccctgttccctggcatgatccctcggctggagtctgggatacggcaatatcggccctaccttgctcccctgaagcttgtcggagcagctgaccccattttagacgcgtggaggggtgctgccgcctttgcggcatcaagcaagttcggcaaacaaacgttcagcctagctgattacggagagcatggagagaacctgtttcatcggtacaacattgtttactcactataaccggaaaatgacatagtgatcgaaccatctcagtcaggctatttatttaacagctgatacaaattgatgtagcaacaaagtttttcaaaactgcaattgatatttttatgtgattggaattggagggttcaaatggtgaaggaatttcataaacctataatatgtgtgcctttttttagtcttcccagggcacaacttgtttaagaacaggtgagctgaatcctctataaagctaaggtcactatcgactatatggatggataaaaagaacaaagttgtccatggttacttgcataggggcatttctttttcattttcttttttagtctctattttgttatatctaccattaattaaaaaaaggaacacagtcttatatagggggtatgcctttttattttatttttaaatcttctgtttcttcagggttcctaaatctattttttgttttctttaacacac

SEQ ID NO: 19768 - DNA, 284 bp, Zea Mays
gagtttttgttgaggagaagtcattcacatatctgtatcaggaaggagatactgtgactcttatggagcctgaaacgtttgagcaacttgaagtttcgaaggaactgtttggcaaagctgctgcatacctaaaagatgaaatgaaagtgaatctacaatactttgatggccggccaatgtctgggacagttcctcaacgagtgacttgcactgttgttgaagcacaaccaaatacaaaagggctaactgctcaaccacaattctgaggtgtccaggatcgattc

SEQ ID NO: 19769 - DNA, 1638 bp, Zea Mays
gtggccggccggccggccattgggacttttcctcctctcaatgatgccctacccatctcatcgctgttccccttcttgtatttcatgataagggacctgaacgtcgctgaaagaaccgaagacatcggcttctacgccggcttcgtgcctcgttcatgtttggtagatgcttgacttcaaccgcctggggaatagcggcggaccgtatcgggaggaaacctgtcgtcgtgttcggcatctcctctgtggtcgtgttcaacacgctgtttggcctgagcgtcaactactggatggcaatcgccacacggttcctgcttggtgctttgaacggcttgcttggaccaataaaggcttatgccatcgaagtctgccggcctgaacatgaagctctagcgctatcacttgtcagcacggcatgggggataggcctcatcatcggcccagctcttggaggctaccttgcactgcctgcagagaacttcccggctatcttttcacctgactcggtatttggaaggttcccgtatttcctaccatgcctttgcacgtcggtcttcgctgctgctgttctagtgagctgcatatggatgccggagactctgcacaggcacaaagttcacgagagtacgagccaggacgttgaaaaggttcaagaaagcggcattaggaagaagaagagcttattcaggaactggccgttgatgtcgtcgataattgtctactgcatcttctcgttccatgacatggcttacacagaggtgttctctctatgggctgaaagtgacaagaagtatggtggactgagcttatcatctgaggacgttggtcaagttcttgcagtcactggtgccagtcttcttgtttatcaactctttctataccctagaatcaataaggttctcgggccgatcaaatcttctcgaattgcagctatcctgtgcatacctatcctctttgcctacccctacatgacatacatctcagaaccaggactgtcaatcattttgaacattgcgtcagcgataaagaataatcttgctgttacgatcattacaggcactttcatccttcaaaacaatgcagtgcctcaggatcaacgaggagctgcgaacggactgtccatgacagggatgtccttcttcaaggcacttgctccggcaggagcgggcattgtgttctcgtgggcgcagaaacgccagcatgcctttttcttcccaggtgatcagatggtgttcttcctgctgaacgtcgttgagctggtcgggctcatcctcacattcaaaccctttctggcagtgccagagcgatgcgatagtagatagctgttctttggaggatgaactatagaagttttggaatgattcaaaatttcatcgtgtatggcagcaataccagtgagacccaggaagaagcaagagctgtgtactggtaaccgtaagcggtgtatgcagtatcgctgcattagcatttgtgcttacgaaatgcacatgtatgtaggtgataaatgactaaatgtggccagtggatcgagttgttgctgcactgtgagtagtggtagtgtaagattcagcgactcgaaattgtgtgttggaaataaaattggtaggtgttagacgcgcggtatgagcgccaatcatt

SEQ ID NO: 19770 - DNA, 2642 bp, Zea Mays
ttgctgaagggcctgccttgaatttcgtattcttggattccattggcttctatcttcagtatggatgagccaaacaacaattttaatgcaacggtgcatgccaatgagatgtttgatagcaatggtgtgatccatgaagatgagatggcccatgacgatgagatgatccatggccatgcgatgttccttggcgatgagatgattcgtgggaccgagatggttgaaggaagtgagatgatccatggtcatgatatggttcaggttaatgatctcatccacggcaatgagatggttccagttcacgacatggtcaacggtgacaagatagcccatggtaatgaattggttaattctcagatgaccccacgaatatcaagacgtcggaagaagaagtcgctagtttgggagcacttcactatagaactcatgccagggggaagttcaagagcatgctgcaagttatgcaagcaaacctttgcgtatagttctggctcaaaaattgcaggcactagccatctcaagcggcacatcacactaggctcctgtcctgttatgaaagaccaagacaggaagctagcattgccacttgcagggggccatgtcactgataatgatggtgagggtactgcagaacgtcctactaagaggcgttacagatacactggttatgcaaatgctacttttgatccacagcggagcacctcttatctgacaaagatgataattttgcatgactacccacttcacattgctcaacagtcatcctttattaattttattgagagtctgcagcctcgtttcagagttgtagatgtggagacaatggaaggagaggtgtatgctgttttccagaaagcaaaagaaaacctgttgcaagcattcagcactatgccaggaaggatcagcctcactataggactctggacaaccagtcagactcttggctatgtttctcttgctgggcagtttattgactccgattggaaagtgcaccgaagaatgctcaacttcatgatggtgtcttctccccattcagagaatgcacttagtgaagctattagctcaagcctttctgagtggaatatgaaggacaagctgttcactatcacattggataatgattgctcttcccatgatatttacagtgcaaatcttagggatcacctctccaataagaacaacgtcatgcttaagggacagctctttgttgtgaggtgctatgcacatatcctgaatgtagttgctcaagatgtaattgcttcgattcatggtgtgatttacagcatccgtgagagtatcaagttcataaaagcttctccaagtcgtgaggagaagtttgctgagattgctctgcagctggagattcccagtaccaagactctttgtttagatgttacaacccagtggaacacaacttatctgatgctactggctgccttggactataagcaggcttttgctacactggagacatgtgatgataattacaatgaatctccttcagcagaggactggaagaaagttgaggctagctgtaattacctgaaactgctatatgactctgcacatagtgtgatggcttcagcgaaccctactgcaaacatctttttccatgaagcttggaaaattcagcttgaactagccaatggcacagaacatggaagtccctttttcagctgtattgccaaggatatgcatgagagatttgacaaatactggaaagattgcagcctggtgttagccattgctgttgttatggatccacgtttcaagatgaagcttgtcgagttcagttactctaaaatttatggtgctgaggctgcaaaatatgttaaggttgtcaatgactctctgcatgagctgtataaggagtatgtggcacagacactccccttggctcctgcctatgttgaagctaataacgtggctgccaacacgaatgttaaccagggaaatcctcctccaactagtgatggtcttcttgactttgatatgtacctttctgagattcaaagtagccagcctgcaaaatgtgaactggagcagtatctggaggaatctctcactccacgcatccaggagtttgatattcttaactggtggaagcttaatacacttaagtttccaaccctgtcgaagatggcccgtgatatcttggcaatcccaatgtcgatggttagcagtggcagctccatattctctgctggaactgggaaccgcatgcttgatgattacagaagctctctccggccggagactgtggaggcacttgtatgcgcaaaagactggctccagtattcaccggccgcaactgaggcgccaggttctgagatgatgaaagcagaagcattgtagattgccgatactgcttccctgttgaagcacaaataaggttgcagtatctttgagcatagttaacagtaggtatattttaggcagcagttgcagacatatatttcttctggcatttatctcatagtggtctaatttgtcatgtcgaacaaagtttaactcattgtagtgtgagctgagtttatctgtggtctgacccggcacacatggtgcgggtgcaaactgcaaactgcgggattttttagggattcaggttgttgagcaccatttatggcactgggcatggtcgg

SEQ ID NO: 19771 - DNA, 3018 bp, Zea Mays
ccgcagggcccagtggacaatggcccacctgtcattcagacattcgaccagcgtaatcttcagctctatttattactgctatatcagggagtaggcaccagcccaccgactggtgttagtgtgttacgggcttacggccgtgttcatcttgctgctcgcctgctctccccgttccgtcctgcgaggaggagatccgcattccggagggaaacggcgaagggtctcactcgatttatactcgtgccgtactgctgctgctatcttctctatccccattactcgtgcaatggcgaggaggccgtagtgctaagtggagcagcggcaggcagcgcagcgcaggccaacgcggaattgctcgctgctgcggtccagtggcgtggcggcacgcgtgtcgcgttccatgcggcactagcgcggcccctgagatccatccgcagcagcaggcatgtcgcgcgcgttgtacaggggcgtgtcggggatcggcggcaagctggcggcggcggacgaggcgtacgcgtactacgaccccaaggagcccagcgagaacagcattggcggcggcttcggccggggcggcgcgcggaagcggcacctcgcggacgcggcggtgaaggtcggggtcctgctgctggtggcggccgcgctcgtgggctcggtcgcgtgggcggggacgctctacgcggggcgcggcgcggcggcgcgcgcggccgccgccgccgcgcaccgcgggtaccggcggctgcaggagcagctggtcgcggacctgctcgacatcggcgagctcgcgggcggcggcgcccgcgccaaggaggcggaggtgtgcccgcccgagtacgaggactacgtgccctgctactacaacgtcacggacgccgtcgacgtctcggatctgggcgccggcgtcgccataagctacgaccgccagtgcacgcgcgacggcagggtcacttgcctcgtcgcgccaccgcggagctaccggattccggtccgatggcccagcggcaagggcttcatctggaaggacaacgtgcggattagcgggcacgagttctcgtccgggagcctgttcaagaggatgatggtggaggaggaccagatctcgttcccgtccgacgcgcacatggccgacggtgtggaggattatgcccatcaaattgccgagatgattgggttgcgtaatgagttcaatttcaatgaggctggagtcaggacagtccttgacatagaatgtggatttggtacctttggggcacatctttttgagagagatctcttgaccatgtgcattgctaactatgaagcatcaggcagccaagtgcaaattacactagagagaggcattcctgcaatgattggttcatttgcaacgaagcagcttccatatccctatctttcctttgatatggtgcattgtgcgaaatgcaatatcgaatggtacaaaaatgatggcattttcttagttgaagtgaacaggcttttgaggcctgatgggtattttgtatggacatcaaatttgaatacacatagagccttgcgtgacaaagaaaatcaaaagaaatggacagccattcgtgactttgctgagggtctttgttgggagatgctgtcacaacaagatgagacaattgtatggaaaaagacaaataaaagggactgttacaattcgagaaaatctgggcctgagctatgtggccatgatccagaatcaccatactaccaaccactaaacccctgcatatcaggcacaagaagtcagcgttggatccccattgaatatcgtaccacctggccatctcaggctagacaaaactcaacagaattggacatacatggtgtgcatcctgaagtctttgctgatgatacctcaagctgggactccatggtgcgaaactactggtctttgctatctccacttatattttcagaccatccaaagagacccggtgatgaggacccacagccaccatttaacatgctaaggaatgttttagatatgaatgctcactttggtggatttaatgctgctttactgaaggcaggaaagtctgtatgggtgatgaatgttgttcctacagatgccccaaactatctaccgctgatatttgaccggggttttatcggggttcaacatgactggtgtgatgcatttccaacttacccaagaacatatgatatggtgcacgctgatggttttctatcacttcagaagaaccacaagcatagatgttctactcttgacatattcttggaagttgaccgcatcctacgaccagagggctgggtcataatccgtgacgctgcccctcttattgaagcggcaagatctgttgttactcaactcagatgggacgcccgcgttttggatcttgacatagccagtgatgaaaaactactggtctgtcagaagccgtttctcagaaaataatgagcatagtagacactgacacaagatatgaacttattctttcaccctacacactgttacaattgctgtctgagcacaactgagtacaaagtttgggtaaaaaacacgggaagcatgattcagcaaacttgtcatgcatcaccatggaaccgcaaggtgccattaaattgatcggtcaagtgcatgctgcagaaacaggcttggtggctaagctttccaggccaaggttttattgccaggatatagagatgaagccataaaaattactttagtagtgaaaccatatccaataaagagatgctgctgcggtgtacataatcgccgccaatgtgccatataggtataattcattttttcccttgttacaatttctctccttttttctgtaactgtgccaatttgttttattttgtatcttgtatgtaaattggttggtctatatactgatcatcccagactacagcctagtgaaatcaatataattattatttggagatgaatgataagcaagagcaaattataatcattccactatatttatctatcatttctacaattcattatttttgtacattgtacggaacaagagtgat

SEQ ID NO: 19772 - DNA, 1250 bp, Zea Mays
cccaggcttactaacgcgtattgcatgcgccaaacaaatttgacctgctacaaattgatccaattattctcttccacaaccttctccacattagaatagcacgtcagatgaacttcacttcagtctgcaggtaggccagttcattgagtcagtgaagcaagaactaatgcatgaccttgccactgcaccgtatggtggtagcgtggttaaagctcccaaggtgcttgcagatattgttgaggccatcgctgctgcagtctacgttgattgcaaatttgaccttgagaagctttggaaggttacaaggtggctctttgagccaattatcacagcagaaacaatagatgagcaacctgtgactacattgcatgagttatgccaaaaacatggcaaagttgcacagttcaagacatggcagaaggatgggatgatcgtggtaaatgtatttgttggtggggagatggttggacttggttcctcggagcagaaggtaattgctaagctgaatgctgcacgagatgcactgggcaagcttattggtggtgcaaagcagcaagtgttgatcaattgtgccgccaatggattggtggatgacattgcagagcttagggagtgtaaacagaaacttattgagcagtgcatcagaaaacattggccaaaacctatctttaaattagaaaaagaaggtggccctgcacatgaaaggaactttgtgtgttctgttcaggtagatacccaaactggcacttttgtaaccataggtgaatctatgtcaagagttaaggatgcagagaattcggctgcgcataagatggtcgaactattgttgaaattgtgagatatattcatgtacatggctagatctttggtatacctctttcgagaaacaatttgttcaaggatacctattatggtagctttgtcattacatggatagatctttagccctctcgagaaacaatttgttcaagtacacctattatggtagctttgtcatagtgtgggtcatgtcatctagttaatacggtttataattgagcatttatctcaaatcatgtctttttataatgcatgattctagacaacttagttttagaatagggtaaggagacgggtttaactatcaaaaccaatgcctatatagttattgttttgtactgtcctgttttacattaatattatataaaatatcatgaagcgtggaatattttgtggatttgatatttggattatttcaaataaggagagct

SEQ ID NO: 19773 - DNA, 2139 bp, Zea Mays
atcgcttcaaatcgataggttccttctatgctccctgacgaggctttcactgtcatccgcaagtcatttgacgcacgaaaggttttgaaagaacctcaattcacttatattgttgatatggatgttaagaagattcttaatattgagccaagggcatgggattttattgctcggttggagcccaaacttggagttgtggaatacatgaccgaagagaagttagcagttgatctggtcagcatgctaaatgttagtagcaaaggttccaataatgtactaggaattagagacactcatagtggcatgatttatcgtcaacaaaagaagcccagagtggcagttataggaagtggaccatctggcttgtttgcttcccttgtgctaggtgaacttggtgcagaagttaccttattggagcgtggtcagcctgttgaacagagaggtcgtgacattggtgcactagcagttagacgaattctacaaccagagagcaacttttgctttggcgagggtggtgcaggtacgtggagtgatgggaagctgatgaccaggataggaaaaaacactgatggtgttcaggctgttatgaaaacatttgttcactttggagcccctccaaacattttagttgatgggaaaccacacttgggtactgataaacttgttccactgctgcgaaaattcaggcatcacttaagagagttgggtgttaccataagatttaatgctagagtagatgaccttatagtagaagatgggcaggtaaaaggaattgtggtctctgatgtggaactacagccaggtcctgccagccagaaactagcatttgacgcagttgtaatggcagttggtcattcagctcgtgacacatacagtatgctttggcagcataatgtagacatgagcccaaaaagttttgctgttggcttaagaattgagcatccccaagaattgataaacagtatccaatactctgaactggcagctgaagtacaaagaggacgtggacggattcctgtggcagattacaaaatagtgaagtctgttggtgaaagagacgcagagaatgaacttgacatagctgagccaactcgcagttgctactcgttttgtatgtgccctggtggacaggttgttctaaccagcacaaacccatcagaattgtgcatcaatggcatgtcgttctcacggcgtgcatcaaagtgggcaaactcagctcttgtagtcactgtatcatcccatgatttcaagccatttcaatcccatggtcctcttgctggcgttgaattccagagacaatttgaaagaagagcagctatgatgggtggagggaatttcgttgttcctgcacagtgtgtcaccgattttatcagcaacagactgtcagttacaacactgccaccatcaagctatagattaggagttcgtccatctaatcttcatgagctattccctccttacataactgaagctttacaagagtcactaataatgattgatagagagatgccaggctttgtttctagcaaggccctacttcatggtgtggagaccaggacaagttctcccttacaaatttcacgacatggagaaacatacgaaagtacatcactgcgaggattatatccaactggggaaggtgctggctatgctgggggcatcttaagtgctgctgtggatggtatgtattgtggttttgctttagctaaacaactttctttattccatggcgatatagagccatttctaggcaaaacacaaaaacaaacaggttttataaagtattgaatggactagtgcttggtattttgttgttccaattttttgggggaaaagatcgatgtcattatagctttaaccataggatatttttgtcatgtttagagcagctgtgattgccttactaaattcatcagctaatttgtgcacggttgatgtagaagggtagagcaaggcattgatgttgtaggagaggttctggtataggtatagctatgtaacaaataatttataacttcctatgtgatgccaccttaattttgtcaagataattcaccaagcataataccatatattctcttgtgtgatggattgatgaacattaatgtgaagaagattacaagctcaagtattaactga

SEQ ID NO: 19774 - DNA, 3679 bp, Zea Mays
cgttcccatcctcctttcccgaacaaccggagcgcggcgcgagacaggcctctactccccgtctcccccgctccagctgacctcgcccactggttgtggggagagatcgcgttcatcagtgccctgtacggagtgaccgatctcggatgaggaccgatatgccagttttgctgtgattattgatctgtgcgagggggacgtgcgatcgatcacgtgcgcggcgactgatggcaggctagattccggcaatccacagtcagacacatacattttgcgatcgatttttggtgaagcgaccttgatctgaaaatggggctgttccgggcggcgtccggtctggctcgtttggcgctgcggcggaacctctcgcgcgccgcagcgagccccttcgccggcagcggtggcgccgtcccgggtgcaatgccggcgcggtacttccactccacacgcccgcgcaggttcgccgcgcccgcgccccgtgcggtgccgctctcgcgcctcaccgacagcttcctcgacgggaccagtagcgtctacctcgaggagctgcagcgagcatgggaggccgaccccaactccgtcgacgagtcctgggacaactttttccgcaacttcgtcggccaggctgccgccacctcgcctggcctctccgggcagaccatccaggagagcatgaggctgctgctgctcgtaagggcgtaccaggtgagcggccacctgaaggccaagctcgacccactggggcttgaggagcgcccagtcccggatgtgctggacccggggttctatggattctctgaggcagacttggaccgtgaattcttccttggggtgtggatgatggctgggttcttgtccgagaaccggccagtgcagacactgcgttccgtgctggagcggctcgagcaggcttactgcggcaccattgggtatgagtacatgcacatacctgacagggagaagtgcaactggctcagggataggatcgaaacagttaacccaagggagtacacttatgatcgtcgtcaggtcatgctggataggcttatctggagtacacagtttgagaatttcttggcgaccaagtggacgactgcaaaacggtttggtcttgaaggcgctgagactctgatccctggcatgaaggagatgtttgacagagcagctgatcttggtgtagagagtattgtcattgggatgccgcacagaggcaggttaaatgtcttgggaaatgttgtgaggaagcccttgcgacagatatttagtgagtttagtggtggtaccaagcctgtcaatgaaggggaggggttgtatacaggtactggtgatgtcaaataccatcttggaacttcatatgacaggcctaccaggggcgggaaacatatccatctgtcactggttgcgaacccaagtcatttggaagcagtcgatcctgttgttgctgggaagacaagagcgaaacagtactattccaatgaccgtgacaggaccaagaatttgggtgtgttgctgcatggtgatggtagtttctcagggcagggcgttgtgtatgagacactgcatctcagtgcccttgaaaactacaccactggtgggacaatacatatcgtggtcaacaatcaggttgctttcactactgatccaaggtcagggagatcctctcagtattgcacagatgtagcgaaagcattggatgcgccgatttttcatgttaatggtgatgatttggaggccgtggttcatgtctgtgagctcgctgcagaatggcgacagacatttcattcagatgtagtggtggacattgtatgctaccggcgatttggccataatgaaattgatgagccgtccttcacccaacctaagatgtacaaggtgattaggaaccatccaagtgcgcttgagatttatcaaagaaagttgttagagtctggaaagatctcaaaggaagatattgataagttaaacaagaaggtcagcactatacttaatgaggaattccagaacagcaaggactatgttcccaacaagagggactggctttcagcttactggactgggttcaagtcaccagagcagatttcgcgtatccaaaacactggagtcaagccagagattctaaaacgagttggagaagccatgactactctaccagaaaatttcaatcctcacagggctgtgaagaagattttttatcagaggcgtcagatgatcgagactggagaaggcattgattgggcagttggtgaagcacttgcttttgctactcttatcattgaggggaaccatgtcaggttaagtggtcaggatgttgagaggggtacatttagccaccgtcattctgtcctccatgaccaagaaactggagagcagtactgcccactggatcatcttgttatgaaccaagatgaggagctttttactgtgagcaacagttccctgtcagaatttgctgttttgggctttgaattgggttactctatggagaacccaaactcattggtcatatgggaagctcagtttggtgatttttccaatggagctcaagtgatatttgatcagttcctgagtagcggggagtcaaaatggctccgccagactggccttgtggtttgtcttcctcatggatatgatggccaggggcctgaacattctagtgcaagattggagcgctttcttcagatgagtgatgacaacccttatgttatacctgagatggatccaacactgcggaagcaaatccagcagtgcaattggcaagtcgttaatgtaacaactcctgcaaattatttccatgttctgcgtcgccagatacaccgggactttaggaaacctttgattgtgatgtccccaaagaacctccttcgccacaaggactgcaagtcgaacttatctgaatttgatgatcttgcgggccaccctggattcgacaagcaagggacacgcttcaagcggctcattaaagaccagaataatcacaaggacctcgaggagggaattaaccgtctagttctttgctctggaaaggtgtactacgaactggatgaagaaagaaggaagacggagcgcactgatgttgctatatgtagagttgagcagctctgcccattcccctatgacctcatccagcgcgagttgaagagatatccaaatgctgagatcgtgtggtgccaggaggagccgatgaacatgggagcgtacagctacatcaacccccggctgctgacggcaatgaaggctctgggccgtggtggcatcgaggacatcaagtacgtcggcagggccccgtcggctgctactgctacgggcttctactcggtgcacgtgcaggagcagacggagctggtgcaaaaggccctgcagcgcgaccccatcaactacccgttctgaaagaaacgagacccctgtaaattcttggaaaattgggcaccttttgattttgatatacctctatagagagagcaggccttaaggtatgcctgtgctgctgtgcagccatttgttgaaataatcgtttcggactctacagtaccgcattatatagtttataattccatgataaatattgtataagtaattattgattaattaatattatttacttcctccgtccacaaatgtttatcgttatgatattcgtgctagaagtttaactgaatttatagaatatataagtgatatt

SEQ ID NO: 19775 - DNA, 2203 bp, Zea Mays
aaaagtaccctcgatctccaaccggttcaccactcaccactcaacagccctcccctctcatcatctcctccccccgcacctgcacagcctctcccgccgcgcgccgcctccgcgcgccatccagacgccagtgcgcgtcgcggtccgctgcccgcgttcaatggtgccttgcttccccaactcggtgaaaaacctcggccgctatcctcgccgcctgcagttgcaagggctacctatgccgatgcaaggttcctggcaccgaaaaccagttcaagaggtagaggtaaacacctgctatcacctagttatagtttgcattcacagacctcttctgaacaaataaaccatgtaccgtcgtcaagatctcgccagaaaaggggctcaagttttgtcgtcagagctgaagctgatttctataacgtacttggtgtctcaagaaatgctagtaaatctgaaatcaagagcgcctatcggaagcttgctaggagctatcatccagatgtaaacaaagatcctggtgctgaacaaaagttcaaggaaatcagcaatgcttatgaggttttgtctgatgatgagaagcgatcaatctatgataaatatggagaagcaggtctgaaaggtgctggcatgggcacaggagattactcaaacccgtttgatctattcgagtccctgtttgaaggattcggtgggatgggtggaatgggtggcggtcgtgctgcccgtaacagaccaatgcaaggtgatgatgagagctacaatctggtactcaatttcaaggatgcggtgtttggtgtggagaaagagattgagataaccagattggaaggctgtaacacctgcgatggaagtggtgctaagccaggtacaaaggcaacgacatgtaaaacttgtggaggccagggccaggtggtctcctccacaagaacaccactcggaatattccagcaagtctccacctgcaatacctgtggtggcaccggcgaattctccacgccttgcaacacctgttcgggcgatggccgagtgcgaaggacaaagaggatcagtctaaaggttcctgccggagtggattctggaagcaggctgagggttcggtctgagggtaatgctggccggagaggaggccctcctggggacctttatgtcttcattgacgttctctctgatcctgttcttaagcgagatgggacaaacattctctacacgtgcaaggtttcttacatcgacgcaatccttgggacaaccgtcaaagtccccactgtcgatggaatggttgacctcaagataccttcagggactcagccaggcacaactctggtgatggccaagaaaggtgttccgcttcttgggaagtcgaatgctcgcggagaccagcttgtgcgcgtacaggttgagatcccgaaacggctgagcagcgacgagaagaagctagttgaggagcttgcaaacctgaacaaggctcagacagccaatagcaggagttgatttattgagcaaatctttttaggacaccatgcttgtggtcacaggcaattttgatgcaaattgcagtgatgaaaagagttggtagtggttcaacacttctacgaactaaagaggtacactggagcgaagcgtgtcatgctcatgccatatctgtggcctcgtttctaagctattggaaaccaagtcggtgaccactggacgtcttgcaatagcttaacatatacgactttattagccattttttgttacacggctttttgtattcttgagagccttaggcaaaatctctggtagtggaatcaggcttagacttttacatttcttgcagaaatgctgcaccattgatggaatatgtaagctgcaccatggaaatgtgactgcagttttatggtttgtgatgcgtcgggggtttattgttttgctcttcaagttcgttatctaaacaatacatttatttgcccctggcaggggcagctgttgatttgaagctgcctctgcgcagagcaggtgcatttttgtggtctaggcagctgttgacatgaagctggttgttctgtgtttgcaactacttgggactctaatttaattttgttcctgtatgatgtttttaataaaatcgcaaatgctttttttctgcatgcacatgcgtaaaggcatccgcatgcacagtaggcattacaaatccggttggaaaggacgaaaatttgtccaaaaa

SEQ ID NO: 19776 - DNA, 2105 bp, Zea Mays
tagactgctagcttccattccaacaagagctagatactccgtggtcgtcgtcgtcgttggacgtacgccagaagagggagctagagaagaataccgtacagctgcttccaacatggcagctgcctcgtctgcccacctgttcggactcggcgacgggcagatgcagatgcagccgcagcagcagcaggcgccgcctcctcctcttgtgaacaacccggccgcgccgccgcccaagaagaagcggaaccaacccggtaacccaacagaccctgacgcggaggtgatcgcgctttcccccaagacgctgatggcgacgaaccggttcgtgtgcgaggtgtgcaacaaggggttccagcgggagcagaacctgcagctgcaccggcgcgggcacaacctgccgtggaagctgaagcagaagaaccccaaggagacgcggcggcgggtgtacctgtgcccggagccgacgtgcgtgcaccacgacccgtcccgcgcgctgggcgacctcacgggcatcaagaagcactactgccgcaagcacggcgagaagaagtggaagtgcgacaagtgcaacaagcgctacgccgtgcagtccgactggaaggcgcactccaagacgtgcggaacccgcgagtaccgctgcgactgcggcaccctcttctccaggagggacagcttcatcacccaccgtgcgttctgcgatgcactagcgcaggagagcgcacgggtgccgcccatgggcgccggcatgtatggcactggcggcatggccctcggcctctccgggatggccacatcacagttgcagtcattccaagaccagacccactcctcggccaccaccgccatcagcaacaatccgacggcgcagttcgagcacctcatgcagtcgtccaccggctcccccgttttccgcggcgcgcaaccgacatcatcgtcttcctcgccgttctacctcggcggcgccgaggacggccatcaaagcctatccggccacacctctctgctccacggaaacaagcaggcctaccacggcctgatgctgttgccggagcagcagcaccaggcggggagtaacggcctcctcaacctggggttcttctctggcgggagcagcggtcaggatgcccgcctcgtgttcccggaccagttcaacggtgccgttggcgggaacgtccgcggtgacggcagcgagcacggcaacagcggcgctaacacggaatcagcggccatcttctccgggaacctaatgggaaaccaccaaatggcaagcagcgccggcttttcttcctccttgtacaactcgtccgagaccgctgccccggcgcagatgtcggcgacggcgctgctgcagaaggccgctcagatgggcgcgacgacgagcagcggcaacgtgaactctctgctcagggggcttggtagtagcgccggcggcaccttgaacgggaggcctgccggagcagctgctgggttcatggccggcgagagctcctcggcgaggagcacttcccaggccgagaacgagagccagttccgggacctgatgaacacgctcgcagcttccgggagcggagctgctggcacagcgttcagcgggggtttcccgggcatggacgacagcaagctgagcacgagagacttcctcggcgtcggcggcagcgtcgtgcggagcatgggtggcgcggcagggctgccgctgcggcacggcggtgccgcgggcattggcatgggctcattggacacagaaatgaagtaggcgaatcgaaatccgaaacgagcattattatgctccactcttgggcagaggctcttgcattgcatgcaaggtaagtagtagcacagcctaagcaaacgactatggaaagatgagaccatttgcgcccaaaatgacaaatgaggccgtcaaccatcatatgtttatggtgctgcatgctgcatgaatattgatccttgtttattgtagctccctcctcccagggatcatggaagaatcgatgaagaactaatagcagagaaggctggacaatttgttaaattaaatgccagtatatctagttattttttgttttgatgcataatacttactggtttcctctctgctatagtag

SEQ ID NO: 19777 - DNA, 1914 bp, Zea Mays
gcagtgcagtgctctcgctgcggccctctcctctccctcaccctgtctctctcactcttcccatccaatctttatttccacaatccattattccttcccccttcgcttcgcttattcccccactcacttcccttccacaccgccgcctccggagaagggtccacggcggcgtccttcctcgggaggcgctcggctcggattcgctcctgctcggcggcggcgtcgccggctggtgggctcgcgcgcgcacctggtgctgggctccgcgggcgctcctcgtgcgtgacacgcgcccgatgcgtcaggatcgcgcggccggcgcccggggcctgccgtgattctgcggggaggctggatctcggtgcttccgcgtgcgggaaccacagagaagtcaacagaaaatggtagtaggaatcaaccggtggcattggtagtctcaggttctacaactactagtaatgctgaaagcagttcatctgcatctaaagtcggagaagagataaaagttgcctcccagctgcgcaagtttgcattcaatgatctaaaatgtgctacccggaacttcaggcctgaaagtctccttggagaagggggttttggatgtgtttttaaagggtggattgaagaaaatggaactgcacctgtgaaacctggtacaggtctcacagttgctgtcaagacgctgaaccatgacgggcttcaagggcataaagaatgggtggctgaagttgattttcttggaaatcttcaccatcccaatttggtcagattgattggatattgtgttgaagatgaccaaaggttgctggtctatgaattcatgcctcgtggcagtttggataaccatctttttagaaggtctcttcctctcccatgggcaatcagaatgaaggttgcactcggagcagcaaagggtctggctttccttcatgaagaagcagaaagaccagtcatttatcgcgattttaaaacatctaatatactgctggatgcggagtataacgcaaagctctctgattttgggcttgcgaaagacggacctgtaggtgataaaactcatgtttctactcgagtaatgggaacctatggatatgcagcaccagaatatgtcatgactggtcatctgacatcaaagagtgatgtctacagcttcggggtggtgcttcttgagatgatgtcagggcgcaggtcgatggacaagaaccgcccgaacggggagcacaacctggtggaatgggcgcgccccctcctaggcgagaggcagcggttctacaagctaatcgaccctcgcctggagggcaacttctcggtgaagggcgcgcagaaggcggcgcagctagcgcgcgtgtgcctgagccgggaccccaaggcgcggcccctgatgagccaggtggtggaggtcctgaagccgctgcagaacctcaaggacatggcgagcgcctcctacttcttccagacgatgcaggccgagcggatggcgcactcgagcagcatgaacgggaggagcagcatgaacggcggcttcaagacgcagagcccgtttgggcggcatgggcagccgcctcccgtgaggagcctctctgacgggccccgcgcgtctccgttccgctactcgccgaagcctaacgtgaagtgagcggagtggtggaggcgcggttttctgccggctggaaggcacggcccctggatgaaacctggtttgttgggggtgactggttcgggccgtgcatttgcattgcattgcattgatgtgtgtgctgtagattgacatgtgcacaaagtaaaaggatataggcgaaaaagggtggtgtaggtatcggagtttgcttggcggatgtttgctctgaggttttaactgaatgaatgcggatgcaccgttgctatatattttttttgccccaaacaagtatggta

SEQ ID NO: 19778 - DNA, 1385 bp, Zea Mays
ttgccctcctctctttcttcctccccgctccccaccccctcaaacccgaaaggaaccctaatcctagccgcacgcgggaggcagctaagagagcttgaagcaccagccatggcggaccacgacctcacggcgctgatggcggcgcagctggaccggcacctggtcttcccgctgctggagttcctccaggagcggcagctctactcgaggccggagatcctggaggccaagatccgcctcctcagcggcaccaacatggtcgactacgccatggacatccacaagtccctccacggcaccgatgacgttcccgaggacatggtcaagcgccgctccgaggtcgtctccaggctcaggtcgctcgacgaggccgcagccccgctcgtcgccttcctccagaacccgcagctcgtgcaggagctcaggcccgacaaacagtacaacatccacatgctccaggagagataccagattggtcctgaccagattgaagctctgtatcagtatgccaaatttcagtttgagtgtggtaactactcctgggctgctgagtacctgtaccagtatcgtgctttgtgcacagatactgagcgaagtgtgagtgccctctggggaaagctagcagcagaaatcctaatgcagaactgggatgtggctttggaggaattcaaccgcttgaaggaaataattgattcaaagaacttctcatcacctctgaatcagctccagaacaggatatggctgatgcattgggctctgttcatcttctttaaccatgaaaatggtagaaatgggatcattgatctgttcttccaggacaggtacttgaatgctatacagacaaatgctcaccatcttctgagatacctagctactgcagttgttgttaacaaaaggagaaggaatatgcttaaagagttgattaaggtcattcagcaggagcagcatagctacaaggatcccataactgagtttctgcaatgcttatatgtcaactatgattttgatggtgctcaacagaaactcgtggagtgtgagcaggttatactgaatgatcctttcctgggcaagcgcgttgaagagggaaattttgtcactgttcctttgagagctgagttccttgaaaatgcccgactgtttattttcgagacatactgccgtatccatcggtgcattgatatcagcatgcttgctcagaggctgaacatgagctacgatgaggccgagttgtggataatgaacttggttaggagctcaaaactggatgcaaggatcgattcagtgtcaggaactcttatcatgacaaccaatcacatcaatgtctggtgtgcaggaaggggacacatcagctgaagatttttgacgaagagttcagattgagtctg

SEQ ID NO: 19779 - DNA, 151 bp, Zea Mays
gaagtacaagtggctcaggaggagccacacaacgaggagtttgattcgatctaggtggcgtctcccagttgactttctggcgccaacgatggattttagatcctgttatatttatcatttatttttgtaagtcttccactatgtaataaat

SEQ ID NO: 19780 - DNA, 678 bp, Zea Mays
cgaaaacactgttgtatacttgtatagtcgagtcgacagagagaagcagtaacccaagagcatggacaaaaaatcaatagatatcaagcaatccttgcagcccgtctgaaggctaagtttttctctaagaaggcttttgacagagggaacatttttgaatcagaaaccattgttggaggtgaaacaattcggtcaagcaggtggccatgtacaagatcatttgcaaacccagaatttttttcccgcgacaagaacagccatgagaagggaaattctccatcttcagcagcagatttctctgccaagaacaactctccacccttggctggtgaagcctcaccaaagaataatgctagtgctttggtcacagaaaacaatttaacaactggaaatagacagcaatccaagaagaattgacctgatggattaatgtaggataatcaggttatgttctgttcttctgtagcctgagggtagcaacctgaagtatacacttagcaggaaaggcaaattgacgccaaaaatgtttgtaacctgctctaaattcagtttgttgtacctgttctagaaagcatctgtagcgaggaataccgttgtttacttggtatttaaattgatgtattatagactccctattgaaccattgattgctcaaatctgaaccccaaattttcttta

SEQ ID NO: 19781 - DNA, 340 bp, Zea Mays
cccccccagtccgtttttttatacactcacccaacgcgaggccatggcgacgtggttggtgttagcaccagagggggaggaagaaggaaagcaagcaagtggtgggaggagtcatggactgctgcatctgcagccccacggcgtccgtgtacaggcttccgaggaactccatctgtgctccatgccacgagggcgccaaggcagtcatcgcttttctgaacaaggatggtgagcggcaggaggaagacgccggtggccaccaccaccatggctctgccctcaagtccagagggtccacgacgcagcctcatagcgcagccaagcggtgtactaatgcatg

SEQ ID NO: 19782 - DNA, 854 bp, Zea Mays
cagaaatttatctatctgatttttagatggtctttattctaatttatataccatggagcgccctcgatttagtgatcatcttgaagcaatcaagtttatctgcaaagatttttggtcagagctgttcaagaagcagattgacaatctgaaaacaaatcacaggggtacctttgtccttcaagataaccgttttcggtggcttactcgtgtttctctagatccacgtacagagaacacagattcaactgaaaatgattctgcagcattgggtgatactgcagcccaaacgactaccatgcttctgtatttcccatgcgggttgataagaggtgccttgaccaacttaggaatttcgtgttctgtctctgctgacatgtcaaaccttccagcatgttcgtttgtggtgcgcataaagacatgaactgtgaggaatgatacaagtacagtacgaagattcgacagtatctgcttgtggttcaagccgggttgaacattgaagatagcagagtttgggcatgcattagatgtattgtggtactgcagaaatattctgtgtagctgttggtttctgtttccgtttcttccagcagttacctgttttcactacctcaattgtttccccacctcttcgtgaccgtattccagagtttaggttggccattcctgcactctaggtagccgccactggcaccatttgtgagagttaaactatggttgttggttgcattatctctgtggcctgtgatagcacccttaaagcatgattcttgccatgattcgtgtgctagtactcttctaagcatgatttttgctaccatgattaattgattgtgaagtgcaaattgaataattca

SEQ ID NO: 19783 - DNA, 145 bp, Zea Mays
gcagatgaagttatgatgctgagctccatggatgctactctagtgatacccccggtcatcttcctgtggatggatgtccatgttcgctgtactttgatgaataaaggttaagacattatgtctgttcgaagtgtaatatgttaat

SEQ ID NO: 19784 - DNA, 1079 bp, Zea Mays
ctcacatacatctttgccatttctttacttcatgatcaaaactatatttgtcaaggctggagtaatgatatcaacaacagaccttgcgcaacatactcttgaacaacattgggatgctaattaatgtccatttcttgtggaaccatgtggatatactccttgcagcggtaattttggtgatcaccgtaaagacatttattgttgctattgtcgtaaaagggtttgggtatagcaacaaaacatctcttcttgtcggcatgtctcttgcacaaataggagagtttgcttttgttctcctaagccgtgcttcaagtatccatctcatcgagggcaagctatacctgcttcttcttggaaccactgcactcagtgacaacccctctgctattcaaaatgatcccagcagtggtccacctcggggttcttttgagatggttttctgtcgataccaatcagctgggcctaaaaaatgatgtcctccgcattgatagcggcaagcgcataaatctgatagtccaaggctcacatgactcatgacacatggcacactgcaagctacttttttgtatggcttgagtttacaagctctgtaaagtgttttcacctgtattgaagagtttgtagcagatatacaagggtggaggcaagagaactcaactcagatcttgctcatagggtgagatcaatcctcccccatcatggagactgcatgggcagttgggtttgccgtttttgagagcagtgtgtctaggatgattggtggagtgagtggctgtcgaccccaaatgagggtctcgtgtaacataagaatgtatgatggttaattgattggatcagcatgataggatctaggcgtgatcgttatgccattgtatcctttcagcaaaactgtgtatcctcgcaacacgaaagtgtgtacaacagtatccatcagatcacgaatttcgttatgtaaccatatactcgtcctagttcatgattttttttcacgcgaggcttctagtaacctgtctatatatcactttgttggattcaggctcacaatgatgggtgtgcctcaacgaattgattgaatccat

SEQ ID NO: 19785 - DNA, 1294 bp, Zea Mays
atgatgacaagatgtggggtttagctggggctgcaggactgagagagcaagcgtgaagctgcttattttgttgtggttctccatgacaaaagaactgttgtcattggggttcgtggaacagagacaccagaggatctcataactgatggattatgcagagaatgtgcttttactatggaagatttggatggactagtaaatagtgaacaattacctgcaactacaagagagagagttatttcaacatttccacactatggtcatggtggaattgtagagtctgccagggagcttttcatgcaactaaatggagaaaacacatcttctggaagacttgggttcctttccacactgctgggggagggcagtgagtgtcatggatataaagttcgtcttgttgggcattctttaggaggcgctgttgctacagtcctaggaatgatgctatatggcaaatacccaagcgtgcatgtatatgcatatggaccacttccttgtgtggactttgtaatagcggaagcatgttcgcattttgtcacaaccattatttgcaatgatgaattttcctctcgcctttcaatcaattcgattcttaggctacgatctgctgcaataagtgctctttcagataactctccagctgatacagcaatgatacaaaagctcgctcgaagaattttgcatgtgaacaggtatcatgataatggtcctgacgatggcataatccagggctatgctgatcatacaagaacagcagatacaacagtaccgaatgaaagacaaatttctcatcagattccattatgcaatactgaactagacctccacaatacgcaaaatggcttttttaggtataatgggtccagtgcatcaatagatgagcatctgagctatgaaggcataagcagtggccatgatatgcaaataattccacttgatggggctgattctggttttgaagggcaccagacatcttacagagaaataccagtggagcctcctgagatgtttcttgcaggcttaattgttcacatagtgcggcaaagaagaagtctctttcctctttggaaatgctggagcatccaggaaactgaaccaccatacaaagctgttttagcgaaaagggagaacttcagggatatagtggttactccttacatgtttacagatcacttaccatggagatgttcgtgcttctactatacctgcctcacgattagaacagtccttgatggagtccttatcttcttcaattgtgccttcttcagtggaatggcagcatgcaatggacgag

SEQ ID NO: 19786 - DNA, 869 bp, Zea Mays
tgccgccatcaccgcggaagaaagaggtgggagcggggttggacgtagggaagccagacggtgcggattggtccatcaatgagtgagtgcagagatggacacatcaagccctgcagcacttgtcaatgcaaagattatgaacatgtttgttgggcaaagagtgcgcacagttgttcaagtccaacacaatgatggtggaatgcttgtcgggcagtcccctgatgggcatcaattgagtatcaaaagcgccatggatgtccctgtatcacactttatggaagtttatggaattgctgaaaacagccagaccatccgcgctgaagtttgcacagattttggtcctgactttgatcccgagacttttaatcaattgtgcaacctggcgagtaacaagttcaagcacatgttcctgtagaggtcatcatcaagtggaggaccttcggccaactgaagcttgtttgaaatcgatatgattcacctctaaatgttctttcactcaccccagtactctgttgtcagtattggactccttttagcatgtattaatctaagcaacataagactacgaaggcaagcaaaatatatcgtgtagttgaagaacgtatggtcttttctacttttaggcaatccaaagctaagcttgttatgttgctgtcacttacatttggaccctgagaagttgctacaatggctaatgcagcttgatgagaggaaagagttctaatgtgataattacatgccccatctgaaaattctagctttgattttatgtctgcaagatccaccgtagtcaacctgaaaccctctattcagttcttattgggtttaaggcttgagatttagatttttgtgtgcatgattctgcaaat

SEQ ID NO: 19787 - DNA, 1208 bp, Zea Mays
ttcaaattctactctgcaaacgctttcgtcttcgcctcggtttgggagccacatggatcggggcacagagattccgtgtgatcggggcacagagattccgtcgtaaaaaaatcgtccttcctgcagtgtcctcgccgacagggaaagccgtgttgcaagaaggggaattccgctgcgagatccgtgaacggttcagagatggcacagacggtgttcaccccctctttggaagcgatgaagcatgtcaaggcagagaacggagtcattctcaccaagcccttccttgatgtctgcaagcaaatattgcctgtcctcgataaatttggaggtgctatggcaattgtaaagagtgatatcggcggcaatatcacaagactggaaaacaagtatacttcagaaccatcaaagtatgaacacttgtacagcatggttcaggaagaagttcaaaacaagaccgcaaaaggttcctcaagctgcacaaatgggcttctgtggctgacgagggccatggacttccttgttgagttgtttcgtaacctgcttgagcatccagactggaccatgggtcaatcttgcactgattcatacaccaagactttgaagaaatttcatggatggcttgccagttctagttttacggtggcaatgaagcttgctcctaatagagagaaatttatggaggtcattagtggaaccggtgacatcaatgcagatattgagaaattttgcacgaccttctctcctttcctcaaagaaaaccacaactttctggcgagcgtcggtcttgatgatctgaaggcttcatagatcaatctccatgctgattacaacaaaataagcatgtcttacgaaactcaaagtgttgccgagggtatacctgtttcccgtagccatctcccccttgaaaaactttaggagatggtaataatttgtcagcatgattgaccatggctacttacgcagagaattgacaccactcaacaaatttagttaccgaactctcgatcctgtgttacagcaaatcctatggttatgtggaactctggtgctgtaattctcttgtatgctacccagtatgccgcaggaaatcataattcggtgttccattgcagcaggaccatcgtgtcacttgtaggctacccatattgactttgtggctcagccagctgcccacttccaacacagttgagcgagaacatctagatgac

SEQ ID NO: 19788 - DNA, 3240 bp, Zea Mays
atggttccaaaagggcggcggcaggggcaacaacggcagcccaatgtggcctttcaaatactaaatgaaaagacaactgtcttgtctcctgaagtgcttctttctgctggagttccttgctgcagattggttcaaaaccctggtgaatttgttatcacattccctggagcttatcattctggttttagccatggatttaattgtggagaagcaacaaacattgctacaccttgctggttgcaagtggctaaagaagctgcaatcaggagggcttccacaaattcaggcccaatggtgtctcattatcagctgctttatgagctagcactgtcattacatctaagggagcctaagaattctcatatgcctagaagctctcgtctaagggacaagaagaagaatgaaggtgaaagaatgatcaaagaaacatttgttggaagtgtgatagaaaacaacagttttctgagcacccttcttgacaagagttcttgtataattatcccggagattgaatttccccttccatctgttcctacaacgagggcacctgaagtctctgataagcaaggcttgattgctggtccctgtagtattagccagcaaaaagctgaggaaactcttgtttatggtgatgaaattgatgaaatcaaagaggttgagaacatgagtgaatcaaccacttcctctgcatgtaaccaaagaaagttctacgaaacaaaatttggaatagttagtagtactgcattttgcttatcaacttcagatattcagattggagtaattggaaaaggtagatcacatcaaggaggtgggctcttagatcaagggcggttgccatgtgttcagtgtggcatattaagctatgcttgtgtagctatcattcaacctaaagaagcggcagtccaatatgtcatttctagggagtgcatgtcatcaagtgcaatacacagagaaataatggaatcggatgatacctcaaatcgaatggtgatagctcatcaacaagaataccctagagcagagtcagcagcaaaagttatagcagaagaacttggtatgaagcatgcctggaaagatatcactttcaaaaaagcaacacgtgaagacactggaagaattcaattggctcttcaggatgaagatgcagaacctacgagcagtgactgggcagtaaaaatgggtatcaacatatattacagtgccaaacaaagcaaatctccactttacagcaagcaggtaccatacaattctatcatttacaaggcatttgctcaggaaaatccagacagcttcgcagatggacagcgatcaagcacaacaaagaaaaaggtagctggatggtggtgtggcaaaaaatggatgtcaaaccaagttcatccacttttagcttgtgaacaggtagaacagaatcatgaaacagtttacagcaaaacgatgttatctgctagttgtgacaggatgcaagaacaatcaacaagatctactaccctgatcaaccaaaattcttcaaaaaagataaccagaagaaaagagggggactctgttgagaaatctagaggcaaaaagaagagatgcagtgccagtgcttctgatgaagctgctttgcactgcagtgtgtatgatcagcctgtaaattctgataatcatgccaaatatgaagatggagatgaaagtgtggaagcacggaacacccgacatcatcaacaatatgaatcgctaaataaaaaatcaagtttgaagaggcgaaaggataataatagaagcaacagctttcatgagctacacaaggacaatgttgacattgactgcaggtttgatacagacggcactgaaaacacctcaataggtgactgggataatagtccaccacaagggggtgatgtcaaagcagtgaaatctggtgctcgattgctaggcactaagaggtttagcaaggagaagggaagtaatggtttgtcaaatgtaaacaagaaattggtaaagatgggtaagaaaattagtactaagaagcaaaagaatgacaaaacaaataggcagtttcaagaaaatcacaaaaaggctgacattgtggatttgcttcatgaagatgatggagatgaaggcacatacatagactgcaatgaaattcgaaaacaaaaaacagatgacgtgagagtaaaatctagaggcaaaatgcaaagtggcaagaaaaaagtcagcagatgtcaggcaagtgatggttcgcacaatggaggcaaggaaatgaaattatcaagtgacatagaagtgtgcaacagaagaggagatggaacaacggcagccaattttgaagaaattccaaaagaaaaggccgatgctgtgaaagtgaaacccaagatgcaaggtgacaagaaaaaaaccagtaaacatcaggcaggcgatggagataaaggagcaaaattttcttgcgatatagaagggtgtgacatgagtttcagcacccagcatgacctgtcgctgcacaagagagacatctgtcctgtcaaaggatgcaagaagaagttcttctgccataaatacttgctccagcaccgcaaagtgcacctggatgaaaggccgctcatgtgctcattcccaggctgcgcgaagacattcaagtggccatgggcgaggacagagcacatgagggtgcatacaggggtgcgcccgtacgcatgcacggaacctggctgcacccagacgttccggtttgtgtcggacttcagccgccacaagaggaagactggccactcgtgtgacaagaaaaagaaacgcggcctttgactgctcgtgcacaagtacaggtttcttctctgacggcgagcgatctgaaggggatggatgctaatcgaataattgcgccaggttccattgtttgcagaattaatctgcattaggagtctaattcatttcattgtttattaccgctgcaacataacagctcattcactgtcgctttaggtccaactgacctgctggtgactgagattgtaccatgtcaattgtatcgttctttcgttcatacttagaaatcgggaagtttctgttgacaggaacgttggatttagtgtacggcgcctgttattaacatgcgtgtaattctgtactgaagtgctcctttcttatttttacattttttaaaatctggaaggaattagtgtacggcgcctgctagttttgatgtaggattcatttggcagttcttgaaacgattatcgcaaaaatagaatcacttgttggaaa

SEQ ID NO: 19789 - DNA, 1645 bp, Zea Mays
cgttacggcatgtcccgtcccgtcccagagagagaaaccacggctgcgcacagcgagttagatagagagagagagagagagagaccaagaccaaggccaaggagcaccgctccccgtacatccccagcaggagagggagagagacagagaaggctgtgcgaagggaagaagacccggcgggagagaagggcgacatggagaggccggcgcccgtgaggaagtcccacacgtcgacggcggacctgctggtctggccggaaggtgcgccgcaggagttgcccgccgggtccacgccgccatccaaccgccggccgcaccagccgtcggaggcgctcaggaaggtggtgttcggcgggcaggtgacggaggcggaggccgagagcctcaacaagagttctggtctataggctccggaaaaggaatggctagtagtgttaccgtaatgtgactatggtttagcccttcatggaattgccatctcaccaactatgttggagtactgcaaactgaccgtagccatcaaaatgctccccgtaaggaaaccatgctctgctcccaagtggaaggagatgacaggaagcggtatatttgcagctgggggcgagggtgaagaagatgaatccgccaatgtctctgcaacttccgtccggacggctccaaagaattatcaggcaatcagtactataagccacatctcatttgccgaggaagaaagcatctctccaaagaagccaacttcgatatcagaggtcgcaaagcagcgcgagctaagcggcacgcttctgagcgaggacgacagcaagatgaagaggcagatatcggacctgaaatccaaggagctcagcggccacgacatctttgcccctccggaggatcccaggccacgcaactcggagaacggctcgacctcgcagactccgggcaaaaatgcacacgtcctgacctctgactctgaactcaccctcatcataattacatgaaccaaaccaacccagttacaaaaaagctgcagtgttgcttactgttggttgtcgtgctcgcaacaggtaagcaacttcaagttcggcgaggccgacgaggacagcgcggtgaagaccgcgaagaagatccccaccaagaagttcaccgacctcgcgggcaatatcttcaagggcgacgacgaggcacccgggacggcggagaagcaccacctgagcacggcgaagctgaaggagatgaccggcagcgacatcttcgcggacggggaggccccctcccgggactacctgggcggaatccgcaagccgcccggcggggagagcagcatcgcgctggtttaacagcagggacaaacaaccagatggacatagcagcccctcccctacatcattcgtttcttcctcatcgccgtcgccgtcgccatcttaggagtgatcttttattagggagttttttttttcgttcattggaggactgatcgattggaacccctggcttgctttcctgtttcccgtgactttcgtcaggttttcgttggtaatcccctccgatggtggtgttgtgtgggtatgacaacaacgatggttatctctaatttaacattgatttggcttgggcttacctgatgcaacaacaaccgccagtggtgcgttgtctgatttccgtg

SEQ ID NO: 19790 - DNA, 1007 bp, Zea Mays
tcgacatgtgttctgttgcttcctaatcatttcgagtcgagttaaataagcagatctcctgcacgctgcagctgacgaacaagacagacaagcaggtcgcgttcaaggtcaagacaacgagccccaaaaagtactgtgttcggccaaacaacggcatggtggcgccccggtccaaagctgacgttgttgtcacaatgcaagcgcagcgggacgcgccaccggacatgcattgcaaggacaaattccttgtgcagagcgccatcgtggccaaggagaccatgccgaaggaagtcactggagacatgtttaccaaagattcaggcaatatagtggatgaagtgaagttgaaggtagtttatacagcgccatcgtcctctcaaagcgagggatttgaggatggtaatctcggcagtttgagttatcaagaggaaacaaaagaacccaaagaatcagaaaaaataatctctgagccatttgctttgatttcgaaactgatggaggagaagaattctgctgttgagctgaacaacaagcttcgacaagaattggaccttctgaggcgagacatcagcaggcagcatggtggtttctcattagttttagtactggtggttgctattctgggaatactgctagggttcctcatgaagagatgagcgcatgtaatgacttatcttgtctggcttttctgaactaaacaaaattgtatgtgctctgtgtgcgcttgttgttgtacaagtcagtggtctgtttatcataggatctgatgcctattgtaattttctgattcatattataaactttagccaatcaataagtcatagttaccaacaccagctgttatcatcttgcaagcgacttgaggtcttgaactgtagccgttcggtttgtgattgtgagagatttttttgactaattgttggcatcattttgcacatatgaacagaatgaaactgtggtttgtgatatatgttggatgctttgtggattgcgtggagcagtgtttt

SEQ ID NO: 19791 - DNA, 4007 bp, Zea Mays
ctggcagtggcagtagagggggatttccgcgggcgagcagtcgctctctcctgatgttaacggagagagtagtttgacgatactggggctggacatctgcgccgacaccatcgtcggcgaccagatgcagcgggggatctctggcggccagaagaagcgcgtcaccacaggggagatgatcgttggcccgaccaaggtgctgttcatggacgagatatcaactgggctggacagctccacgacgttccagatcgtcaaatgtctccagcagattgtgcacctgggcgaggccaccatcctcatgtccctcctccagccagcccccgagaccttcgacctgttcgatgacatcatcctgctgtcggaaggccagatcgtttaccagggacctcgtgaatacgtcctcgagttcttcgactcctgcgggttctgctgccccgagcgcaagggcactgcggacttccttcaggaggtaacatcaaggaaggaccaggagcagtactgggcggacaagcagatgccttacagatacgtttcggtgccagaatttgcgcagcggtttaaacggttccatgtcgggctccagcttgagaaccacctctcgctgccgtttgacaagagcaggtgccatcaggctgccctcgtattctcgaagcactcggtgtcgacaaccgaactcctcaaggcatcctttgacaaggagtggctcctcatcaagcgcaattcatttgtgtacatcttcaagaccatacagcttatcattgtagccctcatcgcgtcaacggtgtttctgagaactcacatgcatacgacgaatctagatgatggctttgtttacattggagcactgctctttactctgattgtgaatatgttcaatggttttgctgagctttccttgaccataacaaggttgccggttttctacaagcaccgggacctgctcttctatcctgcttgggtcttcacagtaccgaacgtcattctcagaatcccattctccattattgaatctatagtatgggttcttgtgacatattacaccatagggtttgctccagatgctgacaggtttttcaagcacttgctgctcgtgttcttgatccagcaaatggcaggtgggcttttcagagcaacagctggactttgcaggtccatgatcattgctcaaactggtggagcactatttcttcttatcttctttgttcttggaggctttgtcctgcctaaagttttcattcctaactggtggatctggggctactggatctcacccttgatgtatggatacaatgctctagctgttaatgaattctatgcccctcggtggatgaataagtttgtcctggaccaaaatggtgttcccaaaagactggggatagctatgcttgaaggtgccaacatctttgttgacaaaaactggtactggattggagcagcagggctcttgggtttcaccatcttcttcaatgtccttttcacactgtcgcttatgtacctgaaccctctcggcaagccacaagctgttatatcagaagaaactgcaaaggaagcggaaggcaacgggcattcaaaaggggcaataagaaatggaagcacaaaaccaaaggacggtagtcataacaaggaaatgaaggagatgaggttgagtgcacgtttgagcaactgttcatcaaatggggtttcacgactcatgtccattggcagcaatgaagctgctccaacaagaggaatggttcttccattcaaccctcttgctatgtcttttgataatgtgaactactatgttgacatgcctgcggaaatgaaacatcaaggagtgcaggatgacagactccaattgttgcgtgaggttacaggatcattcaggcctggagtgctgacagcacttatgggtgtcagtggagctggaaagactactcttatggatgttttggctggaagaaagactggggggtatattgaaggagacatcagaattgcaggctatcccaagaaccaagcaacattcgcaaggatttctggatactgcgagcaaaatgatatacattctcctcaggtcacagtaagggagtctttgatatactctgcctttttgcgccttcctggaaaaattggagatcaagaaataactgatgacataaagatgcaatttgtggatgaagttatggaactagtggagctcgacaatctgagggatgccttagttgggctaccaggaatcacagggctttcgacagagcaaagaaaaaggttgacaatagccgtggagctcgttgccaatccatcaatcatatttatggatgaaccaacatcagggcttgatgcaagagctgcagcaattgtcatgagaactgtgcggaacacagttgacactggacggacagttgtttgcacaatccatcagccaagcatcgacatctttgaatcttttgatgagttgctattgttgaaaagaggaggccaggtgatctactctgggaaattgggtcgcaactcccagaaaatggtggagtattttgaggcaattcctggagtgcctaaaataaaagataagtacaatcctgcaacgtggatgctcgaggtcagttcagttgcaactgaagtgcgactaaagatggattttgctaagtactatgaaacatcagatctgtataagcaaaacaaggtactggtgaaccagctgagtcaaccagagccaggaacatcagatctttatttccctacagagtactcgcaatccacaataggacagttcaaagcctgtctctggaagcaatggctgacttattggcgcagcccggattacaaccttgttagatattccttcactctgttagttgccttgcttctcggctccattttctggaggataggcaccaacatggaagatgcaaccactctcggtatggttattggagcaatgtacactgctgttatgtttatcggcatcaacaattgttcaactgtgcagccagttgtttcaattgaaagaacggtcttctacagagagagggctgctgggatgtactctgctatgccatatgccattgctcaggttgttatagagataccatatgtatttgtgcaaacaacgtactacaccctcattgtatacgccatgatgagcttccaatggacagctgtcaagttcttctggttcttcttcatttcctacttctccttcctctacttcacctactatggcatgatggctgtctcaatctccccaaaccatgaggttgcatccatcttcgcagcagctttcttttctctcttcaatctcttctcaggcttcttcattccgagaccgagaattcctggatggtggatctggtactactggatttgcccactggcatggacagtgtatgggctcatcgtgacacaatacggagacctggaagacctcatctcagtccctggagaaagtgagcagacgataagctactatgtaacacatcattttggataccacagggattttctgccggtcattgcgccggttctggtactctttgcagtattcttcgcgttcttgtacgcagtctgcatcaagaaactgaacttccagcaacgataagaacaagatatggcagcaaaagctcttgagagtttttttggaacattgccgtgtatatagggtattttgcacatcgcgttctcctttcattttttgagtccctttaatacattgtcgtgtatatagggtattctgcacatcgccaaatgtggtgaggtcttatacagatttctagccatttattgcaagagcaaaactatgatatttttccggatacacagaagagctacatattattatattaagaagagaggtctaacgtagacctgccacaagatataatcctctattggataagaggatataacactatcttcatctcctttacctatataaataggtctccttgtatcatgtaccacataatatctctttttcgtatctatgatcctaacatcctctttacagaggacgaaaacaaaac

SEQ ID NO: 19792 - DNA, 1478 bp, Zea Mays
ctgatccgagcactttatttctccacaacaatgaccaccgcttgtatgtgctgagctttggctccccccggcgcaccgctgaagcctcgactcgcaggcagccatgccgatgagaatcgagcgtgatctccacatggccacagggaacggagaaactagctacacaaaaaattctaggattcaagagaaagctatgtttcagatgaagtcggtccttgaggaggccactagagcagtatgcacagctctcctcccacaaaccatggttgtggccgacttaggctgctcatccgggcctaacacactgcgcttcgtcactgaggtgactagaatcatagctcaccattgcaagctggagcacaaccgacgacatgaccacccgccgcagcttcagttctttctgaatgacctgcccggtaacgacttcaacaatctcttccagctcatcgagcagttcaataagtcatcgacgacacacaagggagatgcagcaactgaggcactacagcctccttgctatatctccggattgccgggctcctactacactaggatcttccctagcgaaagcgttcatcttttccactctctgttctgccttcagtggcgctctcaggcaccagagcaattgaagggcacccaaaaatcatgcctagatatctacatcacaaagactatgtcaccatcgatggtgaagttgtttcaacatcagtttcagaaggacttctccctcttcctcaggctacgctatgaggaactcgtgtctggtggccaaatggttctaacatttattggaaggaagcatgaggatgtgttcgctggagagtccaaccatctttacggattgcttgcgcagtcactgaaatccctagttgatgagggtgttgtggagaaagaaaaacttgagtcattctatcttccgatctactcaccgtcggttggtgaagtggaggcgatagtgaagcaacttgggttgttcaacatgaatcatgttaaagtatttgagataaattgggatccctacgatgactcagaaggtgatgatgtgcataacagtattgagagcggtgaaaatgttgctaagtgcctacgcgcagttatggagccgctggtcgcaagccaatttggagaacgcatactcgacaagttattcaaagagtacgctcgccgtgttgccaaacaccttgagactgagaaaaccaagcatgctgttcttgtcctatccatcgagaaagcaataattcatgtgtgaagtgtcttgtttctcactatatatctttccattattatcacatggtaatatatgtttgttttgaatgtgcacgtttgtgtcactagctggtgtattgaatgtcatggtgtttttgttgttttctttgtcgcttctcctatattttagatgcctgaattttaaggtgatttcaggcaacactcctgtacaaggaattaatacaaataaattgctccttttatgatcg

SEQ ID NO: 19793 - DNA, 1036 bp, Zea Mays
accgtagctacggcctggcccaataacgaaccctgatccttgatctctataaattagaaaccctagcaccccgcgtcaccttcacccacctccgccagccactccaaacacttgcgccgccgctgcctcacaggtaaggccgccatggtctccggttcgggcgtgtgcgcgaagcgcatcgtggtcgacgcgcgccaccacatgctgggccgtctctcctcgatcatagccaaggagctgctcaatgggcagaaggtggtcgtcgtccgctgcgaggagatctgcatgtcgggcggcctcgtccgtcagaagatgaagtacctccgcttcctccgcaagcggatgaacaccaagccgtcccacgggcccatccacttccgcgcccccgccaagatcctgtggcgcaccatccgcgggatgattccgcacaagaccaagaggggggaggcggctctggcgaggctcaagacgtacgagggcgtcccgccgccgtacgacaagaccaagcgtatggtcatccctgacgctcttaaggttctgaggctacagcctggacacaagtactgcctcctcggcgagctctctaaggaggtcgggtggaactaccatgacaccatcagggaacttgaggagaagaggaaggagaaggccaaggttgcctacgagaggaagaagcaattggccaagctgcgtgtcaaggccgagaaggcagccgaggagaagttggggtctcagttggagattcttgcccctatcaagtactgaggagctgtgctttgtcatcagttttggggaacatctagtctttgttttaagtgttcggtaacagtttgtgacagtataatctgatgtctggttcgcattcgcattctgagagatttcatgtctcgtgctgactcaagctgtcacgcccatgtgcttcttgcacacgattatcaattcagtagttgtgattaaccaaatttttatgtgtactggcagaacccagttgcaattgcaatgaagctcgatgttgctctatcagatcagatcccag

SEQ ID NO: 19794 - DNA, 2035 bp, Zea Mays
aaccaggaaacgaacgaagggtgcctgcctgcttttggcacccagcttctgaactcaaaagaagaagaagaagaaaaaatcagttgtccccccgccattagctcgacaaaacttcaggtaacagaactggaccatcttggaggagacagaaacagcctgtcaaacacggactggcttagtcaaagccggctttcagacatataatcgcgctcgccgtcgtgcgcacggcagtcggcaggcagtaccggagcagcgtgccaggccccatggacagctcgagcggcatgtgggccgtgctcggccaggcctcgaacgtggcgcagctggtcggcgtggacgcgctcgggctggtgtccatggtcgtgcaggccgcgctggcggcgcgccgccaccgcgacgcgtgccgccgcctggcgcagcacgtggaggtcgtcggcggcctgctgcgggagctggagctcgccgagctgatgcggcgggaggccacgcggcggccgctcgaccagctccgggccgcgctgcggcggtgctacgcgctcgtcacggcgtgccaggactgcgggtacctccgcagcctgctcctcggcgcccggatggccgacgagctccgcgcggcggagaaggaggtcgacttgttcatccgcttagtcccacttatcgccctcgtcgacagcacgcatggtcgcagtggcaagactgccgagggagtaccaggtctactcacgaacggttcaaaccatcatgtcaggttttcaagaagtgtttccgcctccatcaaaatacacattcaacgaactactcaaatctgcagtattgcagaacagccattagcaggagcactggacttgggagaacataaaaatctggactttgaagaattgttggagctttgcatccgtactcaagagagttgctcaggattcagaaggtttgaattatttcagatcattgacgctacaggcaatttcccggaaagtagaatcatcgggtcgggtggttttgctatagtttacaagggtcagttacctgatggatccatggtcgccatcaaaaggatggatgaaggtgccacaatgtttgatttcagcagtgaatttctggctgcgaggcttcagcataccaatctaattagacttttggggtggtgtatccatgggaaagaaaggattctagtgtatgagttcatgcacaagggtaccctgcacagtttaatctttgacaaaagaatggggttgttgctagactggtctaaacgaatcgatataatcagaggggtagctgaaggacttctttaccttcacaagcaggccaagttatggattgttcatagggatttgaagctccagaacgtcctattagatcatgacatgaagccaaagcttgctgattttggatcggctagaagtctgagttcagattccgccgaagagtgtacaagcagggttgtggggactagtggttacaaagctcctgagtacacgtctcgaggtgtctattcactgaagacagatgtgttcagcttcggggtggtggttctagtgaccatcagcgggcgagagaacaccgtactggagaagcaaggagactctgttggcgcccttgtacgagatgcctggcagctatggaacgatggaaggctgcatgagcttgtagatccagtgctgggtgacggattcgaacttgctgaggtggtgcagtacgctcaagtggcactgctctgcgcgcaggaggagccagcagatcgtcccaccatgtccgacgtcgtgtcgctcctgaactttgaaagcataggtctgctgccagatcctaagcagccgtctgagctttgtaagggaggtggtggtacttctggtgacaggttgccgacatgtggtagccagtcgagcaggaccatagacatcacaatcacaagttcggctcctgtgtcaactagaactagggtccgcatcattgtggacccagagacctaaaatgtagacataaaccgatattaatatgtaaaagaacatggacaacttttagagctaaaaaaaaa

SEQ ID NO: 19795 - DNA, 180 bp, Zea Mays
gaacaagtgaagggctgcggtatttatagctggtttagagggcatcctggtactttgtttcttcgttcgtggtgtgggtctacaactctacatgttgcagtcatatacagtatagtgctaagtgataatgcgtgccttttgtagatttgcaagatttgttttccagataccagagtctct

SEQ ID NO: 19796 - DNA, 241 bp, Zea Mays
ggtgaggagggcttaaaggggatgcctccactacagttcccagagctggtcctccacaactgctggcctaactacagtaaatgatgatgagtcataagagactttttttgacttcagtacattctttggtaggggagaaatttgcatgaggagttatgaactgcatgcggattgagaaatgggagcatttgcgtataatacattatatatttatatcgttatatgtctatgtttaatcatg

SEQ ID NO: 19797 - DNA, 185 bp, Zea Mays
tatagagataaatgtcacaataatgagagtatttattacatagcggaagtcttacaaaataaaagataaacataaaataatctaaaatccatccttggcgccagaaagtcaactggaagacgccacctagatcgaatcgaactccttgttgcgtggctcctcttgaaccacttgttcttctcctg

SEQ ID NO: 19798 - DNA, 3598 bp, Zea Mays
catcattacgccagaccagagcccacgtgcattagacagacggccaactcacacccagcatcacaacgaaaattaattaccgcgcaaaagccaaacaaaaaagaaaggaaaatttaaacaagtccgtctatactcgtcgaatcgcgcaggcacgcgcaacgcaaaccacggccggacttgtctgctcccatcctcacctagtttcaaaatttcctctgttaaaccctacccacccgacgaatccctcgccagatccaaccagctcgccggaggaatacttcgggaggttagcgtggagagagagaagtaggcggctgagggagggttagagctgggcgacgccgtcgctgtcatggaagcgcaggcgacggcgacggcgacggtgaaggaggcgctcgcggcgctgtatcaccacccggacgacgccatccgcaccgccgccgatcgctggcttcaggagttccagcacacgctcgacgcctggcaggtagctgacagtttacttcatgatgaaagcagtaatttagaaactctcatcttttgttctcagaccctcagaagcaaggtacaaagggacttcgaagagttaccctcagaagcttttcgatcattacaggattctttatatgtattgctgaaaaagtttaataagggaccacaaaaagttagaacacagatttgtattgcaattgctgccctggctgtgcatgtacctgtagaggactggggagctggtggaattgtgaattggctaagcgatgaaatgaaagctcatccagaatttattccaggcttccttgaactgcttatagttttgccgcaggaaacttctagttataaaatcgcggctcgtcctgaaaggcgcagacaatttgagattgacctttgttcatctgctaatgttgctattgatttattaactgcttgcatggccattgatcaactgaaagaacaggttttggagggtttttcttcttggcttcgtttctgtcatggaatctctgcctctgaactcgcatcacatcctttggtccatttggcactctcttcattgaactctgatcaattcttggagccagctgtaaatgttacatctgaactgatacatgctactgtatctcatggctctggtgctattgctgagcgaatgccgctcattcaaattcttgtccctcatattatgggtctgaaagagcagctcaaagatccatctaaggatgaagaagatgtaaaagctattgctcgtttatatgcagacatgggtgaatcctatgttgacttgattgccacaggttcagatgattcaattcaaatagtgaacgcattgctagaagttacttcacttctggaatttgatatttcgtctatgacatttaatttctggcaccgtcttaagcgtaacctgatcaagagggactcttatgtatcatatggatcagaggtggcaatcgaagctgagaaaaacagaagattacaagtatttcgtccaaagtttgaaactctggtctctctggtcagttttcgagttgaataccctgaggactatcacaccttttccgaggaagaccgcagggattttagacatgttagatatgctgttagtgatgtgctacttgatgcaactgaagttcttgggggtgactcgacgctaaagctactttccaccaagctagctcaggcatatgggagctgcaacaatgagcagaaccccaagtggcaacctgtagaggctgctctgttctgtatacaagcaattgcgagatcagtctcaattgaggagagggaaattttaccacaggttatgtcactgcttccctgccttcctcaccatgagcagttgctacaaacagtttgttcaaccattggagcattttcaaaatggattgatgctgcaccagctgaattatctattctaccacctttagttgatattctcaataagggtatgagtacatcggaggatacagctgcggctgcttctatggcctttaagtacatatgtgaagactgtaggagaaagttctcagggtccctggatggcctcttccagatataccatattgcaatcagtggagttggtggttataaagtttcttcagaggactcgttgcatttggttgaagccctaagtgcggttattacaacgcttccaccagaatctgctagtagagccctggagctaatctgccagccagtaatcaatcccttgcaagaattaatccagcaaggtgatcaagttcttcaacaagtccctgctcggcatttaactgtacatatagaccgactatcaagcattttcagcaatgtgaaacaaccagaagtagttgctgaagctgtatatagatattggccgacactcaagagtatctttgatcaacgagcatgggatacccgtaccatggagtcaatatgccgatcttgcaaatttgctgtaaggacatgtggaagggtcatgggaatgacgattggtgcaatgcttgaagaaatccaaactctctaccaacaacacaaacagtcttgttttctttacttgtccagtgaagttatcaagatttttggatctgatccatcttgtgcgggctatcttactaacttgatacaaatacttttcagccatacagtgcaacttctcagaacgattcaagattttactgccagaccagatatagctgatgattgctatttgttagcatcaagatgtatccgttactgtcctgatctatttatacctacagaaatgtttcaaagattggttgactgtgcaatggctggtataactatacaacacagggaagcctgtaaatcgatattgtcttttctatctgatgtcattgaccttccaaactcatctgacgggggacagtaccgtaaagttattaacacaatcatacttcaccgtggcgcaacccttactagaataatgattgctgccttaacaggggcgctaccatctggtcgtctggaggaggtttcttatgttctgctgtcacttagcagagtctttggtgagaacatgctgaactgggcaagggaaagcattaatcttataccgccacaagccctaacagatgcagaacgtttgcgcttcttcaacaccatatctgatgctgcttctgggtccagtctccataccataacagatagatttggtgaaatctcagatgtctgtagacgaaacaaaacagtgcaggacctagttcagagtgccttgcggcctcacgatttgaccttcacagtggttccacaacagatgtgacaactggatgtctctgcaagttcatacaggtttgagttgcggcggcatacagttcagatttgttcagagcatagatagcttgtttttgtaaagtgaggtggccatcgattttatcatataagcttataccggctgttgaaggaagatcaagtttgtgtaccctttatgatccccaaatgtgatggccttctggtttgatgatcagaacggctgcagtgttaagctcaccttgaatcagggcagacgtttgagctaatttggctagttgcatctattcgttaactagtgtgtcctcgacaaggtttcgtcccgtgcttgcaggatgacagcaacaggtagcat

SEQ ID NO: 19799 - DNA, 1185 bp, Zea Mays
ccgccaatactgcaaaggatttaactttctcagatgtccttagcgatcccaagaaacgtgcaatctatgatcagctaggagaagaagggctcaaggggcagccgcccccaggagcaggaggttctggcgcattccccttcttccctggcggggctcattccaccgctccccattttaatcacaggagtgcggatgatatatttaaggagttctttggatcccctggcatgggtggcatgagagcggaaccaggattccagaggtcaatgtttggcaacgatatcttctcttcacgctttggcgctgagggttccaccagtatgcagcagccaccacgcaaggcagctgcaattgagaacccacttccagtcagccttgcagatctgtacaagggtgtcacgaaaaagatgaaaatctcaagagaggctatagatgccagcgggagaatctcaaacgcagaggatattctgacaatagaagtaaggcctggttggaagaagggaacaaagattacatttcccgacaaggggaatgaagctccaaacatgaaagctgctgatattgttttcatcctcgatgagaagccccatgatgttttcactcgggatgggaatgatcttgtggtgactgagaaaatctcgctggtggaagcgctgattggatatactgcacgtgtcactacgcttgatgggcggagcctatcattgcccatcaactcgataatccatccgagctacgaagaggtagttcctagagagggcatgccaatacccaaggacccctctaagaagggaaatctgcggattaagttcaacataatgttcccttctaggctgacgtctgatcagaaggctggtctcaaaaggatattgggttcttaggccgcctcaaatgacattttatagtgaaaggcgaagccatttttgcgggctccggctcctcctgtgaaaatgtgaaaagggcttcggctcctcctggaggattatgcacgacaggagctcaggattatgctgtaggcaaacttcggtgtttactggcacaaatcaagtgggattaaaacttatgatagaatgcttatttcttctttggccatgctataaagatatagggcatggatgtgcagtttaaaagtctaatgatgagtgataatgtacacttataaaatctagtaatttattgaagcac

SEQ ID NO: 19800 - DNA, 2242 bp, Zea Mays
tttacatgcatggttttatttactgctatgtgaagcagcacaaccagaatgcagaaggctttccgtcttatagaagtaaaaggacgcctttggaagtctctatacagaaatctcttggttttggtttgaagtccgaaaatggtaaacgggattatgttgcgaatgatatggttcaatccttgcataagcaagatagtaagatggtcacaaaaaagaccataaagttgttggatgctccaccttattcaaaaaggctaaagcttgagccagtacaaactggtagagatgctgagattaagggacatgaattcatatcacagaagaatgtgcctgatttggcaccatgtgcaacatctgaaaaatctcggttgctcaagcagaagcgcatttctgatgcaaagagaattgataagaagaatattaggtccggtgtcagatcaaaatacgattgtttctcatcaaaagctggtttagcacatttttgttctggtttctcaggaaacagcgtacttggagcgcatggccttaaatctgatgttcgtgacatcacgaatcacattgagaacctctcattgagtgaacttcttgatggcacctacaagtattccagcttaggaagagataaaggaaagaaggtattgcgcacgaaagaggaactcctagtctctgttagaaaagctttttctatgctttctgacatggactattgccacggaaaggactctaatctcattctgggtccgaaacctcctcctgcatgcacctctagctgtgatatcaaggagcaatgttgtgacaagccatcccccttggttaaggactcgtcacaaatcaatgtctgtgatactgcactttgtcatccaaaagatatcttaagccgattaacacttcctcatcaacaagatctggactctcttttaacacctggaagtgagagcacagctgcagttaagccagttcgtggagctagtttaccaccatttccttggtcacactcacaggctgggggctgtcgacaaagtgttgactgtggtaaacatgggtcaagtagaagttactcccagtggcaatgggtgcgggttggatccaacctcacttctctagattatgaagatacgtctgtccatagaattgatcatctccttcaagagatggatgcagcaaaattatgtagaatggattcatgtgatgggcaatataatttgtgtggcacggaatcaacatctggatcacttgcacaaaacattcaatccagaaaaaatgggggtgagcatggttctcagcaactgcaaaccctggatcgtgttgactctttagatggcttccagaagcatgacagtgaacattctcttttaaaaacttctcaagtatcgccaaagatacagcatgccgctgaaatcttatgtgatatgagaagaagcattgaatcgttgagtggccagggatacagcaatggggtgattaagtggccaaaatcaccatccgaaaaggtgatgaaagcacggaagccctcatcccagtttggtataactgagagctcatcaggttctcgtaacaacgatgcaacttggaacggtagcagtcactctaccaagaaattttgtgacaggaagaatgattctgcatgcttgaattaccctggtaaggaaactataaggtggcctgtgcctgtggaaggtggcgcttctcctgtcaggtcgtccgagcgcggtcctatgctcgatatgaggcagccccatggaaatggtggaagacatcctgttcaggtgccatcacaggtggcacggcttgaaaaggagtatgagaaccagcagaagttgaggaaagcaacactgacctcgtctctagggcctccgggagattggagtagggagaggaacaggagggtgtgaagtctgtacattattcatgtcaaaaatcataggctacggtatatcgtctgggggggaacagcggaaccaggcaactgtttcataagaggtctcagaacatttgggagatgtgataatttaggtggcgggtgatgtatctattgggccatttgttgttggggaaaccgttgtaactagtgtaaatttcgttttttattaccatcatatatcacaggtctcgtctcactatagtccgttgtgtattactagtatgtgtcgaagccctcaatagtttacgcgctaccattttttgatggttgcaacttaatctcagttttgcttgtcgtcagtcttgttaaatcgtcacccga

SEQ ID NO: 19801 - DNA, 3805 bp, Zea Mays
agtcgtcgatcggtctccacctctcaggcgcgtgaaggcgttgaaccaggcgaggctagaggcgtccgtgcgggcgtacggcggtgggtcggacgggaggcaggcagccggcagcaagagatggccgagcccgtacgtcctcctctgcgggctcctcctcgtcgtctcgctcttcgagcgcctctggcctcccctcaagtggtgcgcgctggcggcggcggccgccggcctgccgccgatcgccctcaggagcttcgcggccgcgcggaggctcaccctcgacgtcaacatactcatgctcatcgcagtttccggggcgatagctctcaaggactactccgaggctgggttcatcgtgttcctgttcactacggccgaatggctggagaccagggcgagccacaaggcgactgctgggatgtcgtcgctgatgagcatggcgccacagaaggctgtcgtagcagagacgggggaggtggtggcggctcaggacgtcaaggtgggcacggtgctagccgtcaaagccggggaggtcgtgcccatcgacggcgtggtcgtggacgggcggagcgaggtcgacgagagcaccctcaccggggagtccttcccggtcgccaagcagccggagtcccaggtctgggccggcacgctcaacatcgatggctacatcgctgtcaggacaactgccatggcggacaactctgccgtcgctaagatggcgaggatggttgaggaagcacagaacagtaggtcccgaactcagaggctgattgatacgtgcgccaagtactatacgcccgctgttgtggtcatggctgcgggggtggcggtggttcctgtggtggtgagagcgcacaacctcaagcactggttccaactggccctggtcctgctggtgagcgcgtgcccgtgcgcactagtgctgtcgacgccggtggccaccttctgcgctctcctgacggccgcgaggacggggctcctcatcaaaggaggggacgtcctcgaaaccctggccaggatcaagattgccgcctttgataagacaggtacgatcactcgaggggagttcagcgtcgaggagttccaggcggttggcgagcgcgtcactacgccacagctcctttactgggtctcgagcattgagagcagatcgagccacccaatggcgtctgtgctggttgattatgcccagtcgaagtcagttggacccaaatctgataatgtcgccgagttccaaatcttccccggtgaggggatttacggtgagatcgatggggaaggtgtgtatattgggaacaagaggattttgtcaagggcctcatgtgaaacagttcctgacatgaaagatatgaaaggagttaccgtcggatacgttgcctgcaaagggcagttaatcggagtattcactctctcggattcctgccgaactggatcagatgaggccatcagggagctgaggtcgctgggcatcaagtcagtgatgcttactggggatagttctgcagcagcttcatatgcacagaaccagcttgggaacatacttgatgaggttcactctgagcttcttccagaggacaaggtgaggatcgtcgacgagctcaaggcaaagcatggcccgactctgatgatcggcgacggcatgaacgatgccccagcgctggccaaggccgacgtcggagtctcgatgggggtatctgggtcagcggttgcgatggagacgagccacataaccctgatgtcaaacgacatccgccggatcccgatggccgtccagctggcgcggaggacgcaccggacgatcgtcgtcaacatcgtcttctcggtgatcaccaagcttgcgatcgtcgggctcgcgctcgccgggcatccgctcatctgggcagccgtcctcgcggacgtcggcacatgcatgctggtgatcatgtacagcatgctgctgctgagatcggaatcgaacggcggccggaaggtgaagaagtgctgtgcctcgtcgcagcatgggtcacactcacacgccaggaagaagcattgtgtctcccaccactgttcagatggcccgtgcaacaagtcgacggcaggctgttccaaggaatcgccgtctgctggtaagcatgcttgcagtgatcatggccatgcccacacccactgcaaagagccgagcaaccaccggccggaaaggcatgcctgtcatgatcacggccacagccataaccactgcaaagagcccagcagccatgtggttacagaaaagcatgtctgccatgaccacggcaacacccatagccactgcgaagaggcaggcaaccagctgctgcttgtagagagccacggttgcaatgaccatggccatgggcatagccatgaccgctgcaaagagctcagcagcccgcgcttcaccagcaagcacgagtgccatgaccatgagcatagccactgcaaagagcccaagactccgtgtgctgacagtgaggctgcttgccatggccatggccatggacacgaacatcggcactgcgaaggggacagccactcacacgctacaggtgagcatggctgccatgaacatgatgcgcacagccactgcgaggagcacggccattcagacaccgctgttgagcatgcttgcgagcatgagtgccatggtgagcaccaaactgtgcacgctgtggaaacacaccactgccatgaccacgaccatgagcacggacagcatgagcttggggagatcgaggaacctgagaaggactgccacgaccacagccaccactgctgccatgagcctcacggcaaggacaaggtcgcggccgagccagttgaagaggtcacgatctcaatcgctgccctgcccaaagacgaaggccaccaccacagcgaggaacaacacaatggggagcactgcaggaaggcgaaagactgcggcggcggcggcggcgctgctcccaccgactgcgctgcgagcaagaactgctgcggcgtcaaaggtggagacgcctgctcgagcgtgcaggccgcgcgtgctagggagaccggcccgtgctgccggagctacgtgaagtgccccaggacggcggcggcgagcaggagcagctgctgcggccacagcatgctgaagctgcccgagatcgtggtagagtagtagtagtactgtagtagggtggaaattccaccgtgggagaagggtgtgcacatatgaacaagcaactgtgaggtgagtgtgactcgccggcgtaaatgtagactaagatcgccggtgcagggtgtttgatctagtagtctagttactatataggtttgctggagaaaaaaatgatgtaggattttgactgagcagagcagggggtctgaaaggtggaaggaagggctctgcttggttttcctgcacactgctcctctgtttgcgtcttctgtggcggcggcggcaatggagactgtcacagacgaaggatgtcatgtgactagtgccggccggggccaacactaatattcaggaactatccatatccatttcggtcccttttaaaatgggagtttctttttctatctcctacgttttctattttagaataaattgatttatgtgactgcgattgcgttttagaataaattgatttatgtgactgtggctatgaaattactgggttctaaaatttctgtgctacggcccgatcgtgaaaaaaaaatactgggttctaaaacggcccttcgaccttaggggccgatacagaattagagagtaggaagagccaagcaatttatcaatactataaagtgaaggtatatacacacgcgtagatgtgtatataga

SEQ ID NO: 19802 - DNA, 3612 bp, Zea Mays
ccggaagctctctccccggcggtaggggacggagacggagacggagacggagacggagacggagatggtgccgggcccaccccagttgtcgacggaggcagacatggcattatcttattccggtccaccacgaccttcccgacgggccgcggcggcacacatttgatccccccctcccccacatggcaccgcacctcacccctccaccactccctcctcccgtcctcctcccgtctcgccgtcgcctcctgctcctcctcttccgccgccgacgtcgccgctagctgccgcttttcgccgtccggtcacactagcacagccagcagcagcaaggtttcatcccatggacttcgacccctcccccgcctccgcccacggggacggcagcggcggcgcctggcccttcgactcgctcaccacgtccatgctcttctcctccgtctccgcctccccgcagctgccggccagctcctcgtcctggctcaccccgccctcgccgctctggctcttcgaggaccgccacctgctcccgctcgacgccccctccgccgcgccggaggcagccgtcgcagccgccgagtccacagatcaacatctgttggtccaagtctgggcaccagtcaagaacggagaccgctatgtgcttactacttcaggacagccttttgtgcttgaccaccagagcattggcctacttcagtacagggctgtatccatgatgtacatgttttcagttgatggggaaaatgctggagacctgggcctacctgggcgtgtctacaagcaaaaggtgcctgagtggacaccaaatgtgcagtactatagcagtggtgagtatcaacgacttaaccatgcgatcagttacaatgtccatggtacggttgccctgcctgtttttgatccttctgctcagtcgtgtattgctgtcgtcgaacttataatgacatcaaagaagataaactatgcctgtgaggtcgataaagtctgcaaagcacttgaggcggtaaatcttaaaagcactgaaatactggaccatccaaatgtccagatatgtaatgaaggccgtcaagcggctctggtcgaaatactagagatcttgactgtagtatgtgaagagcacaagcttcctttggcacaaacctgggttccttgcaagtatagaagtgtattggcacatggtggtggtttaaagaagagttgcttaagtttcgatggaagttgcatgggggaagtctgcatgtcaactagtgatgtggcgtttcatgtgattgatgctcatatgtggggatttagagatgcatgcgtggagcatcacctacagaggggacaaggagtttctggaaaggcatttatctcacacaaaccttgcttttcaaaagatatccgcaagttctgtaagttggcatatcctcttgtacactatgctcgcatgtttgggttgtctggctgctttgcaatatgcttgcaaagttcttataccgggaatgacgactacatattagagttctttttgccactcgattgtattgacgaagatgaccaaaatgccttactggagtctatattaactctgatgaagcggtgtcttcgtagcctaaagctagttgatgacaatgatttgagtggggtttctcttcaccttagtaatgtgctaaaacttgagaatgaagaatccaaaacagatgcacagtttgatggttcccttcgcgaatcacctgaggatgatagacatggaggatcccacaagtttgataatgagaaccagaaagttttggatatcacagagggacaattgttgactgatgactactctcaagacaatggtacttctgttggcagaccaaatggtagtggtgcttctgattcttcattgcttcacaaaaccaacaaaccccctgaaagaagacgtgggaaagctgaaaagactatcagtttagaggttcttcagcaatatttttctggaagcttgaaaaacgcagctaaaagccttggcgtttgtcctacaaccatgaaacgcatctgccggcagcatggaatttctcgttggccatctcggaaaattaataaggtcaacaggtctctctcgaaattaaagcaggtgatcgagtctgttcaaggctccgatgcggcatttaatctcacatctatcacaggtcctcttcctatacctgttggcccttcaccagagtctctcaatgtagagaaattaactcaaagtaaagtggcagaactttcgaatcttgctgttggtgttgacagagattctttgcagaagtcgcttgaaaatgatgaccattttgatatagtcatggcccagcaaggatttatagacaataacaatgacgtgcagcttgaagctgacaaagcttctcactcgagaagttcatctggagagggcagcataaattcacgcacttcagaaggctcatgccagggaagtccagcaaaccaaacatttgtttgtaagccaatcgcttcaatgttcgcagaacctcaacttaatcaagaggagttcaacaaagaaccttttcaagaaccacaactaccactttcaaggatgctgattgaagattctggtagctccaaagatttgaagaatctcttcacttcaacatcggaccaaccatttttggcccctcccaacaacttggtgtcaatgaagcattcagggactgtaacgataaaggcgagttttaaggaagatattgtgaggttccgtttcccatgctcaggtggtgttattgtattgaaagaggaggtagcgaagaggctaaggatggatgttggcacgttcgatatcaagtatctcgatgatgaccatgagtgggtaaagttggcgtgcaatgcagacttggaagaatgcatggagatctcgcggctttctggcagccatgtcattaggctactggttagcgatattgcagcacactttggcagttcttgtggaagctctggttgatatgcgtgtcagccttttgctttgatcaatgtagactcgaaagttcagttccacttggtagttttgttgctagttagctttagctgtttcattgtgtttgataaatgtatcattgtattttacccccaaaaaaatacatgtaattgtgcagaacgcacttgtagtcaactttgtatatatcatgtgctggaaattctatttcaagttataaaaactgaatttgttattgtctagaatttgcacagaacagtgttgggttaaaatgattacattgtattggaattgcagcagattttcgtaggtcataattccatgctgtaaacacgtttatacattttatttatatctttgtgatccatgaagttgagacgcatgctggttttaacttattgcggtgatagaattggcaacttcataaagtagtatcacttgcactttactccctccatttctttctattggatgtaatatattaaaaaaaattgaacttcaaagttttgacaaaatggttaaatgtgttaaattagcttcatgcttagtgtctaaaaatcatatcaataaaattcacatatctcacgtcttttaccatggcgttgattttatagaaactgtatatatatatatatattaatgtgttttataaaaaaaagaaa

SEQ ID NO: 19803 - DNA, 1500 bp, Zea Mays
ccaccctctcgcctcgccataaagggcgggggccgctagggttagcgcatcggaatcaatcgtgtttctcgcctccacgccgagaccaatccagccaccgccaactctttgcctcgcctctccgattcgagggaacgatggagtgcgtcaccgatatgcccctcgcgacgctggacagccgaccgcgcaagcggcagcggctcgggtgggacgtcgttcccgccgagatgtatcaggttacgcggccgcggcttggttgggacgtcggccccgccgagatgaatcaggttgtgtttcttctcaagtcaaccaagagcagcctcatgatggttcccctcctctgagagaagatgacaagaatgggcattatgtttttgctgttggagataatctcacatctcgctataagatcaatgcaaaaatgggagaaggtacctttggtcaggtgttggagtgttgggataaggaaacaaaagaaatggtggccataaagatcatcaggggcattaagaagtacagggatgctgcaatgatcgaaattggcatgcttgagaagcttggtaaatatggtgaaagcagatccaggtctcatcccaatccccaaaggaggggtcctattacaagcagttgcccaagtctagtgctatcaaggtgattgatttcggtagcactacttatgatcaacatgatcagagttatgtggtatcgacgaggcactatcgggctccagaagttatattgggacatggatggagttacccatgtgatatctggagtgttggttgtattcttgttgagctttgcacgggtgaggcgttattccagactcacgaaaacttggaacatctggctatgatggagagagttcttggacctttgccgtaccatatgcttaagagggcagatcggcactctgacaaatacatcagaaaaggacgcctgaattggcctgagggttgcacctcgcgggagagcatgaaagctgtgatgaaattgtccaggcttcagaatctggtgatgcaaaatgtggaccaggctgcgggagatttcattggtcttttgcaagggctcctgaagtatgacccagcaagccgtttaacagcacgagaagcactgaggcatcctttcttcaccgaagggtttgggcgaagaagatgatacgtccttgaagcagaccttgtttgtcctctgtctctgaccaaactgtatataaagctgaaatggagctgtttcaatcttgtttgaaacgtcgtgtaactatagttgtatcacaagggaagtcagacggatactttttactaatcctgacttgtttgagttttgcaagccaattcaatgaaagtttgggttgaacagaatgtgttgcttgaaatattaaaactcgcatctatctggttttaaaataaaccagggtccattttttgttcactatctaaaaataggttaggtagtctttactcctttgtttaggagagctttaggaaatttagtagagtaggt

SEQ ID NO: 19804 - DNA, 7683 bp, Zea Mays
cgcctccgcccggcgcctccctctgcctcctctgctccgccctgccgccgcaaggatccaaaccccgtacgtcgccttctccgccgcctttcttcccgaggaattttgctctctttttatggcactgtgcttttgagaaggcctttaattgtgctgtctgggccacggaacggcaatgtcgcagcttggattagctgcaactgcctcgaaggccttgccactactccctaatcgccagagaagtccagctgggactacatttccatcatctgcattgccgaggccctcaaaccgaaggaaaagccatactcgttcacttcgtgatggtggaaatgaggtatcagatgccaaaaagcacagccagtcagttcgtcaaggtcttgctggcattatcgacatcccaagtgacgcagtttcggaagtcgatatttcacatggacctaaggatcctagggggccaacagattcctatcaaatgaatgggattatcaatgaaacacataatggaagacatgcctcagggtccatggttgttgaattttgtgcagcactaggtggcaaaacaccaattcacagtatattagtggccaacaatggaatggcggcaacaaagttcatgaggagtgtccgtacatgggctaatgatacttttggatctgagaaggcaattcatctcatagctatggcaactccggaagacatgaggataaatgcagaacacatcagacttgctgatcaattcgtagaggtgcctggtggaacaaacaataataactatgccaacgttcaactcatagtggagatagcagaaagagtaggtgtttctgctgtttggcctggttggggtcatgcttctgagaatcctgagctgccggatgcattgaccgcaaaaggaatcgtttttcttgggccaccagcaacatcaatgaatgcattgggagataaggttggttcagctctcattgctcaagcagccggggtcccaactcttgcttggagtggatcgcatgttgaagttccattagagtgctgcttagacgcgatacctgaggagatgtatagaaaagcttgtgttactaccacagaggaggcagttgcaagttgtcaagtggttggttatcctgccatgattaaggcatcctggggaggtggtggtaaaggaataagaaaggttcataatgatgatgaggttagagcgctgtttaagcaagtacaaggtgaagtccctggctccccaatatttatcatgaggcttgcatcccagagtcggcatcttgaagttcagttgctttgtgatcaatatggcaatgtagcagcacttcacagtcgtgattgcagtgtacaacggcgacaccagaagattattgaagaaggcccagttactgttgctcctcgtgaaacagttaaagcacttgagcaggcagcaaggaggcttgctaaggctgtgggttatgttggtgcggctactgttgagtatctttacagcatggagactggagaatactattttctggagcttaatccccgactacaggttgagcatccagtcactgagtggatagctgaagtaaatctgcctgcagctcaagttgcagttggaatgggcatacctctttggcagattccagaaatcagacgtttttatggaatggactatggaggagggtatgacatttggaggaaaacagcagctcttgctgcaccatttaattttgatgaagtagattctctatggccaaagggccattgtgtagcagttagaattactagtgaggacccagatgatggtttcaaacctactggcgggaaagtgaaggagataagttttaaaagcaagcctaatgtttgggcctacttctcagtaaagtctggtggaggcattcatgaatttgctgattctcagtttggacatgtttttgcatatggactctctagaccagcagctataacaaacatgtctcttgcattaaaagagattcagattcgtggagaaattcattcaaatgttgattacacagttgacctcttaaacgcttcagacttcagagaaaacaagatccacactggttggctggatacaagaatagctatgcgtgttcaagctgagaggcccccatggtatatctcagtggttggaggtgctttatataaaacagtaaccaccaatgcagccactgtttctgaatatgttagttatctcaccaaaggccagattccaccaaagcatatatcccttgtcaattcaacagttaatttgaatatagaagggagcaaatacacaattgaaactgtcaggactgggcatggtaggtacaagttgcgaatgaatgattcaacagttgaggcgaatgtacaatctttatgtgatggtggcctcttaatgcagttggatggaaacagccatgtgatttatgcagaagaagaagctggcggtacacggcttcagattaatggaaagacatgcttgttgcagaatgaccatgatccatcaaagttattagctgagactccctgcaaacttcttcgctttttggttgctgatggtgctcatgttggtgcggatgtgccatatgcggaagttgaggttatgaagatgtgcatgcctctcttgtcacctgcttctggtgtcattcattgtatgatgtctgagggccaggcgttgcaggctggtgatcttatagcaaggctggatcttgatgacccttctgctgtgaaaagagctgaaccatttgatggaatgtttccactaatggacctccctgttgctgcctctagtcaagtacacaaaagatatgctgcaagtttgaatgctgctcgaatggtccttgcaggatatgagcacaatatcaatgaagtcgttcaagatttggtatgctgcctggacaatcctgagcttccttttctacagtgggatgaactaatgtctgttctagcaacgaggcttccaagaaatctcaagagtgagttagaggataaatacaaggaatacaagttgaatttttaccatgggaaaaacaaggacttcccatccaagttgctaagagacatcgtcgaggaaaatcttgcatatggttcagagaaggaaaaggctacaaatgagcgacttgttgagcctcttatgaacctactgaagtcatatgagggtgggagagaaagccatgcacattttgttgtcaagtctctttttgaggagtatcttaccgtggaagaacttttcagtgatggcattcagtctgacgtgattgaaaccttgcgtcatcagcacagtaaagacctgcagaaggttgtagacatcgtgctgtctcaccagggtgtgaggaacaaagctaagcttgtaacagcacttatggaaaagctggtttatccaaatcctggtgcgtacagggatctgttggttcgcttttcgtccctcaatcataaaagatattataagttggcccttaaagcaagtgaacttcttgaacaaaccaaactaagtgaactctgttccagcattgcaagaagcctttcagatctggggatgcataagggagaaatgactattaaggatagcatggaagatttagtctctgccccattgcctgttgaagatgctcttatttctttgtttgattacagtgatccaactgttcagcagaaagtgattgtgacatacatatcacgattgtaccagcctcatcttgtgaaggatagcatccaaatgaaattcaaagaatctggtgctattgttttttgggaattttctgaagggcatgttgatactagaaatggacaaggggctattcttggtgggaagagatggggtgccatggtcgttctcagatcacttgaatctgcatcaacagccattatggctgcattaaaagattctgtacagtacaacaactctgaggtcaacacaatgcacattgtgttattgaatgctgaaactgaaagtaatataagtgggacaagtgatgaccaagctcaacataggatggaaaagcttaccaagatactgaaggatagtagtgttgcaagtgatctccaagctgctggtttgaaggttataagttgcattgttcaaagagatgcaggtcgcatgccaatgcgccacacattcctctggtttgatgaaaagaactgttatgaagaagagcatattctccggcatgtggagcctcccctctctgcacttcttgaattgggtaagttgaaagtgaaaggatacaacgaaatgaagtatactccatcacgtgatcgtcaatggcatatctacacactaagaaatactgaaaaccccaaaatgttgcatagggtatttttccgaactattgtcaggcaacccaatgcaggcaacaagtttacgtcggcacaggtcagcgacactggattaggatgtcctgaagaatctctgtcatttacatcgaatagcatcttaagatcactgatgactgctatagaagaattagagcttcatgcgattaggacaggtcattctcacatgtttttgtgcatactgaaagaacaaaagcttcttgatctcgtcccattttcagggagtacaattgttgacgttggccaagatgaagctactgcttgttcacttttaagatcaatggctttgaagatacatgaacttgttggtgcaaggatgcatcatctttctgtatgccagtgggaggtgaaactcaagttggactgtgatggacctgcaagtggtacctggagagtcgtaactacaaatgtcactagtcacacctgcaccattgatatctaccgagaagtggaagatacagaatcgcagaagttactataccattcagctacttcgtcagctggtccaatgcatggtgttgcactgaataatccttatcaacctttgagtgtgattgatctaaagcgctgctctgctaggaacaacagaacaacatattgctacgattttccgctggcatttgaaactgcactgcagaagtcatggcaatccaactgttctagtgttcctgaaggcagtgaaaatagtaaatcctacgtgaaatcaactgagctggtgtttgctgaaaaacatgggtcctggggcactcctataattcccatggaacgtcctgctgggctcaatgacattggtatggtcgcttggatcttggaaatgtcaacacctgaatttcccaatggcaggcagattattgttgtagcaaatgatattactttcagagctggatcattcggcccaagggaagatgcattttttgaagctgtcaccaacctggcttgcgaaaggaagcttccccttatatacttggcagcaaactctggtgctaggattggcatagctgatgaagtgaaatcttgcttccgtgttgggtggtctgatgaacgcagccctgaacgagggtttcagtacatctatctgactgaagaagactatgctcgtattagctcttctgttatagcacataagctgcagctagataatggtgaaattaggtggattattgactctgttgtgggcaaggaggatgggcttggtgttgagaacatacatggaagtgctgctattgccagtgcttattctagggcatatgaggagacatttacacttacatttgtgactgggcggactgtaggaataggagcctatcttgctcgacttggtatacggtgcatacagcgccttgaccagcctattattttaacagggttttctgccctgaacaagctccttgggcgagaagtgtacagctcccacatgcagctgggtggtcctaagatcatggcgaccaatggtgttgtccacttgaccgtttcagatgatcttgaaggtgtttccaatatattgaggtggctcagctatgttcctgcaaacattggtggacctcttcctattaccaaacctttggaccctccagatagacctgtcgcatacatccctgagaacacatgcgatccgcgtgcagccatccgtggtgtagatgacagccaagggaaatggttgggtggtatgtttgacaaagacagctttgtggagacatttgaaggatgggcaaaaacagtggttactggcagagcaaagcttggaggaattcctgtgggtgttatagctgtggagacacagaccatgatgcagctcatccctgctgatccaggtcaacttgattcccatgagcgatctgttcctcgggctggacaagtgtggttcccagattctgcaaccaagacagctcaggcattattagacttcaaccgtgaaggattgcctctgttcatcctggctaactggagaggcttttctgggggacagagagatctctttgaaggtattcttcaggctgggtcagcaattgttgagaaccttaggacatataatcagcctgcgtttgtctacattcctatggctggagagcttcgtggaggagcttgggttgtgatcgatagcaaaataaatccagaccgcattgagtgttatgctgagaggactgccaaaggtaatgtgctcgaacctcaagggttaattgaaattaagttcaggtcagaggaactccaagactgtatgggcaggcttgacccagagttgataaatctgaaagcaaaacttcaagatgcaaagcatggaaatggaagtctaccagacatagaatcgcttcagaagagtatagaagcgcgtacaaaacagttgttacctttatatacccagattgcagtacgctttgctgaattgcatgatacttccctgagaatggcagctaaaggcgtgattaagaaagttgtagactgggaagaatcacgctctttcttctataaaaggctacggaggaggatctctgaagatcttcttgcaaaagaaataagacgaataattggtgacaacttcacgcaccaatcggcgatggagcttatcaatgaatggtacctggcttctcaggccacaacaggaagcactgctggatgggatgatgatgatgcttttgttgcctggaaggacagtcctgaaaactacaagggatatatccaagagctaagggctcaaaaagtatctcagtcgctctctgatcttgctgactccagttcagatctacaagcattctcgcagggtctttctacactattagataagatggatccttctcagagagtgaagtttgttcaggaagtcaagaaggttcttggatgatgatatgataccaacacatccaacacaatatgcgcatgctacatgttatttttcaagtacatacatagaaggatattgcttggccttgattgatcatgtctgatctaagtcgatcattattttcttgaaacttcctttcggacgtggtgctatggttgatgaatttggatgtgtgcgttctgccaggtgtaagcccaaaggtttatacagaccgagttaaggttaggaagagcacgagtgaacttgttctggttttgcagtggttaaggcagaaagttgtttcactgtagttctgagatgtattaccagcggcgctgtaattttagggtgtataatgcggatgctagtaaacaattgagtggttcattaaattttgaactcgaataatatgtttctgtaggcacatgtgacgtaccactacatgaaataaatgtcgctgaactagggcaccagagttttggtaggactaaggttttgtttggttatgggataaggtgagcatctccagcgttcccaaacttgaatttccc

SEQ ID NO: 19805 - DNA, 3673 bp, Zea Mays
  misc_feature (1)..(2): n is a, c, g, or t
nnaagcttgtcaaatgctcgattgaaggcgcatgcatgaaaggcctctctagtaggacatctgcattgaacacagcatctgaatgtttacatatcctcaggttctggagcagggattatggaagaggcatttcattagctgaaagttcacattcactaacagtgctcgtctcgattgtatcattcttgcaagctgaactgaacatctctgataaaccagcaaatgccactggcatttcttcccgcaattctggatctgcgaatagtaaaaattccaatatttgggatatgaagatatcagcattttcgatgctcgaagatatattgagtaaggttgcatcaaatatgacagaaaatctgtggcagtctgtcatcgaggtcttgaggaaagttatggattttgtcacagcaaggaaccttgttatagagagtagcatcatgtcaagattttatacatcttttcttcgttgtctacatttggttcttgtggatcccaaaggaccactttcagggcatgttgcagggtttgtagcaaatctgcagatatttttcgtatatgggctgaggtcatcttcacctcctacactagctccaaaagaaactagaacagattcaaaacccagagcttcacgtggacgatatagaccacctcatttgaggaacaaggagagaagagagaatgattcactggaaggtcaaaattcagatagtgagtattcttggtatgatatgagctcatcagactcagacctgagtgatagtgatggttatgcaaaaagtggagaccgcttccggagttcgaaggctagattagctgccattctttgtatacaggatatctgccatgctgatccaaagttacttacttcacaatggccagtacttttgcctgagaatgatgttctccaacaaaggaaatatcaagcaactctgatgacatgcttgctttttgatcctataacgaaggtacgtgttgaggcagcatcaaccattgctaccatgctggaacggcaagcattagttttgacacaagttgcagagtacaaggagtcgtctaagcgtggatcattcactacattatcttcctcacttggtcaaatattgatgcaactgcatacaggagcactgtacttgatacagcgtgaaactcaagctactttgcttgcggcattattcagagttctcattcttttgatatctgctacaccgtacgctcggatgccaaaggaattgttgccaacagtcattaaagtattgtgcagtagattactgaacaaacactcgaataagactgaacattatgccgtgctggttactgttctaagttgcttggagacagctttttcaaaagtgccacctactttggatgtctttgcggttctcactgaggattgctgtgctggaccatcacatgagcaggaagaatcaaatgttatagcttttcttcttcattgtatagaggaggaaatgcattacagtgttagacatggagccttccaggtgctgagatcagcggttcacaactacccaagctgtgcaaacatgatttgggaaaaacttcgagacaatgttcttaacttgttgcaaatacaaagttttgaagaccaaaagtatgatgctaactttgggcctcctggagctaaagaagaatcatcaatcaagggaagatgtcttgtagctggaataaaggtaatggatgaatgtctgcgtgtttcatctggattcacaggagcagatgacatcaaagaatgcagattactggatattcagcaaatttctgattgtaccataaataaaactattaagtctgcacctcactttgaaatggaagctgctggatcatcacagaattgcactttggacataacacttggaattaaccgttggatcgaggtgatagagactcatctccctcagggattatcccatggttctgctatggtcaggacagcatccctcacatgctttgctggcatgacttctgatgtattcttctccctgcctgaaaataagagagactatgtgacctcttcttctgttcatgcggcgttaaatgatatggttcctagtgtaagatcagctgcatgtcgagctattggcattgttgcatgttttcctcagatattgtcaagctctagcctaccaggcaagttcatagatgccattgagttcaatacacataactcatcaactccagttcgtgtcaccgctgcatgggctttggcaaatctctgttcttgtattcgttttagagcactggaagtgcatacagatccctatgcaggtgtaggtgtattgagcaaatcaagcatatctcttttggttgaagttgctttgcgtctggccaaagatagtgaaaaagtaaaatcaaacgctgttagagctcttggttatctttcaagatttatcagattcaattaccacgccggcacaataaatgacccaagtaacagtgattcagttttttatggagatcctgtgtggcttgaaagaatggtgcaggctttgatgtcttgtgtgacaactgggaatgtaaaggtccaatggaatgtttgccatgcccttagcaacttgttcatgaatgataccttgagacttcaagacatgccttgggcatcaagtgtttatagcatacttctacttctaatccgggactcaaacaattataagataaagatgcatgcagctgttgctctatcagtgccagtgtcaaggcttgattacggcagctcgtttccagatgttgttcgaggcctcgtccatgctctcgagtcattgaactcaaacaattcatcgttaccttcaaatttcaaacagagagacaacctcgagaagcagcttacgtttactgctctccatttgcttagttttgtgtcaccaaacgacgatccaagcctgaaagattttcttaccaagaaatcgtcgttcctagaagactggctgagatcactatgcgcatcgttcaacagctcggagcgccagcccttgccaacggaggccacaaacgacgaggacggcttcagcccaaacgtgactcagaaaggcatgctgtcttccgccctgcagtccttgctcggcgtgtacgcgggcaggacccagcaggtcatcacccagagatttgagcaactggctagaagcgtcgcttgaatggtgagcagcgacgagcagtcaggtgtggtctccactccagcctccattaacaagcagcgatatattggtcgtcgtctacccctcaggacggacagcgcgtcaggcagtggatccttaaattctgccgaatcccatgagctccaggcggcacttgtctcggatcttggctgtcatcatgcacaggctctgcaagcctggcttggtcggtgttttcgtcgttgtttacttgaaacatcgttactgatggcgctgttatgtagatgggccttttccctggtcctggggcttcctgcttgcttgataaaaggttggtatcacccgaccacggtccacgtggacgatattacaagatgttcattgttcttggcaagaggggtcatgaatgccgtccaaatctgttggagtccgtcgctagtgccactgctgttattgagcccatgtgtgtgtgtgcgcgcgtgtgttttgttcatgtaccaaccttcataaattgcttgacgctctgcactgttcgacgatcacttcca

SEQ ID NO: 19806 - DNA, 1921 bp, Zea Mays
attacaatgagttgccactagatatacgcgaagcctctcccacctcatctgcctcgcgtgcggcggcggcgactccacctggcttgcgtcctcccgttttccagccagcaagccagactcctcccctctccgaagactccgatcgtccggattcatccagatccgggcgttctgagtcctgccgaggctctagatcgcgtcgcgcacgatgccacgcgacctgtcgcggtcgcggtctccgccgcgccgacgttggcggtcgccgtctcccgcgcggtaccgcggccggagggggcgcagggaccgaagccccagtcccatccgtagcaggtccccctatcgctcctcgtatagactaacaagagttgctttcgtaaaacgcatggaatctacaaagcttttactctgtgctgtattgctgtggaatgctccacccctgtaacagtgtctaaggtaactgcttttgcccatgttttagggcttcaggagctaatggtaattccttgtctattgttgtgatgactcattgactctaattttattcttacggtgctcatctttgtcttgcagaaggaggagccctttgccttccccaagaaggcacaagagccgttctccgtctcctaggaggcgcaagagtccgtctccatcacaaaagcgttacagaagaaagagaagtccgagtgtcactagctctccagtcgctgcatctcagagttcccaccttgggttggcagagaataagaatgttattgatacacaaaggctagaagaagaaaagaaaaggctttaccgaagggagctactgctatagttccacttgttatatttgatgatgcaattggtgatcatttatctactcttgatcagttttgataattcgtttttggatctggaacgaactagaggtatgcctgaaatgcattagcttgtagtcaactatgctggaaaggcatagtagatcatagatactgtttagattttaaaccatgtgctttgctttttgctgcttttatggtcttgaagagtttgaacaaacaaatatcggctttggtcacgacttgccttaggtagtgcatttcgttaacttgctatatcaactgcaggcgccaaaaggaagttgaactgagactattagagaaggagacggcaaaaagagttgaacaagctattaggaggaaggttgaggagagtctaaattgtgatgaaatcaaacatgaaatacatcgtcgaattgaggaaggacgaaagaggatacatgaggaggtagcaatccagattgagaaggaaaaggatgcagctttaaatgaagccaagctgaaagtggaacaagaaaaaaagaagcgggaggagctagagaaaaaacttgaagaagaacgaaagaaagctgaagaggcgttgatgaaagaagcgttggaacagcagcagaaagagctagagcggtaccaggagttggagaggcttcagaaagaaagagaggaggccatgaaacggaaaaaaatggaggaagagcagcagaggcaaaaccagatgaagctgctgggcaagaacaagtcgcggcctaagctgtcgtttgcttttgggatgaagtagcgttcgattcaccgaacgaaattagtgctttagtatactgtaaccgtgtagtgtagtacctctgtatgaaactgcccatttctaactctggcagacaaattgcgatgtcataaatgctcctgatctgcttcgtaagttgccggctcttggtggatgtggtttcatctgcttcttgctgttcagttggcgttgccttgcgagaagactgccagagaagaatccggttggtttgatcttgcatgtcaccaagatactatctccgtttgtgttgccccctagttcagcctgttcatatttgaactaaaacgtgataaataaaaaaaacgga

SEQ ID NO: 19807 - DNA, 1193 bp, Zea Mays
ccgctgcaatggaccctagaggcctaatgtaaagcagtccacagaccaggcccacaggccgcacccgacggcccatccggcctttcccactcgtcactcttgatcggcccagcagcgagcggaactgcgaaacgcaggatcgcgactccgggaaaaaaaaaacgccgggcgcaatcgggaacggggaaccctagggcagccggcagcgtcgctccgccccggccgtcgtcgtcgcgcgtcgccgtccactcgcttcctgctcgggccttcgcccctcggccacgtctctgccctcgccccttggtcgggaccgacgtcctcgctccatctagcaagctgatcagctcgactgcttgagctcgtcctcgccatcgccgctttgatttcttcctttcagcccgacccggctcaaagcagccagatcacggcactccgtccgaccctcgaagcgatcaccttcaccgcctctcctcctcgtcacaggtgaagatgattccgcagagccagagcagctccctgcagcgccttcaacacgtcgagaagcggatagtgcgggtgctggagcttgcgggagcggtgatggaggagctgggaaactcccatggccctcgcaccgatgcagtcagcgcgcactgccgtgagttcatgatcgctatgaaggaaattcaaacgacgttgcgtgaggaaatcaaaagtgcttgtgaatatcgtccatttgaaaagtgtgattacagtgcaaggattgctaatgagatatgctgcaagaagctggagtatgtaattgagaagttggataccatgcaacagagccttgaacatatcactgatgatgtttagcgagctagcaacatattagctttgggggtaatagatgatcgaggagtacactgaagaaatgtagaagcattctatcaacttataattgcataaagcttttgctcaactgtaggactgtaacttgtggtttgtttgtcttccatattctgtgacagttcttactttagctgcctgctgatgctgaacaacaatattcttggcctgactcggataggagtaacatccttgagcttaaaatcatggaattttaaggcgttgtattttactgatgagaaattgctctcatgtattgcatggacatgcgtcaattcttagaacatgcgttttggtgggaaacggcctccaccacgctgtcc

SEQ ID NO: 19808 - DNA, 1792 bp, Zea Mays
aaaaaaaaaaaaggctccggttccactgcttctatccctcctttactcgcaggccaatttggtgtcgaagctactcaagcagatggcgaaagcctggaaggccgagagcgggtatcggtagtccatggtgaacatgtccttggccaccttaccgaactggaggatgaccttgtcctggtcctgcggagccggctcagcgggggcctgagcctgcaggcttggcgccgccgcgatcagctggaagttcttcaccgaggcgatggtcacgcggccgcggaagttgaggcaccagcactgcagctgctcgtgccatctcggggccttgttgcggagcacgagcggcctctccctatcctgccccccatctccaccgcctccgtcgacaatgtcggagaaccgggcgctgctgaagtcgcggaagctgctgctgctgccgccgccgaagtccacggaccggtccatgatggatgctgacgacttggagaaggaggtggtgccggtgccggtgccggtgcggcggaacgacgaatcctcctcctcctcctcctgctcctcctccagcagcgcccggggcaggatccgctcgggctgtccggggaccgtgccgcccggctccaccgcggacgccggtatggagcgcatgacgcagtgcatccgcctggggcctctcgtgcccagcacgttcagctcgtacgtcacctgggctatgctgtagctgccaccaccggcaccgcccggggccggcaccttcggggagaccttcctggagtcgaatcgccggcttgcccgccgcccagcagcacgagggggagggggtgcagccccgctgtatctcagctttccgatgtacgtgctgctagatctcgatatgttgtcggcgtccatcgagatgatatactgcgtgcaggttgttctgcggctccttttagctgataagaggaacttgccgttctccatgagcacagctgataagagggagagcagagtcaacaattgtaggaattcagtaaaatatctactcatacaagcaaaagaaatacacagcataccagtactcaggcacaagtagagacgatacgtggacttggatttatcgcgctttatgaaacactgaatcatcccgtctcgaggcccaggctgtgaaggcaaacaatactgtcaaatgttagtaatactacccaaaaaaaacattcaggtaattaggccaaaggactaagttttacctgcttgagagagaccgggaaggtaagcttcccgcagacctccgggctgagcacgatctcccggcacatctccctccacgcgcggcagacggcggcgcaggacacgacgtgcttgcggttcggccaggcgctctcgctggcctccagcctccggaccacgtcgcggaggagctcgggagggaggctggcccagcggctctcgtcctgctggaccacgacacgcgtgtcccggagctcgtgcaccgtgctctgagacctccccctgcgatgttgcgcggcggtgcgtccggagaggccgccggcggcggctgcagcagtcacctcgaagttgcgcctcgacaggctgccgatgctgtctcggacgtcgcggacgatgctgcggaacgacatctttcttcgccaactagctagaacaggcgcaggaaacttggggcttcagcctgccaagtagtacgtatgtaacagtggaggtcctccgacagcctccgtggttgctccactgatagagagaaatttgccattatggaggtccttaggtgcggcttcgacgatttggaggcgtaggcgag

SEQ ID NO: 19809 - DNA, 1036 bp, Zea Mays
gacgaccacaaaatcgtagtagtcacagaagttggaagaacaacaactgtgtataatacaagtgatcaatggaaccatgtttagcttaaaaaaagaccgcagacccgcagactgtcagccgttaaaaaaaagaaaaaggaaaaaataaaaaccagacagccagccccgagccccaaacggccaaacctccttggacacgactcgccgcacccatccccatccgccgccgctgccatggccgacgagattgacacgaggccggcctccgcgggctcccgcggccgtcctgcgcacgctaccgaggacgacgaccgggaggagggcgagatcgccgccgacgccccctcgcccgccctccccgccgcgcacccgctcgagcactcgtggaccttctggttcgacaacccgcacggcaagaacaagatggccgcctgggggagctccatccgacccatccacaccttctccaccgtagaggacttctggggcctctacaataatatccatcaccctagcaagttgatcggtggagctgacttccattgcttcaagaacaagattgagccaaaatgggaagaccctatttgtgctaatggcggtaaatggaccatcagctgtggaagaggaaaatctgacacgctgtggctgcacaccctgttggctatgatcggcgaacaattcgactatggtgatgaaatttgtggagcagtagtcagcgtgcgtagcaagcaggaaagaatagctatctggacaaaaaatgctgctaatgaagctgctcaggacgatgcaaagaagatggacaagggactgaagaaccgttacacggtttgatcccagagagtagtagcatgtagggtggttctttccgattccgtagcaccttgcagagtgtgttgaaggttctctatttgctgaggagttgcttaagcataatctaacatgatgtcgaatgtattcctgtatgttccataggtcagtcacctaggtgcctaggtgttgtttttgtctcagctttgtgtgtgtgtgtgtgtgtgta

SEQ ID NO: 19810 - DNA, 1092 bp, Zea Mays
aaaacgtggcgggcttcaccgggcccgggccgggctgccggtttggccatctctacccacatctgctgcagactcgaggcgatcgaagcgtcattggcggcggctgcggcaatggcggggctgtcgctactgtgcggtgactgcggcgcgcagctgcgtagtgtggaggaggcgcaggcgcacgccgaggccaccaaccacgccaacttcgtcgagtccaccgaggccgtcctcaacttcgtctgctccgactgcggcaagccatgccgctcccagaccgaggtggacctgcacaccaagcgcacgggccatacggagttcgcggacaagaccgcggaggcagccaaacccatcgatctcgaggcgccgcttaagccggcctccgaggatgtcatggacgtagacacgtcggcttcggcgagtggggagccacaagagatggttgtcccggaggtgaacaaggagatgctcacggaccttgagggcatgggtttctcgacagcgcgcgccaccagggtgcttcacttctccggtaatagcaccattgaaggtgctattaactggctttctgagcaccaagaggacatagatattgatgagatgcctctggtaccagccaactcaaaaacggaggataacaagcccagcctgactcctgaggaaatgaagattaaagcacaggagctaagggatcgtgctcgtaaaaagaaagaggaagaagagagaagaatggaaagagaaagggagaaggaaagaatacgaattggaaaagaacttctggaagccaaaagaattgaggagcaaaatgaaaggaaacgcatgatagaactgcgaaaacttgagaaagaggaggagaaaagagctagagaaaaaatccgccagaagttagaagaagataaggctgaaaggagaaggaaactaggactgccaccagaagacccagcagctgccaaaccaagtgcaccgcttcctgttgaagagaagaagagtgcattgcctgtccggccagctacaaaggctgagaggatgagggattgcctaagaaatcttaagcaacagaacaagggtagtattcaatggactggttttggc

SEQ ID NO: 19811 - DNA, 3511 bp, Zea Mays
tcggtcgccgtgcccgcgcccaaaccggttaggaaggaaataaaatggaagacgtcctcgtctccatcgccggttgtgtctcctcctatccatttctccagtcgtttctctcccctcgcgctgcccatggccatcccggaggacctagaggggacctcgggcgatggcggggtgacgaatcgcgggagtagagggcggcgaaaaggcgcggcgaaggggcgcgggaggggcaggccgcggagcgccgacagatcctttccgccgccggcgatggctggggtggcggtcggggacagggtgctcagggagaggaggcacacgaccaacgttttctgcgagcgcgacacggatgttgacgatgaggatgatgttgagacagttaggtccaaggactcaaggagtggcgatgttttacagactgcaaaaaagaggaagaagggaggtgcagggaaggtttctgtcacaaaaaggtcgaaaagagagggtgaagaacaaaagaaggcatcaccctccaaggataaagattgtgctgaaactaatgggaaaaggaagatgttgactggggataatgccctgatgtgccaccagtgccagaggaatgataaagggagggtggtctggtgtaattcatgcagaaataagcgcttctgtgtgccatgcattgaaagatggtatcctaacttgtcagaagacgaatttgctgcaaaatgcccatattgtcgcaagaactgtaattgcaaaggatgccttagaatgagaggggttgaagagcagcctccaaagaaggaaatttctgaagaaaatcaaatctcttatgcttgcaatgttgtgcgcttgttgcttccctggttgagaaaactgcgacaggagcagatggaggagaagaaattggaggctaaaataaaaggtgttttggtgaatgagatgaagttggaacaagctgaatataatctagatgagcgtgtctactgcaataattgcaaaacttctatagttgattttcacagaagctgcaagtactgcttttatgatctgtgccttgactgctgtgtggagatccgcagaggtgagattcctggaggagaagagataatgagagtaaagcctgaagatagaggccgagcatatctttttggtactactaactcaaaggatgggagtaaaaggttctccatgaggaggcacagctcatccctggagaatgagccttccaatgtagtaggttctagtgagggggcaaataactctctggagctgtggaaagcagaaagtgatggtagcataccttgcccaccaaaggagctaggaggctgtggcggttcgattttggatctcaagtgtttttttccagaaaagatgctttcaaatttagaagaacgagctgacagaattatgaggagcgaagtatttgcaaaagcagtagccaaaagaagtgaccagtgcccttgttatgaccattcaggaaacataagaactcaggacgtgcgagagactgcaaatacgaaaggctcaagtgataaccatctctactgcccagttgccactgctatcaaggaggatgacttggcgcactttcagatgcactggacaaaaggcgaaccagttattgtttctgatgttctgcatttgacttctggtctaagttgggaaccattagttatgtggcgggcattgcgagagaaaaagactaatggtgacgtagaagatgagcactttgctgtcagggcattagattgccttgattggtgtgaggtggaaattaacatacacatgttttttgtgggatatatgaaaggcagaacgcatcacatgacacactggcctgagatgcttaagctaaaggactggccgccatctagttcttttgatcagagattgcctcgccatggtgctgagtttatcagtgcattgccatttcctgagtacactgatcctcgatatggtccgctgaatcttacagtcaagctacctgatggtgcattgaagccagatcttggaccaaaaacttacatcgcttatggattttaccaagagttaggcaggggtgattctgtgaccaagcttcactgtgacatgtctgatgcggtaaatatattgacacacacagcacaagtgccctatgcgcgttatcaacttgagaagatagaggaaaccagaaagaaaatgaaagaacaagatcttcaggaactttatggtgtttcagaactaaacctatcatcaccttttactgattccaggaatataagtgctgatgaaatgtcaaagacctcatgtaactatggtttggacgtcaatgatgtaccacctgttaataatgaatctgaggtacaaagtggggcaggccagtgttcagattacattgacaaggatagaagttatgctgggatgcataacggggagagaaccggtggtgccttatgggatattttccgaagagaagattctgacaagatacaagattatcttaggaaacatgccacggaattccggcacatcttttgcaatcctgtgaagcaggttattcacccaattcacgatcagactttctacttaaccgaggagcataagagaaagctcaaggaagaatatggtgttgaaccctggacgtttgagcagaagcttggtgaagcggttttcattcctgctggatgtcctcaccaagtgaggaacttgaagtcttgcattaaggttgcgatggactttgtctccccagaaagcgtcaacgagtgcatgaaactgactggagagtttaggcggcttccacctgatcacagggctaaagaggataagctggagatcaagaagattgctcttcatgctctgaaccaagtagtaaatttcttggatccttcctcggagtggtcgaagagttggtttgcccaactcaagaacaaaaaaaaggctggagctgaagaacaggagaagcctaaaaggaagcgtggccgcccatgtcgcaagtccaacgatgaagctgctggcgataggcacagaaagaagggcggccgccaaagaggtcggaagaggggatacggcaagtccaaagatggcgctggcgctgttgatgtgaagcctcctaaaaggcagcgcaatctcctgaaaggctctggcaatcgtgtaggtggttgattgtttcactgctgactgggaagatggaaggcgtaagggctgtaccgacccaaccttgacgtggttattttggtaccaggttgtaagtgtagactctagattgtagaatagaccaggcatttcgtcacccctgggcgccattatggcgtcttgcttttgttcatatgtggcgattgccggttgacaccgttttggaagaataatatgctagatgctcgttgtaccagactcttcatgtagcgggctatggtgaattgctgttcagcatgtctgatgctgatgttggtaattgacctgaatagatgtggtcatttgaactctctggattctgattttacatatccaatccattggctgaggctgagcattcttagttgaaaaacga

SEQ ID NO: 19812 - DNA, 1246 bp, Zea Mays
tcacgtgcttgatgagcaatcaaggctggaggtccagacaccatatttgtatagtttcagtcagcatgcactgcctgtaactgatattgcttgttttcttggagcaatcgctatatcttcttctgaggatcgaacctgcaaaatttggagtttatctgagggtaggatgctgagaagcatttcatttcctactagcattgattctatagcactagacccaagaagtcatattttctatgctggtggtagagatggaaaaatatatgttactgctatgggtgttgatctcagttttcatggtagggatgagtcatctattctgggtgcattggatgaccacagcaaggcagtaacaagcttagcatcaagcagagatggacttctacttgtctctggatctgaggatggtaatgttcgggtgtgggataccagatgtcagcaagttacccgaaaattcaaacactcccaaggtccagtaaccaatgttcttattgtaacgccacaacgagtaaatctgccaccgctacaaccattacgcaaagttcggtctgcaaatggggaggctgaacggcaggcagtacttcttcatcggcctgaaaatgatgtcccaattcctggaaataagaccttcatttttatggagcgctacttggatgagcttcaggttatttgattttgggccgaatgctcagaatggcactccaaaccaacagggaacagaatggagagatagatacttggagttgcaggatctctttgtacatgaggtcctccatcagatgccatcctcgaggaacccatgatgcacatgctttggatatcgatcatttgtggtgtcgaaacagtgatggttgccattcgggctacaaacgatgtagatgagttctttggagtaattcaactgatggtgctttcggctgcgaggaacttatcagattctgaactaaaaccactagaatcggtgccagcagtcacttggaactggttctcgtttgtgtactagtctagagaaacgctaaaaatcaggtttctcttgattctagttctaattttaaggatacagtgagcttgctacataaagttattttgatttcatagagaaaatgttttgttctcaggggaatctgaattttgaaagttttctactagaatctaagatttgatacgttcagggttaaccataccaattaaggactaaaaagtgctagttagcggtatcggattttcgctggaaaaccgctgtttt

SEQ ID NO: 19813 - DNA, 3492 bp, Zea Mays
gatgggctgttgccaatggagctggagttatattaagtgtctgtgatgaggaggtagctcgttatgagacagcaaatttaacagcagcagctgttcctgcgcttctgctacctccaccaacaacacccttggacgagcatttggtggctggcctgccccctcttgaaccatatgctcggttgttccatagatactatgcaattgctacaccaagtgctacacagaggttgctttttggtcttctggaagcaccaccatcatgggctccagatgcacttgatgcagcagtacaactagttgagctacttagagcagccgaagattatgcttctggcatgcggcttccaaaaaattggatgcatctgcatttcttgcgtgcgattggaactgcaatgtcaatgagagctggcattgctgctgatacagctgctgctttgcttttccgaatactttcccaaccaacgctgctttttccaccactgagacatgccgaaggagttgaagtacatcatgaaccactaggtggctatgtatcatcatataagaagcagttggaagttcctgcatctgaggccactatcgatgccactgcacaaggcattgcttctttgttgtgtgctcatggccctgatgttgagtggagaatatgtaccatctgggaagctgcctatggtttgctaccgctaagttcatcagcagttgatttgcctgaaattgttgtagctgccccgcttcagccacctacactgtcatggagcctgtacttaccattattaaaagtatttgagtatctacctcgtggcagtccatctgaagcatgccttatgaggatatttgtggcaacggttgaagctatacttaggagaacttttccttctgaaacatcagagcaatccagaaagccaagaagtcaatctaagaaccttgctgttgctgaacttcacacaatgatacattcactctttgttgaatcctgtgcctcaatggaccttgcctcccggttgctatttgtggtgttaactgtttgtgtcagtcatcaagctttgccagggggtagcaaaagaccaactggtagtgataaccattcccacgaggaagccactgagcattcaagattaacaaatggaagaagcagatgtaagaagagacaaggccctgttgctacgtttgattcatatgttctagctgcagtttgtgccttatcttgtgagctccagctgttccctttcattactaagaatggatcacattcaaatttaaaggattccatgaagattatcatatctggaaaaaacaatgggatgaataatgagctacacaacagcatcagctcagcaattcttcatactcgcagaattcttggcatcttggaagccgttttctccctgaagccatcatcagttggtacctcatggagctatagctcaaatgaaatagttgcagcagctatggttgctgctcatgtttctgagttatttcgtcggtccaggccatgccttaatgcactctctgcactaatgagatgcaagtgggatgctgagatttcgaccagggcatcatctctctaccatttgattgacttgcatggtaaaacagtttcctccattgtgaacaaagctgagcctcttgaagctcacctgacccttacaccagtaaagagggataatcaacatcaccgtgaggaaagcaataccagctcattggatagtgtcaagttggaaaacaagaatggttcaacatcacacaagaaaaacggtttctcaagaccactcttgaaatgtgcagaagaggtcctactgaatggcgatgttgcaagtacatctgggaaatccattgcaagcttacaggtggaagcatctgatttggcaaacttccttaccatggatcggaatgggggttaccgaggttcacaaactcttctaagatctgtattatcagagaaacaagagctgtgcttctctgttgtctcattgctctggcagaagctcatagcttctcctgaaatgcagatgtctgcagaaagtacatcagctcaccaaggatggaggaaggttgttgatgcactttgtgatgtcgtttcagcctcaccaaccaaggcatcagctgctatcgttctccaggtcaagatattgctatattgcacgtttggtcaaaactaaatttggtttaaagtttgttcgatttatttcaaaacaaattcaattttctttttctgattaatctatttcaaaacgaacattctctgtttttttttggtttctgacatctatttcaaaacacattttaactacaatgcctaggtggaatatggacctgtttcctagtcatatttcttgacgcttattttttttttcgcaggccgagaaggacttgcagccttggattgctagagatgacgaacaaggtcagaagatgtggagagtcaaccagcgtatagtgaagcttatagctgagcttatgaggaaccatgacagccctgaagcgttggtgatactcgctagtgcctccgaccttctacttcgtgctaccgatggaatgctcgtcgatggtgaagcttgtactttgccacagcttgagcttctggaagtgaccgctcgggctgtccatcttatcatcgaatggggagattcaggtttatcagttgcagatggtctttcaaatctgctgaaggttaactgaatattgtgatctgcagtgccgtctatcaaccaccatccgctgcctttctcacccaagtgcacacgtgcgcgcactcagcatgtctgtcctccgcgacatcctgagcaacggatccgtgaaccccaacaagacaatccaaggggaacagcagcggaacggcatccagagcccgtcctaccggtgcctggccgcaggcatcatcaactggcaagcggacgtcgagaggtgcatagagtgggaagcccacagccgccgcgccactgggctgacgctcgccttcctcagtgccgcagcgaaggagctcggctgccctctcccgtcatgacaaggccattcctggatctgacatcggcttccaattgacggtcagtgctggcacagctgctgcagggtccgcgagtaggacggctctaatctctccatcacgtgttattatctggtgtttccataatgcgatttgatttcaatttggcgttagatgttgtacacgtgtatttaactgcttgagttgtacgtaatttgtatacttgtaactttgtttaataatatggctattactcaagaagcggaacatatcttatcctttttatatgctgctgctagatccgttcaacgtgagtgccatgcaaatgtccacgaaatgtttagtatttgttagggggaaaaggtctcggtggaaggtaaaataatttctaactgttattcaggataaatgatttaacgtggtttgaattattacaaccttcgtcccttaaccttcatcagactattttgtcagatggcatcgctttgtctaatcagcggagaaccaag

SEQ ID NO: 19814 - DNA, 149 bp, Zea Mays
gagccttacaacgaggagtacgagcttatctaggtggcgtctcccagtcagcttgatggcgccaaggaataatatttagttcgttttattgttcttattcatttttgtaagacttccgctatgtaataatgatatttgtgacatttatc

SEQ ID NO: 19815 - DNA, 1502 bp, Zea Mays
tcggaccaggctaaccaacccactgtccttcataagctcggaggccagttccacctgcgctcgatcatctctgaaggtgtacgggcccgtaacatatgcccatctgtctcatcttatgaaaggagatttgccacaaggaactacatgacccagagcctttggggcccttcaatgtctgttagcggtggcatcaatgtcccagtgatgcagaccccgctctgtgctaatgctcctgctgagaaaggaggcaagaacttcatgattgatttcatgatgggcggtgtttcagctgctgtttcaaagactgctgctgctcccatcgagcgtgtgaagctgcttattcagaaccaagatgagatgattaagtctggtaggctatcagagccgtacaagggtattgttgactgcttcaaacgtaccattaaggatgaaggtttctcttccttgtggaggggtaacactgctaatgttattcgttacttccctactcaggctttgaactttgcatttaaggactacttcaagaggttgttcaacttcaagaaggatagggatggctattggaagtggtttgctggcaacctggcctctggtggtgctgctggtgcttcctctttgttttttgtgtactccctggactacgcgagaacaaggttggctaatgacgcgaaggctgccaagggaggaggtgaaaggcagttcaatgggcttgtcgatgtctaccgcaagacactcaagtctgatggtattgctgggctttaccgtggatttaacatctcctgtgttggaatcattgtttatcgtggtctgtactttgggctctatgattccatcaagccagttgtccttactggcaacctccaggacaatttctttgccagtttcgctctgggttggctgatcactaatggtgctggtcttgcatcttaccccatcgataccgtccgcagaaggatgatgatgacatctgctccagatcctcttcttcggaaagaagtacggctccggcggtgcttaaatggagaaatatgatgacgaacaagagcagtgtgtgttcccggtcctttccaatcaggatctggtgaagtttttgcctttcatatcgaagaaattaataattcatgtagagggaggattcttccaacaatttgttttggatggagacttagatctccaaacactcgtaactatcctactaggtggtgacatcggtccccaaaaacatttatggtcatagagtctgcccttcgtttgtcagtcgggcaatttttcttgcatacaatgccttcgtttaagtatcggatgagttgctgcgactaattatttgtttgtctttaccttttgcaatgcttgattgttgatagcattgtttttgtcactggatttcttgttaatgttgcatttggtttacgcgtttgtcagagtgtctttgtagaagttctatagctttgcgacattgttagtctgggttcaaatggtttggctactaggtagtgttgtcg

SEQ ID NO: 19816 - DNA, 464 bp, Zea Mays
aaaagcggagagcggagtgagaagctaaagcttggtcggtgacgcctgacgcggggaagaaggatgtgagatccagccattccaaggcaagtggtagtagatgtacctgagcgagatgggcggtcgggtcggggaggcagcgggagcggaagcggattgtgtggccggatccagagggcggcggcagctgaatctcgagtagcctgcgctggatcgagacgagagaatagtggttggggatgagcgggcggagcaaatcgggggcgagatccgaggcgagcgaagaggggtgggcgctccgctccggcgaggaaaatcgagggtccgggacggcggcttggtagctgagtgccggcggcgacggggcgggcgtctggactctgtatgggagtggagcaaaggcaagcaagctgctgcagtggagggtggagctggacaagacgagaagaggtcaagcaagccag

SEQ ID NO: 19817 - DNA, 1389 bp, Zea Mays
gaaaaatcactattctttactaatatttgttttggggtgaaggcagagaatagatggagagaagtgactgcatcatttattttccctgccactgcgacaaatgcttcttttatgctgaagaaatactatatgtcactcttatatcattttgagcagctatacttctttagagtgcaaggctggcatcaacaagaaatagattccagaatgaattcttccattgaaattaaaaccgaaggccaagcttaccacaaaagaaaaaggggcatcaacacatcttcagatccagcttcgtcttcagataatgttgacgtagatgtgatagttgatggcaaatttgaacatggctacatagtgactgttattatgggatcgaaatccactaaagcaatcctctataattgcactgaagaacctgctttgccaactccggagccacctgttgcaaataacagcactggtttgaagggtgtacgtcgccgaagacgacgtaggaagaagctaagtacaacggatcccaggcaccccaaaccaaacaggagtggctataatttcttcttccaggatcaacatagaattcttaagccacaatatcctgcacaagacagactgatcagtaaaatgattggtgaacgatggaacaatctaagtcctgaagataaagctgtatatcagcaaagaggtgtagaggataaggagcgataccggacccagttggctgcttataaagaactgaggacaggccaacctatcagcaatgctgtgcctatccaacagaggctccctctgacagaagtgacgattgatgaagtagactccaaggagagaaaaatgtagaagacgagctcaacactgaaacatcccctgaggtgagcatggaaacaactggttctcctggacaccctgatccctctcgagatggggaccactttgagttgcggcggagagaaaaccccaaggcagatgagaaagataatgcaccacctgattcatgacttttcgctttgaatggtatgtattcgaagatccgaaagagaggaatttccaagaggtgacaagctacactacacatacatacctgttgtcgtaggaacataggctatatgctgatgtcaatcagagttctattagcagttggaatacacttcattttggtagttctgaatttgtattgctaaatttctttcgaattaaaagagagagggggggggggggagggggtactgggtaaattttccatccagggatgggtacttggtatattctttcgttcaatatttatcattacgttgatctatatgttgagtatgtgtaatgtcatgtcagcgaaaatccaaatctgcatatctaattgtagctatacatgcttagtttcatatattataaaag

SEQ ID NO: 19818 - DNA, 1084 bp, Zea Mays
gaacaaacgtatttgtgcggtcttgcacaggatgatttttaggcaattggtgccatgaatatagaaaactaaaggcgaaggtcgagacaatacagaaatgtcaaaagcacctcatgggagaggatcttgaaactttgaatctcaaagagcttcagcaactagagcagcagctggagagttcactgaaacatatcagaacaaggaagagccagcttatggtcgagtcaatttcagcgctccaacggaaggtaaattgttgagcttgctaaagttggctgttcgaacttcctcttttaagaattgtatgatttctttagctggccattagatgggcatggtttattgcaagtgttaactactttggttgccttgttacatccacaaaatatctctgctcttgcgctgtgctgcgatgcattgttaccgcaggagaagtcactgcaggaggagaacaaggttctgcagaaggagaaagcgttactcctgcatgcagctcgcggagaagcagaaagaccagcggcagcaagtgcaacgggaccaaactcaacagcagaccagttcgtcttccacgtccttcatgttaagggaagctgccccaacaacaaatgtcagcatcttccctgtggcagcaggcgggagggtggtggaaggggcagcagcgcagccgcaggctcgcgttggactgccaccatggatgcttagccatctgagctgctgaaggtttgccctcaccgtcgcgatgtgatagcccaaaatccagcaagtcttccccggaccccggactgtccccgcttctccgcctggtgcagtatcgtcgtgatcgcgagaagcagcagcagcggtttgccgtattttttaccactgtgtataagtagcatatctgcaatgtgtatattttgttcaccgttcctgctggggcggccgcacggtactttacgcatgtaatatatgtgcttcatcaaatcactttcactaccatagcatgtgccggtttgtggtagtttcatgtctcacataatgggtacacattcatatcccagtggtctcggttcttcacatcaaagttctatttcttcatgcagca

SEQ ID NO: 19819 - DNA, 135 bp, Zea Mays
atttaatcacatttataccttcgtcttggtagaaggcaataatccaagtgtcgcgtgcaagcgattacaagattgcgtgaacagtacgggaatacggttcatctatttataggcacagggcacagcctgtgtgaa

SEQ ID NO: 19820 - DNA, 1203 bp, Zea Mays
cttgaagcagcttgtgtgctcctagatgaggaattggactaaggaggagtttgttcacatactccgacgtcaaagcactgggtttgccagggggagctcaaagtaccgcggtgtgacactacacaagtgtggtcggtgggaagctcggatgggtcagcttctcggaaagaagtacatctaccttggtctatttgacagtgaaatcgaagcagcaagagcgtatgatagggcagccattcgcttcaatggaccggatgctgttaggaactttgattctgtttcctatgatggagatgtcccacttccacctgcaattgagaaagatgtggttgatggagacatccttgatctgaatttgaggatttcacaacctaacgtgcatgatctcagaagtgatggtaccctgactggttttggattaagttgtaattctcctgaagcttcaagctccattgtttctcagccaatgggcccccagtggcctgtccatcctcacagcagatcgatgcggccccagcatccacatctgtatgcatctccttgtccaggcttctttgtgaacctcagggaggcgcctatgcaggaagaggagaaccggtccgagccggcgtgtccccagccgttcccctcctgggcatggcaaacgcagggctcccgtgccccagttctccctgccaccactgcagcatcatcaggattctctaccgccgctgccaccggcgtggacgcggccacagccggccacagcgtgccgccgccgtctggtagcctccggcagttctcgggctaccaccagctccgcttccccccaaccgcctgacggagacagaccacctcctgttgagttggcggcggcggcggcgtctcatagctggccggtggttggctggctgcccatgcaacgccacgccggtgggtgcgggtcggtattcggtaacagtcgccactgttgggtatggttttgtgggactacagaggatgcagtgatctctcgctgctgctgtgtgctgtctctctcgctccctctacccacccacacctgtttgtaatatgaatttatcgccctctcgcgctcgtgattcgtccatcttcgtttcgttttgatggccaccggatgggatcatgagcgtgttgcgagaaattgtgtaataaaccatgcgtatttttatttatatttatttattgtgacgatggtacatgata

SEQ ID NO: 19821 - DNA, 324 bp, Zea Mays
ttgttcgattattttaattttatgtggattggaatgaattgacatgaattttgacttgcgataaatttaaaatgacttaataccacataatatacatagactaagggtgaaacgcggttcatgggaccgtgagaaactcggctacacctgcaaaatggatatggcaatggcttccttcgtcgccgctacgcaccaccacggcagtcacctggccgccggcttcccctactccgcgcgagcaggcaggagcgttggccgcagcggcgtcaccatctccattagagcccagaagaagagtaatagcgacttctgggagtagtagcg

SEQ ID NO: 19822 - DNA, 2839 bp, Zea Mays
ctggtcatcacatcaaggacgaaggcaattaaactcaaaagtcataggcaatataagacatgcagtgctttctgcaattatgctgatctcgaggcattcaccgaagagaaaaaaagatctctacttgctaagcgacatggtaaaggggctgattttttaagagcagttgatgagataattgaagtttatgattctctaaaggagaaaggtagtaacaaggatgacttggctgctgaagtaaagccaggtgtagaaaagtttgctgataataatgtttgcatggatactgaaaatatggtcagtagctcctatatacaaaatcatcaagagatagatgatcattatgtcactaccaagggtcatgacatgatcaagtctgacaggctttcagtcactataatgagtgacgaacgctgtgttataaattctgctcctgatgagcctactgaaaatgtatctgtacttgatgaaatgagggagatttctttgcgtactaactcattttcaaataagcaaagggatgcacagccacaaaattgctacacacgtagtagggttccatctctgcgaaagtcaaggagttcaataagtgttgaatcaaggaaggctcaaggttctgataatgtctggttgcattctggcagaggcacttccaaccaacctgtaactttggggactacttgtaacggcagcaaaatgttgaatcctcctgttaaggcggatagtacttgtaacagtgaagcatctgaaaatggaacttcagagacagaattgaaatcaaatggcacatctaatctacccatgaatacagaagtaattttcaggagaataagaaaatcagatagaaaacctgttcctcattatgaagattgtacaacaccaaataaagatgaattacgtgctgagtacagtgaaatcctttcagattctccaaattcaaagaatgaagtatgcaagtcagatggagatgagcacttgccattggtcaaaagagcaagggtccgaatgggaaggtctcatttggaggattcaccagttgatgaagttgatgtttctaataagaagccagagcttacaacaacctcagaccaatgcgataggaatggtaaacctgcaagtcctgtcaatgattattcagctgatcaggtgtccacagttgtaagttctgcttctaatccgtcctgcaaatcagacatgcctatcctgtcaaaggaaggtcatcttccttggaagaataaagaataccacccaaaaattttagcattagatgtggaagctgctttgcctccttcaaaacgccttcatcgtgccttagaagcgatgtctgctaatgtcgctgagaatgtcaagaatatacctgaagtgacaggaccaaatgaaatggctctaaatggctctctgttgacagcaaacaaccattctaataaatctgctgatgcagtagtcacagtatccaataaacctgtaatagttcaatgctctgaaccttctctagacacacagtttaagcatacccaatcaggtaaatgtacgtcagaatcaactttacaaaataataccatccctgattctgcttcagttccatcaaaagaaaatgatatcatgttaaaagaaaatgataccaatggttcctgggtttgtagtgaactagataatggttcctgtgggaaaacttcagccctttgtatgatattgaatcgacccggacttgatgttacacaaaccacatctgtacctgaccggttatcttcgtcttttgagaaagaaagtgaaaatgtggcaacaagcagtgtcaaagagacaaaaccttttggctcagctgtttgtgaggttgacagaagtgcagaagcagaacaaattgaccattcaaacaacaatgtgattagcaacactatacggcatagtgagactattgtagtggattcagtgaacaatgtgggagatacggcaagcaactcttcaatggctactaaatcatccagtatacaatccgatgcagacacccggacttctgaagtgcatacattctcatctctggcgttgaaagaactgaaccatagaaaaattaaggacagaagcacttctccagattcaatgccgatgaaagaacttatagctgtggcacaagctagaaggttttctcgactgacttcctttccagatatcttcctaaatgccaagtatattcctgaaagagccacaaatacacctcccaaggaaggctcacacaggcagttgtcaccctcaaatcggatattcaggtccacctctggaaatgataatgttcattctaggagtccttttgatattatccaacagaagaaattagcagggcatgttgaagccaatgcagcacgaaggtctttcaaagatttcctcagtacattgacaagaaccaaagaaagtatatcacgcgcgacgcgtcttgctattgagtgtgctaagtttggcattgctggtgaggcaattgacattatcgttgaacacttggaaaaggaatcaaatttatataagagggtggatctcttctttcttgtagattcaataacacaatgctctcgcaaccagaaaggtggagctggagatgtatatccctctctcattcaggcagttctacctcgaatactctatgctgctgcacctcctgggaactcagcatgggagaatcgaaagcaatgcctaaaggttttgaaactttggcttgaaaggagaacactttcagaatatattatccgtcaccatattaaagaaattgagactatcatgaggcatcatttggaagttctcgccgtccttcatgcccggggagagctctaaatgaccctttgcgagataatga

SEQ ID NO: 19823 - DNA, 1241 bp, Zea Mays
cgaggcgtcaatggatcctttcctttagctctctagtggacaactgcagaagttcgttgtcactgaaggagatactacggaacaaaatcatctcagaggtaaagcagtcagtggttctacaagaagatggatctgagaggatgaaattaaaagacctatctgatgcaatttttcaagatattgggagcaaaataatgggtcaaatctcagatgaggtatggaatgtcatccagtcaaatgaaactgatatacagggaactgtgaaagccgtctacaataggatactgaaccctgaaaaggtctctgagccttctcccaagaagctgaagcagagaggcaaagaggaacaagttctgcccacaaagacagcaactagcgttgcagtcgaggcggaagatgatgatccagaggagccaccaggatttggtttcaacaatacacagcgtaatgatattggagcaacaaagccacagatgagtttggaaaatggtaatgaagggaagccaaatggaggcgagccagctactatcagcaatccaggggatgaggaggaagatcctgaagtgccccctggatttggttaatggaattcactaacttcagtggaatgcagctgtttctttcttagcaatatatacaagaagggaaatgtttaatcttctgttgacaggaagagtaatgcaagctcatgtctgcgacagttgaaacccgtgtaatgatggttacttctatccagccccaggataccctttctgtgatagtggcaaatatgttgggtgctaacagtctgacaacgagttccaggcacgaagttttcgaagaagctggacatattatgagaggtcctctaaattatggagatgtttagttctttattccaagaggcacgtatgaaaaacatatgctatataaaatcccttgtgagttgggagttgggacagtttcttaccaagggtctgtttggatggaggtcctccaggctccagtgcttttgcaaagctcttgagatgcacagctctcccagtatttttttgcacgtttatttatatacgtaaaataagtatttatacgacaagttttcttgagttgggacagtttcttaccaagggtctggacatatttgcatgtttttgtatttattcatagaccttacgtggactggaacatttatcaccaaaccgtggtcggtctcatttttttttctggactgcgtgactcttgctattttttaaggctgactt

SEQ ID NO: 19824 - DNA, 823 bp, Zea Mays
ctcccgccactacttctccatagctaagttggcgcgctgcaaggcttattgtcaaacaatttggttgccctaaaagggtcctgcccaaattgtggcgagcaggtatttgcatttgtcaagattgaaaaaaccgtgagagcacctcatcgagcagaatgccatgtctgtcagtgccctttggagtaccgcacgaaaattgagaaatcttcgtcagggcctagaagaagttgggtctacggccgggtttatctagtgaagcaagggcatcctgaaacggaaatggataaatgaaaaattctaattgattgagactgctgagggaagtttagataatcccatgagatggcactcttctggtcgactgaaacatttttcagatgccacttattttgatcagaagggcttactgtgtacgaatcatttgaaagatttgatccagccaagtgctttgtaatacagatacatttctgagatgtccagacgctgcagatgaaccccatgctgcattgtattcttttctgttttctctttagatgaatccatgatacagtttggatgaagaactactgaagaggctacgaaggtgccattgctatcaggagggagggtcactgaaaggctcacaggagggagggtcactgaaaggctcacactctgcaccaaacatgtttaatcatttgatcaaagatgcccacactcagcatgtatacagacttgctcaaatgtgatgtgttatacaagtgtgtgtgtgtgtatatatgaagttttcagctttattgtatgtatgttttcagattaatttgcctgaatctggaacccgtct

SEQ ID NO: 19825 - DNA, 1458 bp, Zea Mays
cagagcacagcactccacctcactgctccagtcgcgagccgcagctgcgcgtcgcgtcgcatcgcacgcatctctcctgccctccagctccaaagcttcgtcgtctgcgtcgccccgcgccccgtcttgctcgctccaagctagacaccataccacccaggttttgttttatgcttgttcatttgtctatggacaatggactagttgctgcactgcttttgtgagtcaccatgggaagcagtggagcagatacatcgtctaagccaaacaaggcatccgccccacaggagcagcaacaacctgctacctcaggtgctgcaacaccggctgtttatccagactggtccagcttccaggcatatcctccaatcccaccacatgggttcttcccctcacctgtggcatcaagtccacagggtcatccttacatgtggggagctcagcctatgattccaccatatggagcaccgccatatgtcatgtaccctcctggagtgtatgcacacccatctatggcctcgggtgcacatccatttactccttatgccattacttctccaaatggcaatgctgatgctactggaactactgctgtagcttgtgatactgatggcaagccctctgaaggcaaagataaaagtccaactaagagacccaaaggaactttgggcagcttgaacatgcttactggaaagaaccccagtgaacatggtaagacctcaggtgcatcagctaatggagccacttctcaaagtggcgaaagtggcagtgacagttcaagcgaagggagtgaaggaaattctcataatgattcatacaagcatagtggacaggaacaagatggagacgtacgaagttcccagaatggtgcatcacgttctccatctgagggaaaatttaaccaagctatggcaatcatgcccatgccatcaagtggcccagtaactggtccaactacaaacctgaatattgggatggactattgggccaacacagcaagctctgctcctgtaattcatggcaaagtgaccccaacaacagttccaggggctgtggtcccagcagagcaatggatacaggatgaacgtgaactcaaaaggcaaaaaagaaaacagtctaatagggagtctgcacgcagatctaggttgcgtaaacaggctgaatgtgaggagttggctcaacgtgctgatgttttaaagcaggaaaatgcttcacttagagatgaagtaaaccgtatcagaaaagagtatgaggaacttctatcaaagaataattcactaaaggaaaaacttgaaggcaaacaacacaaaactgatgaggcaggacttaacaacaagctgcaacattctggcaatgacatccagaaaaaaggaaactaatcgagctatcatgcaatgcttgcatagcatggccctaactagattattgggaggcgcaattgtagaaagtggttctgga

SEQ ID NO: 19826 - DNA, 2619 bp, Zea Mays
ccgcgtgcgccccacaaacacaaagccaccaccaacccaccagccgagccgaggcgcccaaccgggcgcgggcgcgggcgcgggcgcgtccatccgccccccgacttcccattcccaccgcgcgcacccgccaaatcaaccaccccttcgtcgcccccgttccgtcccgtcccgttccggcaggcagccactcgcgaaggcgaagacgcaggcgccgagccgccgaccccacgggcccccaccccactcccgccgcgcctctccctccgcgtttccagatccccccgctcgcccgtgccgcggcattggcaccggcaccccgccgagcgcccgcaatgcgagccttctagcttcccgtagcacggacggaatcgcgagaggcatgcatcccaagcccgagggcggcgaagccaacggggccgccgcggaggcgggctccccgcggtccggcaacttccggcagcggagcatgcacgccgcccccgcggatccggaggcggcgcgccgggcgttcgatgtcgagaaccccccgccttgctccgccgccgcgggcggcgggctccggcccagcgagtccgtcaccaagctggagtcgctggagcgcgcggagcgcgccgcgctggcgcccgccgtcgtgctcaggaccgggttctacatcctggtgtggtacgcgttcagcacctgcctcaccctatataacaagacgctgctgggggacaagctcggcaagttcccggcgccgctgctgatgaacaccgtgcacttcgcgctgcaggcggggctctccaagctcataatcttcttacagtccaaggggccggaggccgccgtcgagatggggtggaaagactacttcatcagagtcgtgccaactgctctcgggacggccttggacataaacctgagcaacgcatctcttgtgttcatctcggtgacgtttgctactatgtgtaaatcagcctccccgatattccttttgctttttgcgtttgcatttaggttggagaatgctagcatcaagcttctaggaattatagttgttatttctactggagttctgttgacagtttccaaggagacggagtttgacttcttgggcttcatttttgtgacgcttgctgctgttatgtcgggattccgttggtccatgactcagattctactgcagaaagacacttacggcctgaagaatccaattaccttgatgagccatgttacgccagtgatggccatagccactatgatactatctctattactggacccttggagtgaatttaaaaaaaattcatatttcgataacccttggcatgtcatgcgcagttgcctacttatgcttataggaggaactttagcttttttcatggtgttaacagagtatatacttatttcagcaacaagtgccataaccgtcacaatagctggagtagtaaaagaatctgtaaccattttggttgcggtattttatttccatgatgaatttacttggttgaaaggggttggtcttttcaccattatggttggtgttagcttattcaattggtacaagtatgagaaattcaaaaggggtcatatagatgaggatgatgccaactctccttcatgtactggtgacgtcaagtacattattctagacgacttggagtatcaggatgaatttgaggaggaagatacataattttgtagtacagcgactttcaactgccacaggcttgttcatgcctgacccattgatacctgcccattgaaatattacttatggaggttttctctggaaaacatacatgaacacacctaaggctaggtgtgattatactatgctcgccaaaatctgatgcgatctgtgtgagctatgtttgtcacgatggatgttgaattctcatcttgattgaacagtcaggctaactacactgtcaagcactccatcggatcagaattcccattttgcgaagattagcagcggttacagaatgacatgcatgctatagcaggaactgctgagaatgctcgggatctgtatatttgttgttgtctttgcgttagtgcgcttgcacatattcattcttgaacctccacatttttggtgacgaggtgtactcattctctatataggcctgtttgtaaaactgaccagatgataccccacacgtgctgtttttcccttaaaacctagggagcggcatttggttttcgctgtatactgtttcggggcaccgaatatgttgtggcttgattgggaactggttataagaaaagcatgatagattgggaactgaatttctgttatgccgccaagtaaaggcacctagttcgaataattgccaaaatatctcttcggaggggaaaaaactttggttagcttttatgtttgggatttttctctgctcttgcttttcacaatcgccatgacttcagaattctaatgtttgagcgaaggaatgggacttctgggcattacgaacagtgtctaaggacccgaaagttttcctttactaaacttgttcggatgctaattagaagtatatattaaatctagtgtaaatataaaactaattatatataaggtctaagcgataagacgaatatattatactaattagttcatgattcgattttgca

SEQ ID NO: 19827 - DNA, 1362 bp, Zea Mays
ccccgacgtcccctaatccccgggacccctccccattcctctcctcttctctccctcgcccctccctccccaaaaccctaacccatcgtcgaccggtccccgctctcgtggcgccggcaagatgaccctcctcgcagccatcaccaaccccgccgccgactcccgctccggctccagcgagagggctcaccctatcgtgctcacgccgggtgtcacgccgccgccgccgccatcctccacgctccccaccccaataccgtcttccacctggtcgctctccccagccgaccccaccctcgccaccgccgcttcctacctcgcggcctcgcttgcctcctgctcctccctcccgcagctccgcgcccttctcaccacctttatcaccactctgtcacgatccctcgcactcccaaccccgccggcggccctccccgccgccatccgcgctgtcgccccttacttccccgccgcaatcgcctcccttgtggcctccaaggcggtaagcctcgccgggcacgacatcctccttgctctcgcggaatcccgcctcctcccgcacccgccaccggaactcatctcgtcgctctgcgacaacgactgggtcgaccttgtctgcgtcttgctccgccaggccgccgacatacgttcctccgagatcctcgccgcgctccgttgcttcctctcgccggcctccgataaggcttacgacgccatgatggacgtcaagtgccgatggaaggacgccgcggtgcttgctgtcaacaggtgtcgggagaagagcgccgtgaagaggaagaaagttgacgctgcggcgaggctcgcggcgctgctgctcatgatggggcacgatgggttcacctccccagaggtgtgtctgcattacctatttgcatcagggaatgtggattccgtggtgcttggagcggctctggctgaacttgatggcggggaggtagtcaggttgatgagatatctcaacaagtggattcggaagtactggagcttctcggaagcgcacacttgcccggaggctgtggaaaacctcagattggagcagtgtgacagcgtgccatcgtttggagcagtggctagggcgctaggagtgctgctggataatcatttttcacatcttgtgttgaatgctgatgtgagggaggacttgagggctgcggacttgatggaaataatgagtggccttaaatatgaactggtctgaggcccaagcaaaaatcctgcattcagctgctatctcactatggctgttttcttctaaagtccttcgacatgacagatagagcgtttgtcgtctggtgccatcgaccggcatcgtgaacgggacgcaagaacagaaagaggagtaga

SEQ ID NO: 19828 - DNA, 1027 bp, Zea Mays
ctgacagaatgttaagtaccatgaacctgagtactggaaatttggggaggaaggaaataaatacttccgtcatgccacggggcagatatatgccatttcgaaagatctcgctacttatatttcaatcaaccagcctatcttgcacaaatatgcaaatgaagacgtgtcgcttggatcatggttcattggtttggaagttaatcacattgatgaaaggaacatgtgctgtggaactccaccagattgtgagtggaaagggcaagctggtaatgtctgtgtagcgtccttcgattggagctgcagtggcatatgcaagtctgttgagaggatcaaagatgtacatgctcgctgtggtgagggggattcagcagtttggagtgctcttttctagcgcataccttctttgcccgtaaatatgtagcatacttgctaagctctcgcggcggacacctgcataggcaactcaagtaaacttgacaaaaaccaaagatcgtggagtatgatctgaaactgcagaaacagtatgttgcttggaaatattctgcaacaacataattttgctccgtcactgttcgtggcttttggcggtgttagggactccaaagtagggttgcaactgatcttacatgtaggggggagagtttcccagctgatgacgcgtatggaagtaagagatcatgtagaggggcattgttttatgcaaattttgacattcttttgcgagtttcacacattcagtcgttcatgagggtgtaccatgatgtaacatatgagaagccgtggacggatgttggtttagcaaatcttgttccaaaagcagtgattagtgctacaaagcaaagggtactaacgtgccaagatcatgggttttgtaccgaatcactatattgagggcgcgtttggattggagggaaaacggaggaaaattacaggaatagcagttctttggcaagtctttcgcacagtacaggtcgtgacaaaaaatcagataggaaggtgtactttttgaggaaaaaattaagagagg

SEQ ID NO: 19829 - DNA, 1071 bp, Zea Mays
catatattattgaatacaccattccattttgaatcaaaccaaacaccatctactatccgcatatatttaacccgttttcatccctacccaataataacccaataataaatcaacaacgaacaaaaaaactctactccgtaacctttccgtctctaaccttcccgtctcctgctgccacctcccgcatccgtgaagaacgactgaaccagccgccacccgcccgtccgactccggctccggccacctgcctccgtccctccgccgagctgcccgtctgccttcgtccctccggcctaggcgagcagatctccacccccacccgccccgagccgagcagcagccagcagagccgcatcgccgccggggaacgctgagttgccggcccgtcgccctgagaagatctccatcccagcagcatagccgcagcgccgcctccccaaggcaaggcccgagcgccctacgccctgccacaggccccagattaggttgatgtctttcatgagactattgcctcaaaggctaccccaacttatcaggcaggtggagcaagatgttgagactgtaatccacgttctccagccaggtccaataggaattgtggagcacaaattcacagacacggagatcttagaggccagggctacagtgaaaagagcagtggataattggcgaagaaattggacccttgagaaaaatgttggcagataaatggaaataatataccccttgtgtcttctatcaacagtacttgaaataaataggatgctatggctggatgcagctgttgccattagttagatttgagcacgatctgcttatcgggagttatgttaactgttctaaatgatcagtctgcctctctttgtttcatggtttgaaacgttcatatttagagaatttctttttgttcattgccttgtcggcagccggctgtcatattgaatgtgatctttcttttgatgcttcaatactttaactgtagtatctgaagagatacttgaagatcactgacttcatgatggatacaacaccttgaccgttgtgttaacacctttgaggctgccatcctga

SEQ ID NO: 19830 - DNA, 5453 bp, Zea Mays
ctcacctggcactggcaggcacttccgcgcactggcagcagcagctccgtcggtctcccttccccgtcactcccccaggtctgccactccggcgcgcgtccggctgaaccagctacggccggcagtattgctgaggaagtaaagatgagtggacgtggccgtgaaaatttgtaaacgaagcaagtgcggtgcggcaggggagagggagagggggcgaccgaccgtcggaaggtggctgcgatcgacctgccaaccgcccccacgccgcgcacgcactgctgccccagcacacgcctctagaaattccaaaacgagcacggcccggcacgaggccgcccgccagtgccagtgccagtgccggtccctccctctcttggctggtgctggcctggatcctccacgcgacgccgccgcggctcccttctcgtctcgtcgtccagtggtgggtggtggcggtggtggtggagtgcagatccgcgcatccgtacgtggattgccttccgtctttgcccattgctgttggccagtcggcgtggatttgagagctgcgtgtgtgtgtgtgcatccgtggtttggttacttctccggcactcaagatcgaagtcgcaggacttgtttgggttcaactgaactcccgtgtcctgcgccaggaccgccactgatgagacactcagatttaggatggctttcatccgccgccattgctgagcttctccagtaaagactggaatttttcgccgcgccaacctttaactgtatttcatgatacaaaaaaatgtcatcagactccagtctaaccgaatccctacatgagagaacaattgtctttggccttaaactttgggttgtgattgggatcgctgttggagcgtccctcttgggtattcttctcattcttctcatatgccttaccattcaaagttgtatcaagaggtcacgcaagccactcaatgaccgtcgactgcaccagatccctccagcgtacaaagatatcaaggaagtggggatggtagaccaatttcctgccaaagattttgttgtacatgatgggcttctactcactattcagaatgggcctgagcctgttgaaccagttgatagagatgcgattcagttggctcaggaggaaaagttgaaacaaagagaagagaccaatgtctctgcttcttttcccattatggatggctgcgagggaactcagattgtttctgtcgatgaacagtcttccacgcacgctactgttgactctgcaccattggcaggtttacctgaattttcttatcttggttggggccattggttcactctcagagatctagaccttgcaactgaccattttgcaaaggataatgtaattggtgagggtgggtatggtgttgtatatcgtggcagattatcaaatggcaccccagttgctgtcaagaaaatccttaacaatttaggacaggctgagagagaattcagagtggaagtcgaggcaattggccatgttcgtcacaagaatttggtccgccttttgggttactgtgttgagggtactcaaaggatgcttgtgtatgagtatgtgaataatggaaatcttgaaagttggctccatggggaattgtcccagtacagttctctcacttggttggctcgcatgaaaatccttctgggaactgcaaaggcccttgcttacttacatgaggcaattgaaccaaaagttgtgcaccgtgacatcaagtccagcaatatcttgattgacgatgagtttaatgccaaaatatcagactttggtttggccaagatgcttggtgctggtaaaagccatattgctacacgagttatgggtacctttggctatgttgcacctgaatatgctaacagtggacttctaaatgaaaagagtgatgtctatagctttggggttgttctgttggaagctattacaggtagagatccaattgattatgatcgccctacaaatgaggtaatatttgtcaaatatccttttctaataatttatggcatccttattggtcttgatagaagtggaaaccctaaccctataccgggttgggtgatgggtgacatattaataatggtgttaggtgggcctagacccaatacaaatgacaacgacacacacaatacatctaacacccccatagtcgaaactctagccatgacagatgttgagactggaccgaaactcaaacataccgaaactcttcaaacatcagtgtgggaaggctcttggtgaagatgtcggcgaactgagaggtggttggtacatgaagaactcacacatctccaatggcgacacactcacacacaaagtgaaggtcgaccttgacatgcttcgtgtgttgatgctagacagggttggtggagagatatacggtaccaacgttgtcgtagtagaccagcatgctccattttagcggactatggagcttttggagcagctgacggagccaggctgtctcgaccacgccattagccacgacgtggtactcggcctcggcgctggagcgagagacgaccgactgatgcttcgaggaccaagagagaaggttgtcggcttgtcgcctaggaacacgacatagcctgaagtggacttgcgcgtgttgagccagtcagcccagtcggcgtcggtgtaaacgacgaggtcagtggtcgaggagcggcggaggaggccgaaatcgagggtgccctggaggtaccgcaggatccgcttcatagcggtgagatgcagttccgggggtcgtgcatatggaggcacacttgctagacggtgtagacgatgttgggccgggtgaagatgaggtactacaatgcccgacaagactccgaaagcatgtgggatcgttgacgatgtactggcgctggtggagaaatagggcctagggatggcgttccatggtgagtggtgaccctaagaagtggtgcagctcacccatgtccttcatcgcaaactcctgctggagggaggagattatggatcgcaggagcatgggggaggaggccgtgagaacaatgtcgtcgatgtagaggaggtacgccacgtccaggccatggcggaagacgaacatggaggattccaccttggcctcgacaaacctctaggagagcacgaaagtggcaaagcagctgtaccatacttgaggcgattgcttgaggtcgtagagggaccggttgagcttgcagaccatgtcgtagtgagtcgggtccacaaagccgaacgactgagtggctaagtgcagtacaccgtctccatcagagtgccatggaggaagacattcttgacgtcgagctgatgcactagccaagcccgtgagagagctagagtcagaacaatgtggatggattgatgctacttcgtactattctgtgcctgttatcttgtttttccaatctatgatttcaatgctgctacatccataaagctcagcctactgatgcagtccatctggattaactataggaccaacttgttttctgtactaattaagctggtcgttatgttatatattcaaaactggaaggagtagttcatatgggtgaatgcatatgtaaccttttctacctgcaaagatcgttcaacttttgtgcaaaagttgcatgtagaatttttcaggtcaataaaattattttacaactcactgaagaagataaaggtaaacctggttgactggcttaaaatgatggttgccaacagacgttctgaacaagtggtggacccaaaccttgagagaaggccttcgacaaaggagctgaaacgtgcccttttgactgctctgaggtgtatcgatttgaatgctgagaagaggcctagcatggaccaggtggtccggatgttggattctaatgaactcataccgcaagaggaaaggagacaccgacaaatccgaatccctgagagttcagaaaccgagccactgcggggcaagaataacagtggcaggagtgatgctcctgagcatgaagcgaggccaccacgacctaagagccgaactttttcgtccaaatgaaagaaaaagggcatattaggaggtatatggtagacgctgagacgcgcaatgtgggaagcaggaaatctcagcttcgatacatgacgacacagattgatggattttttttcgttcttggatgtgatgcttgacaatacatttttgtgttccttgacacatgtacagtggcgtgtggtagttgaagggtgtatagttgtattacttagttcctagttcgtaaaaaaaaacttcaaaagaagaatgcattcctaccaaaaaagggaaagggaaaaaagatgggcgtctgtggtggtcggttgcagcaactgttgtctggttgctatgaactccaaagtgcatgaagagatcaatgtaaccttggatgatgtttgtgtttgtttcgtttactcgtagaatataaaggggagatagaagaattggcttcactttctgggctcagtgttgatgatgatgactgtcacgttgatgaatatgggagggcatgttgatgagccaacattgctccaccccatgccaagagcccagtttcagtggcatcttaaacctctctgattcctacaggcttctgggcctgctgctcattaggcaaggttagttccttgctatcctggaaagagctttggaactcaagccacctgcaaacaagttttcctcagttctcctttaccgggaaacacaaactgctgcttagtaagaaactatcttggacagccctcctataaggtcgtgttcggttgcatacggatcggagaggattgaaggcagattaaatccctttctattcatttttgactagctagtgatttaatctcctccaatctacatctaaccgaacaagtcctgaaaagaaacttccatttgcatccctcctcttaaaactctgaaacatctagctgaggttcaagccctatttcatgacagggaacaggatccctcctcagaagacaagtgggaaaatatggggttatggcactttcagttccaagaaactacacacacatgcagttgcacacagctaacatgctctttgctggcatcatgtctcttcaagtggctttggaattcttgtgttttttgggaacataggctcttgtagcttctaaccagagatagattatacaccaggagcttgcttagaggaaagaataaacgcctggatgactataattgtgttctctggagctccaggtgtggagagaccagctgttcttgaatgttcagtcagctgtcctgggcctccgtccacattgtctggaaattaaaatcttcaatcccttgatatgattatggaagccagaaatagctttggaagccgtatcttcagagaactggttataactacctgcttggccatttgggagctccgaaatagcactgttttttttacaatggtctactcttcatgtttggaaacattatttcagagaggatttgtcatgg

SEQ ID NO: 19831 - DNA, 340 bp, Zea Mays
tgcacggtctctccgtgtttggtacccgcaacaagttctcgctttccaactccatttccggtcgcttccccaacccccctcatcttctcacttccccagagtccgaactacgagcgagcggctgcgattcccagcgtccgagcgccccggcgccggtctcctacgcggggaaggaccgggcctcggactgctacggcgccggatgagcgagcaagtctgtttctttgggcaagctatcggtcgatgtggcagcggagtagagtactggacgggcggggccacatgaggttcggcttccggaagggtggaagacgagatggcgctcacgaaggcagaggac

SEQ ID NO: 19832 - DNA, 486 bp, Zea Mays
accgaagatctgccctccatagattccagcttttgctggatacaagatttccggcttgttgagaggagcatttttcagtggtggctcagagggtgaagttgaagatgagaagacccgaaagaaaagggagaagatggagaagaaggcatctagggggaagatgatcaaaactaggactcgctgatgtgacatctgtggcctgttgcttgaaagttaggttaggttggtttatcatagctgtccgaccgagttccaaactgtttgtcaatatttatatcgtgaatttgttatagcgttcagcgacaacttgtttgaacttttaaacagctagtattatgtaggaaaaatgccagctaatctccaacatgtccgatcaataagaatttcatgtgtaatttctgacttttttacccataattcaaacatcaacattgtggcatagcaaatgggaaatcgtgacacacaatagtgtacttttcacagaaa

SEQ ID NO: 19833 - DNA, 1828 bp, Zea Mays
cttcaaacataatactataatagacacatgtgcttcatcattaccaacgaaaagtgcatgacaaataaacaaaatcaagcgtaatgaagtcaacaaagatgatttcttaagagttatcaggaatattgttggggatcaaatgctcaagcaggcagctcataaagtttttgtacagatgcaagcacaggcgcaaagaaatagccaggcaaattcaagtcagcagtctttattctctcaactttctgcacagcagatggcttccagtggttcagcacagttacatgatcagaaaattcggccacctggaccacccaaccaaggccagaaaaaccaggtgtcatcttcacctcaggcttttgcaccaccatcaggcacccaaccgcagaatagtgtacactatcttgctcatgataaccctaaccaaaaccctgatgcaaagggaacaaatgttgtaccaaatcaaccatctagaatgaacacatcagttccattgcaaacaaagaacaaacagcatcaaccaacacagttgcagcaggcctcacaacaaatatatggagcaagtaatcctggtgcccaggcttaccctcggtcaatcactggttctcttagatcaccgagtcttgttccagaaacacagccatccatgcatgctcctggaatggctcctgcaaaaatggttcctcctcctactcatccaatgatgcagcacaatgcaactgcatggcaaatgcatcaaaacagggaattgaaaactaacgctccccctccaaatgctaatatgaagcaaaattctgaatctgttggcaaagtacgcatggctggcacaggaaattcttcagctaaaggaaagcagggaactcctaactctacaccaaatgctagtggaggtacaaagagtagcaagaaatcgggtgggcagaagaaatcattggaagcagcaggctctatgcaaccttcaagcaaaaagcagaagacatctggaggctcccaggaacaaagtatcgatgaactaaatgatgtcacagccgctagtggtgttaatattagggctgatggcagtggtgctacagaattggaaaaagaaaaagaagaaagtcgcccaaagaacgtcaagcccaacaaggaagaagatgataaaatgagggcgaatgctgcaaacgtcgctgcccggcaagcagttggaggaagtgatatgctctcaaagtggcagttgatggctgagcaagccagacagaagcgagaaggcattgatgtgtctgctgcttcacagccaggcagagggccaggttccaggcaattatccaaatttgggaaaggtcctggtgagcacccagaaggttcaaagaggagccattcgatggcattcggaactggaggcatgaaaagacccggcaggacagcgtttgctggtccacagcgattgatctccgtgaaggatgtcatttgtgcccttgagagggagcctcagatgacaaaatcaaggctaatctaccggctgcacgagcgattgcctgtagattctaccgtagattagaccggaatagtcatatactttattgtgggcatgcccaattgcccttgcatggtattgaacagcgaagaagcatacccgccactcccatttgttgtgctttggagcggcactgtatattggtgtaaaatttgtatcgcaaaggcggcgaattaccagcaaaaaagggtttctgtacaaaattcactgtaagcggggtctggcatttgccttttctgcaaccacgtctgtgaggttatttctagcagactactcatctcaatatctatatttttaagggttaattagatttttgcc

SEQ ID NO: 19834 - DNA, 1704 bp, Zea Mays
caaattggcccatactctgtttctaagtttatttgaatgaagtatacgaggagggaatgtgtattgtctattatgttgacaaacaaaacatagttgaaatccagaaaaaagaaaaaagttaacctacggcaggggcatccacgtgttgatgccctactggtcgcctcacatccctcacgataacgaagcgaatcctattgcgacgcagccaccagccaccatcggccatcgctctagccagcccgcccgccagcgagaggtcaaaaaccactacgagccaaaaactggagcccagggaaagcgacgagcaaaccaaacatggcggcgatcctcgcgcgcgccggcgtcatcgccaccgccggcaaaggagggggcgctggaacggccggcgtggtccggcgagaccacgctgtcgcgtctggttggcgcgctcatcgcgttcaagccgctctacgcggtattgaagctcgcctcccgcgaggtcatcatcaggacggcggagaagtcgaacatcccgtggagggagatgacgaaggaggtgctggagtcggacgtgtacgaggtgttcgagagaatccaagacccaaacctcgtgtaccctgactactatctcaacccgtttcatgcctacgacgaagggaatctatcatggctggctgcagcagaggcggagcctgcaacaatgtcgatcgcaaagagggcaatacctgaggctacatcaatcgaagaggccaaccaaattgtccgcggcaactggctgaatgtgattgaggagcatcatctgaagtactcggggaactgtcaggtaaacgacatcctagacattggctgctctgttggagtaagcaccagatacctcgctgagaagttcccatcagctcaagctgttgggctcgacctatcaccgtactttcttgctgtggcggcacaaaaggaagaaaaactgtcacggccaaagcctattcgctgggttcatgccaatggtgaagcgaccgggctgtcttcagattcatttgaccttgtctcccttgcttatgtgtgccatgagtgcccagcacgagcaatcacgggattagtgaaggaagcattcagggtccttcgcccgggaggaacaatcgccttaactgacaattcgcctaaatccaaagtgcttcaggaactatccccagttttgttcactctgatgaagagtaccgagcctttcctggacgagtactacatgctggatttggaggagacgatgagaaaagtgggctttgttaacgtttgctccgtcctgacagaccccaggcacagaacagtcactgcaaccgtgccttactaattgggtcagaccatcaaatcccaagcccggccggtgtacaacaattgactatttgaaattttgtatccttactggtatggttgcacctgtataaagtagagcaatctgagtgaaacaacaaatcgaagtacaccaatttaccttccacgcatggacattatgaagtccaacactaggactgttatggtcagatgattcagggaaccaatctaaaaaaaaactcatgtgatattgtagccaggaatcactttcatgaaccttaattaactctgaaatatttatcagctggtacccaaccaatcagcattgctgtataaatcgaaaataaaacatacgggacttatctcaaattgcacaagagctggtgctcctaagtgtaa

SEQ ID NO: 19835 - DNA, 843 bp, Zea Mays
attttttgtctggaccaggaacagaaaccatcgacctaacaaggttgaagatattgttgacacagggaatactctgtcctatctcattgctcatttggagaagaaaggtgcatcatccatatcggtttgcacttttcttgacaaaccagcaagaaggaaagtcaatgttcatctagtaggggatggaaaattttaccgtggatttgagtgcccagactactttgttgttggctatggtttagattacgcggagctctaccgtaacctgccttatgtcggagttctcaagcccgagatgtacaaaaaggattcaagcaattagacctgaggctgtacctgcaccttgtgcaatcgatcgatacgaagatctcagttacaaatgatacagagatcccagttttgatcaacaactttaccgaagcagaacttcttaatgcaaatgatacgagggggaaaaaggcaaaaaaaaaacagaaagatctagtttaccttttttctgtaagttcaggaaaacttcagttttttccaggtttctgtagcataacagcaagatgtacaactgtcagttttgtttgtcaccaaacagcaacccagaagggaaagatgtagttatatggcatgttacattttcagtttacaggctaaacagcttacagtgtcttgtagtgagatgtaactgtaaggtcggggagcttagtgaggtcagggtgggccatgcgttcccctgcccaacataaccaccattgagcaaacagtattttcattaccgtttagagactgtttggttgagttgttgctaaaaaaagctgacgtggaatgtgagatgtgaaaaaaattgctata

SEQ ID NO: 19836 - DNA, 1591 bp, Zea Mays
cttttgcggtacgcacggatattcgtttttttcacctgcaaatctgcaataaaacgccgccaccgccgcggcgccaccacctcaagatccgatctccctctctctccccaatcctccccgcctccccctaccaaatcagcaccacccaaggcgcatccgagccacggccgcgcaatgccgccctctgtcgatgcaatgccggcccccggcgacgccgcgggcgccggcgacgtgcgcatgatctcctccaaggagctccgcgctcacgcttccgccgacgacctctggatctccatctccggcgacgtgtacgacgtcacgccctggctcccccacccccaaggtccagctcgtcctgatggccgtcctcttctacgccgcgctgtacctcgtcctcgcatgcgccagcgcctgggcgcacctcctcgcggggggtctcattggcttcgtctggatccagtccggctggatgggccacgactcgggccaccaccgcatcaccggccatccggtcctcgaccgcgtcgtgcaggtgctctccgggaactgcctcaccggcctcagcatcgcctggtggaagtgtaaccacaacacgcaccacatcgcctgcaacagcctggaccatgacccggacctccagcacatgccgctctttgccgtctcccccaagctgttcggcaacatatggtcctacttctaccaacggaccctggcgttcgatgccgcctcgaaattcttcatcagctaccagcactggaccttctacccggtaatgtgcatcgccaggataaatcttctcgcgcagtccgccctgttcgttctcacggagaagagggtgccgcagcggttgcttgagatcgcgggggtcgccacattctgggcttggtacccgttgctggtggcttccctgccgaattggtgggagagggtcgcgtttgtgcttttcagcttcaccatctgcgggattcagcacgtccaattctgcctgaaccacttctcgtccgacgtgtatgtcgggccacccaagggcaatgactggtttgagaagcagacggcaggcacgctcgacatcctgtgctctccttggatggattggttccacggtggcctgcagttccagattgagcaccatctgtttccccgcctacctcggtgccaccttcgcaaggttgcaccggccgtccgcgacctttgcaagaagcatgggctcacttattctgcagccacattctggggtgcaaatgtgcttacatggaagacactcagggctgctgcattgcaggccaggaccgctacaagtggtggtgctccgaagaatttggtatgggaggctgtgaacacccatggataaatgggatgaagatacgggctaatggcaacttctggtgttcagcttggtgcccatgtgattgtctggatgcctttcagttatttagagatattgatcattcaacctgcctgagtcaggttggaattttcgtgttgacaagtggctgtctatccagttggagagttcatgcttcaatagtctggttgttcacgggatgttctgttctccctatcacgggaatctagggcttccggatcgccc

SEQ ID NO: 19837 - DNA, 1208 bp, Zea Mays
gaaaaaaagaacaggaactctatgtccaatgtaaccctcgggaacaaaagagtgtcatgaatatcggctgaaacatatggctcaagtgtccaacctcatcttcactctcttcagttttatgtctgacccaaagaaaacattgcacctgactgcgttggatggtgctaaggataggctgcacttatttaaagctagcctgctagaagagggttctttcgatgctgcagttcatggatgcgacactgtatttcatactgcctctcccttttatcacaatgtcaaggatgctaaggcagagttacttgacccagcagttaagggaacactcaatgttctcggttcatgcaagaaagcttctattaaaaaggtggttgtaacatcatctatggctgctgtagcctacaacaggaggccaaggactcctgaggtcacagttgacgagacatggttttctgatccacaaatttgtgaaacaaatcagcaatggtatattttgtccaagacgctggcagaggaggctgcttggaagttctcaagggataatggacttgaaatcgttactataaacccagcgatggttattggtcccctgctgcagcctacactaaataccagtgctgaagcaatcctgaagttaatcaatgggtcatcgtctacatatcccaatttttgctttggatgggttaatgtcaaggatgttgccctggcccatatccttgcatacgaggttccctcatcaaatggaaggtactgcatggtggaaagagttgttcactactcagaactggtgaacattatccgcaacatgtatcctacccttcctcttccggacaagtgtgcagatgacaagccgtttgtcccaccctaccaagtatcaaaggagaagataaaaagcataggcatcgagttgattccactggagacgagcgtcaaggagaccatcgaaagcttgaaagagaaggggttcgctagtttttgactcgagcaagctgtgaaacataagtgttactgtactacgtgatgttgcattgtatacatgcatcggacttcgcagttcccaagctattttggtagctttggtctgtaagattacctaaaataaactgagccacgttgccacgctgtagcttttggacatgttatgctttgatcggattgagacacgtgatatatgatcgttgcttacaaatgtggtacgctctatctcc

SEQ ID NO: 19838 - DNA, 180 bp, Zea Mays
ctaccttgaaatccattccttttatagatacttctggcaaagtatcaaaatataatttacaaaaaaaatgcttagccctgcttataagcagatagagtttgttctttgcacttatgcctagctcaggtttatcctgaggaaggataacttctacctgcaagaatattttcattgggagca

SEQ ID NO: 19839 - DNA, 2798 bp, Zea Mays
ccggcccagcaaaagtactccatggttctggctaaattattttaatgtctttattatcagagattccagtaatgtgccttgcctcttttatgtgattgtacaaatcaatgaacggaactcatccctggacctccatgtccgggggtgcatgttctaaccttggatatgccagagacatgaatggtaatgttccaattagcactacaaattcctctggaccaagcattggagttagctcgttggtgactgacgccaactcgtcactttccggtggtgcccagttacagccaagtactagcatgaatggtgattcattgatgcgtgttcctgcatcaccaatgtcattttcatccaataacatctctggctcttcagtcattgatggttccatcatgcagcaaagtccaccccaagaacagatgcagaaaaggaggtcttcaagtgtaacatcacaacatgtgatcgatgctggtggtgcattgcatgctcagaagaaatcaaggactgatgttagtcagggtgatatcatgcaacatcagctgattcagcatctgatccatggtcagaattctcttcatttccaggggcaacagaacccacagcttcaagcttttatccagcagcataaactagcacaacttcagcaacggcagcagcagcatttgttgcaaccattttctcagatgcaacaaccccaagttggtattcctcggcagccgcaacttaggccgccattggcacagactggaatgcagttaggtggtcctgttaggactcctatcgagaggggtgtttgttctcgcaggatactgcagtatctatttcacaagcgtcatcgcccagagaataactctataacatactggaggaagattgttgaagagtactttgcacctcgagcaagagaaaggtggtgtgtctcttcttatgaaaacagagggaattcttcagctgctgctccacagaaagctctggatacatggcgatgtggcatttgcaatacacatgctgggaaaggatatgaagctacctatgaaatacttcctaggctctgccaaattagatttgaccatggtgttattgatgaatacttatactttgactcacccaacgaatttgggttgcctaatggacaaatggtgctggagcatgcaaaagttgttcaaaaaagtgtttatgaacatctacatgttatacacgagggacatctgagaatcattttcacaccagaactgaagataatatcgtgggaattttgttcaagacgtcatgaggaatacaccactcgttaataatcttctgcaagttgtccagaaataccaagctgttgtcactgaaagtggatcagccgggatatcaaataatgatgcacaaaccatctgcaacatgtttgtcactgcatcacaacaactggcaaaaaatctagagcatcacaccttaaatgaacatgggctctctaaaagatatgtacgctccctgcagatatcggaggtggtgaatcacatgaaggacttgattgagttcagccacaagaacggccttggtcctaaagagagcctgaacagctattctaaaaccatggcgaagtttcagaatatgcatgattcaagacagctcatggctgctgctaaccttgccaataaccagagcaacaccaaactaatggggaccaaagaagaagcaagtgcttctgcgaccaaccagactcctggtgtcggagccatcggcaataatgctcttcagcatgccacacctctaaacagctaccagaatatgctcagaagctccagtgcaaatccagtcttgctgcagcaggaggcatcgagtgtcttcaaaggtcctacagcaatgcacagtggcatacagctggaagcagccagatccttccgtggacctaaccaagtgcagttccaacaccctgcggcgattcagcagcagcagcctatgccgcagcagagcaatttccagggctttggtggtgttaacccacagtaccagcaccatgtgcttaatcagcttctgcaggaagttaagaacaataaccacgtgaaagcacagcaactgcctccagatgcacctaaagcgagcggcggtcttgcaccaggagttgctattcccaacgttgctgctgctggggagcagggacagcatatcaacagtaatacccgtgaccataacggcgcggtgaagggtgctgctccagctggtactggcccaagcaatgtgatcaacaacacagccagcatgccccccggcagaaacaacagcttcaagtcggtgagcagcagtccagctgctgctaccggtggcattgcggtgaactcgaaggtcgacgactccttccatcaactggaggacctcgacctcgacggcttgatcacaaacgaactgatggagagcgggttgttcggcgccggacaagggtggtgagcatgtcccaccacgcctcacactactatcgagttccttcaccgaaagcgccaagcaacaatataagctttgccacccttctctttctggagtttttgtgttgacagtttcagatgatcgtgccatatacaattatgtaaggtagcgagttggatttggcttgggagtcgggaacggcgcaatctatagagctgttagcgtgtgcgtatgacatgttgctgtggttatcattttcatgctatggaggagtgtcgattatagtctcctgttgtctggcacggcgtgagtgtgtgtttcccatggttctatgaaatcaaattatagaagaaacaagatctaatgtttaggaatcgattctctatggttca

SEQ ID NO: 19840 - DNA, 1588 bp, Zea Mays
gatcatatcatttttgctcaaatgttcctgcggaagagatacaaatccatgtctgagaacccttctcagacaattgtctgtagagtgaggaatccagcaatgtcgtctgcatcctggacagctggttcggcaggtgatacctggcaccagtcggttcgtgctgccgggagctccagtagaagccagctggtgcagagaacacacggtggttctccaagggcatctccagtgattgacctcaatgaggcctgtgagccgggttatgaggagatggaaatcgaagggcaacatggttacatgtctcctctaggcgtaaacaagtcaaagaggtaccctatggaaggtgctgctgccagcccaagccagatgagaatgcatgtgttctgggatgtccagaatccagcagggcgatctggaaagaggaagatctcatggcaggatcagttggccctgagagtataggtaaatgacaatgtttagctctagtacagcagtagtattctagtaggatcagtatgtgtcattgctagcctggtaaatgtaaagggatggctgggacaatctcgatggttatctgttcatgtttagtgatgctggaaacataggctgtctcacgatgaagtaaagtaggtgggcgtgtgtgtgatcaatcaccaaaatcttatggttcatactgttatggagtgctaatggttcaatgagagatgtagcttccaaggaagtaatctcctgttcatgtagagttggaaaaaatgtgtgcctgctctcttgacataaagttctagaaggaaacaatttttgcaatcttggtaaggtgttgtgaactatctgttgtcgttattgtacatatagccataatcaacgaacatcattatcacgtttaaatttatagaataaaataacttacttaaatttatagaataaaataacttaaataggaaggagagcaggtggcagagaaactgtaccttcagaaaagttggtggagcacttcagaaaagttggtggagcaggtcattagatgcttcagaaaatcgtgaaactgaagctataaatttttagaagacatttttcattttgataagtcattttgtttattatttagattaaaaatatttttaaaactgttgggggccttcggcttccgaaggtcctcaaaaacatgatttaacaatgtttttggagtataatgtgtgaacaggtatcttcggactcgaatcggtaccacagtgggagaagcccaaagaatacgaaggttgacacagcgccaaagctgtgagcaggaaagcttcggcgtgatagcagaaaaggaaaccgacttaaagatgaaaaggctgttcagacctcggtggattactatagaattactaccaaatgtaaagggcatggatgtaattttacatgagctatgtcccgtgcctataaataggtgaacagtgcccccgtactgttcacgcggactgggcatttacttttgcgtcacgcttgtgtttttaccttctttcaagccgaaggtacatttgtaatttaatatcatttctattttttcataataataatatagaaatgagttgataattatacataa

SEQ ID NO: 19841 - DNA, 1800 bp, Zea Mays
cccctacaccacaccacaagtccacaggccacaccgaatcgatctgcaccaacaccaaccgaacacatacatgcacaccaaaagcagtcgcagcatccgatattccgatcccggcaaaaacaattctcccagaaagagattatttcgccccctcaccaatcctgctcccgaaattcctaatcttttaatccgcgtttttcctccgtccgtcccccggcttgcagcagtaatgaagcggaggaggaaaaggagaaaacgaaaaagcgcagggaaaacaacacaccagcacccgcagagagcaggcacacatcaactcatcaagctgagcgatgcgtgtgattgcgagcatgtgagcaggcaggcgggcagggcgaaaatccgaggaggaaaagtccgcgagaatctccggactggcctccccacacatcgtcaaaaatccaatcttgacgcctccctggtcgagccgagactgttccaaagtttctgcctctgtgatgcgtgcgggattgttgccagttggttggttgccgctgctaatgaggcccgcccgcccgatccccgtggtcgccgtctccggttaatcccgcttcagttcttgtaccggttcttggagagagatttttttccgcctctccccccctgtggattgcgccgtgtgtgtttgtctggatcgtgatgggggcgtgggccgattcgccaccaccacaagcacgactcctcttttttattgcctccgcactgggatttgctttcgcgttgttgcagtagctatttccgcgaatcgtcttctagggctccgtgtgttctcgcgcactttaccctctgttttccccattcacccgcaccgaatccacccccttcccggtcgcgtccggccgtcgattgaggccgtgccgccgccgattacgccgcaaaatcgcgtcttgggtttggtgcatgaagaagtggggttgatttcgaggggaggtttttctcctgcttggctgccgtcgggaaggctccggccggccagtcatgtctcaaatccaaagcttctcgaggaacaactgtgcgctcctcgcggtgctgtgtgggaagtatgctgagaaccgcacaccagcagcgaggtctgggctggaggcgaagcggccgcggccggcttacccgttcccggagctcagctcggctgggcgattggaggtccacaccctgttcaatcctacaccagagcagttcctcgaggcgcagcgggtggtgcaacctaacttcttgtacatccagggccagcagctcgaggatgagaaggagattggctcacttgtatggggggacgccgatgtctctgatccgcaggcatttagcactcttatcagcccaccattcccaacaatagtatatctggaagttcctattggtgaaaaacttgctcaagcagttcactcaaaggggatcccatatgtaatatactggagaaattcattctcgtcttatgcagcatctcattttcgccatgcgttgatgtcagcaattcaaagcttgctcatgcatccttccgtctatattgtgtaagaaacaatcatgtgcaaagtgttaagcttggtccgcgtctccttggggatgctccaaaaataaatataagcccacctgagacagaaatggttgatgaagaaggttcatctgaagtgaccccggctataaaaatatatgatgaagaaatcaacatgaaattactcttatgtggagtgccatgcaccttggatccttgtttattgggctctttagaggacggtctgaatgcacttctgaatattgaagtatgaa

SEQ ID NO: 19842 - DNA, 2012 bp, Zea Mays
gcggggccacttgtgcgccactgccgttgccttctatccggcgccatctccaccgtccactgccccatccgcagttccacaccacactacgccgccgcagccaggcagacagaggcagccccctcatggctgcccacgccgtcaccccgctcaccatctgctgcctccgccgcggcgttcccctcaaccacagccgccgcctcctcgccgtagccgccgcagcgccagaatcgcccgcgcctacccccgcgccatcccagttgccgcttcccccggttcctcctcgcaagggctacttcccgaagcgtggcgagacagtcgtcctgctctgcgatggtccgccgcctccgccgtggcgcctttgccgaggccgccaagctcaggaccctcgagccacaccacgacgccatcgaggcgccctgccccctcgccgctgactgcggcggctgcaagacccagtctctcgcgtacgccgcgcagatccgccacaagcatcaccaggttcgcgacttgctcgtgaactttggcaagtttgatcccaagcgcctggagagctcggagccggatgatatcctcaaacccaccgtgcagtgtgacgagatattccggtacaggaacaaaatggagttctcgtttgggacgaagagatgggtgcaaaaagagttgaaggacaagggtgaggaggtggaggtgaagcaggaaacgaatgaaactgatggatatgcgcttggactgcacgcaccagggttcttcgacaaggtgctacatgtgcagaaatgttttctgcagagtgagccagcagataaggttcttgcagttgttcaagaaacctggatggatcctgccataggcctcacaccttatgatgtccataagcatgttgggtttctcaagcatctgatgataagaactggaagaaacatcagcactggaactccagaagtaatggtcaattttgtgacgtcatgttataagccagatgtattgatgcctcttgttgataaaatcacaaaaatacctgaagtggttagtgtcataaataatgtgaactcgtctgttggtaattcatctgtgggtgaacaagaatatactttgtacgggaagccaaacattacagaaatgttgagaggacttgcgttccagatatctgccaactccttttttcagactaatacaaaacaggctgatgttctttacaagcttattgaagattctgctgggcttaaaggagatggctctgaaattgttcttgatctgttttgtggaactggaaccattggtttgacctttgcccgaagggcaaagcacatttatggatatgaagttgtccctgaagccattgaagatgcgcgaaagaatgccaagttgaacggtatcaacaatgcaacatttgttcaaggggacctcaataaaatcaatgaatcattcgggaaggaatttccaaagcctgacataatcatctcagatcctaatcgccctgggatgcacatgaagttaatcaagtggctgttagaagttaaagctcctcgaatagtgtatgtctcatgtaatccagctacttgtgctcgggatttggactacctatgtcatggcgtggaggagaaagatttgagaggattctatgaactgaagagtgtaattcctgtggatatgtttcctcatactcctcatattgagtgtgtatgcttattggagctgcgttgattttcagttttggtcaggtaaacccactggagccttgtttgggtgacgagtattcacctcaatccatataaggcattgttcggcactctagtatttaatacatattgggatccaatacatggtgggattgagtgaatccatcccatgtcacttaaaccatgtgtgtttcaattacagctgagatttaatacatggctaattttccattgtttagttacaccacatggatacattaatttgttgcatgtatttaaaaacatcagtgtccatcatattaggtctctgaagcggatgaaatttgaagcatc

SEQ ID NO: 19843 - DNA, 462 bp, Zea Mays
atattaataagaagcaattacggcggttcaagtaggtttgtcccgtcgtttcattccggccggccgccgccacaccaaagcaaccatggccttttctgccgccctcgcctgggccgccacgcaactcctccgcgggagcctccctcctgcccgcttcgccgctgccgtctcgcctctcacatacagcagcagccgccaactctgcagtacccccatcgccaacgattcctccgccgcaggaccgtgggacgaggccgagacggagatcctccgcgacgtcgagcccatcgtgaatatcgtcaaggacatcatccactcccgcaggtataaaaatggtgaatttttaagcccagatgatgaaaaggttgtaagagaaaagcttctttctcatcatcctcgtgcagaagaaaagattggttgtgggcttgatggtataatgaaggacgcggtgaggacgaggag

SEQ ID NO: 19844 - DNA, 2190 bp, Zea Mays
ctcagagctcctctgtgttgcaatgtggacaacttaaaatcgaatctacttgagaagctggaagaatgtctcttgaatttccagaatgagactacacatgcttcaattggtgacatctcaaagacatttcgtgcttatttaataatatttcctgattcagaaaggcgtctcattgaacttgcacaagctttgttcttaaaccgatatgagacagtcagagagaatctgaagaaaagaattccatcaacagatctactggcaatgctacgatccttatgggaggatgcaaccatcatcgatgaggttatttcagaggctgcgctaccagctttttctttggagactactcgagacattgttaagcaacacatagcaactgcatttctccatcttcaaagtgaaatatcagaggcactggttaggacacattcaacatcaaatgagaagttggaagagtcacagctgcaaactgctatggagacaagcaaaatcaaagtatcccaaggatgcatagatctcctgcaggaatttcatcatctggtagatggcaatatagagttgcttgttaagctgagggatttgattattgattgggtacaagaaggttttcaagagtttttccagaaacttgatggacattttcatgtgctttctgggagaagcaaaacaaatttacaagagccaactatggattctatgcaaactgataagaccccaacagtcttggtacttatgcttgcacaactctgtgtttacattgaacaaacaacagtccctaaagttacagaggagttagcttctttttttggaggtggtgcacatagctacgaatatggaccaccttttgtgcctggagaaatatgtcggctatatcgatcatctggagagaaattcttgcaccattacataaatatgaagacccagaagatctccaaacttcttaacaagcgatttacaacaccagtttggattaagcacaaggaacctagggaagtgaacatgtttgttgatctacttctcctagagatcaatggtctggtatctgaagtcaagcagatcttacctggtatggttcggcgacatcggcattcagatagcactggtagcacgacttcctccagaagcaatccaatgcgagaagacatgttgaaccgatcaaacacacatcgtgctagaagtcagtttttagaaaatcacctggcaaagttatttgagcaaaaaatggaaatattcaccaaagttgaatacacacaggaatctgttatttctactgtcctcaagctctgcctgaaaagcttgcaagaatttgtccgtcttcagactttcaacagaagtggatttcagcagattcagctggatatggaatttctcaagacctctcttaaggaatttgtggatgatgaagcagccattagctttttactcaaagaggtgaacaatgctgcccatgagagatgtcttgacccaatccctcttgagccccccatattagataagctcataaatgcaaaactagcaaaaattaaagagagaaacccaaatatgcggtagctatgcacagattggtgtcgtttactagaattcagttctgtccatttgaatgcactattcagagttgtgtgtgcaacttcatagagtttagggcacatagcatggatgaaaatctggagtcagactcagatttgaataacactccccaaattgtatactggtatacttaatttggggtggtcgagctgttagcatccccttgcttgtcaggctaccgtcaagttgtcttctgtgcattgttttcttatcccaggtcaggtactggtctgaatttaatcaaatgagcatcgagctgttagaaaaccaaggcaccaactctaatagattcaccatctggaaagcgagggcagttatcatgccttgtgaagatggtttgttgggattgcgattccctttatgcgtcctgtttttttatttgtcatcttctgctgtatcatcctttctttgaactatattttcatgtggtacatgataccttttgttaccttcgccacagtactgctcacgaatagcattttgagccattttgctatgccttggaataaaacttttatcctcgatcctaggaatggataacctcttggattttcacatctgatattaaccattaaaatttggatgatggaatgtgtgttcgcg

SEQ ID NO: 19845 - DNA, 4880 bp, Zea Mays
cgcgcgcccgtgtcacaaagagagtgaagagagagcatggaaggctcacccgccgatgccgccggctccggccgccgcacgcgcacccggggcgcggaggcgtcggggcgtgccgccgtgctccaacaactccgcgccgttcgcagtggtcaaattcgtgcctccgacgccatccaggtgaaggttgacgccccgatttacgacaccgtcccggaggaggagtacaacgtgctcgtcgctcgccgccgcaaggaagcaggcgagttcatcatcgacgacgacgggctcggttacgtcgaggacggccgcgaggaggactggagccaccgcgctctcccttcctcctccgacgagggatctgaaggcgaggacggcgccccccgcaagcggaagcagacgcgccctccccaggcgaagcgccagccgcagcagtccgccaaggtggcctctctctccgccgctgccgcaaagacgggccagcagatctcctctatgttcacatcctcggtatttaagggacgcggcagcgaccgcgccaagaacttggcactggccgccgacagcatcgtggacgacgtcatcgccgagtttgcacctgacgagaacgaccgtgaggagaggcggcgacgggttgctagggtttgtgcgccgcagcctgtcccaacagtttcctacatcaagcctcaaaaggtaattctcgatgctgaaatggtcagatcggagaatgaaaatgatatggtggtggtggaattgaagaacgatactgagatggaaaccaatttggaagaaattcctggttctagtgctgaattggtggttaataagagtttggaggagccgaagcaggaggataatggggaagtaaagatagaaaaggcacaccgcctcaatgcaaagattaaggcggaggagtgcagaaataatgatgtgacgagtgcaacagaaggatggatgaagatatgtgggaatggggagaatgcagtaggtgaagaaggggtggctgttgatggtaacaccaatgtggatgaaagttcagagtttgagctgaaagatggagcactgcccttctacatactggatgcatacgaggaaccatttggtgctaattcaggcacagtgtatttgtttgggaaggttgaagttggcaagcaattccatagttgttgcgtcattgtaaaaaatattcaaagatgcatatatgctattccaaaccggtcagtgtttccaatggactccatatcagggatagaaagaaaccccactgctgaccttttgccatcacttcgagcaactctacatgagttggcatcaggattaaagagtgaaatagctgacaaattgtcagacctcaatgtgtcaaatttcataatgactccagtcaagaggaattatgcatttgagaggactgatctaccaaatggagagcagtatgtcctaaaaatcaattatccttacaaggatcctgctctaccagcagacctcaggggtgaacattttcatgcattgcttgggacaaacaatagtgctcttgaattgtttcttatcaaaaggaaggtcaagggaccttcatggctgtcggtttccaagtttgtgacacggccatccactcagcgggtcagctggtgtaaatttgaagttacagttgattgcccaaaggatatatctgttttgacaacaagtacaaatctagaagttcctactgttgtagttggagcagttaatctcaaaactatcataaatgagaaacacaatgtgcatgagattgtgtcggcatctctcatatgttgtcatcgggtgaagattgatagtccaatgcgtccagaagattggcagaaacggggaatgctcagccattttactgttgtgcgcaaacttgaaggtagcatatttcctataggtcttgctaaggaagcttctgataggaaccagaaggctggtagcaacgtgctagcactagaaagcagtgaacgtgcattattaaatcgcttgatgattgagctgagcaaacttgattgtgatgtacttgtgggacacaatatttcagggttcgacttggatgtgcttctacaccgtgctcagacatgcaaagtgccaagcagcatgtggtccaagattggtcgtctcaggcgatcattaatgcccaggcttaccaaaggaagcacactctatggttctggagcaagtccaggaattatgtcctgtgttgctggccgtcttctctgtgacacctatttatgctctcgtgaccttctgaaggaggtgagttattccttgacacaacttgcagaaacacagttaaaaaaggtcaggaaggaggtttctccacacgatatacctatgatgttccagtcttcaggcgaactgctcaaactggttgaatatggtgagacagatgcatggctttctttggagctcatgtttcatttgagtgttctcccactgacacgacaattaaccaacattagtggtaacctgtgggggaaaacactccagggtgctagggctcagagggtagaatatctactactgcattcattccatgcaagaaaatttattgcaccagataaatttgcacgcaacaaagagctgaactccacaaaaagaaaaatgaatcctgatactgggggtgcaaatgctgatgatggtgctgctgatccttccgttgatgatgaagtgcataatggtgatcaaagtaaagctagaaaaggaccttcatatgctggtggattagttttggagcctaagaagggtctatatgacaagtatgttctacttctcgacttcaacagcctttacccttcaataattcagttgctgaggagtttggtggagaggagaaggatggttaaatcatggttgaagactgcttctggtcttaaaaagcagcagttcgatattcagcaacaagcattgaaacttactgcaaatagcatgtatggttgcttgggcttttccaactccaggttttatgcaaagccacttgctgagctgattacactccaaggtagagagatattgcaaaacactgtagatctggttcagaacaatttaaatttggaggttatctatggtgatacagattctatcatgatacatactggacttgatgacatctccagggcaaaagcaattgcaggaaaggttattcaggaggtgaacaaaaagtaccgttgtctggagattgatcttgatggcatatacaagagaatgttacttcttaaaaagaagaaatatgctgctattaaagtagcactggatggcagcttacgagagaacattgaacgcaaggggctcgatatggtcagacgtgattggagtttgctgtcaaaagacattggagatttttgtcttaaacaaattctgtctggagggacatgtgatgatgttgttgagtcaatacatagttcacttgtccaggtgcaagagcaaatgagaagtggtcaaatagaactcgaaaaatatgttatcacaaagagcttaacaaaagcaccagaagattatccagatgctaaaaatcagcctcatgttcaggttgctttgagactcaagcaaaatggttactctggttgctcagctggtgacacagtaccttatataatttgctctcagcaggactcagataatgcacattctgtgggaatagctcagagagctagacatcccgaggagttaaaaagagaccctgacaagtggatgattgacattgactattatttatcacaacagattcatcctgtcgtttctcgtctgtgtgcttccattcagggcactagtccagctcgtctggctgaatgtctgggccttgattcggctaagttccaaccaagattgactgagtcgagcaaccaagatacatctatgatgctgttatctgtaatcgatgacgaagatgagagatatcgtggttgtgaaccactgcgtttgtcatgcccaagctgttctggtaccttcgactgcccccctgtatctagtctgattactagtgctagtgctacaagtgtatcagatccaattgaaggaaaggatgctactgctaatttctggcgccatatgcggtgcccaagatgcctagataatactgttgagtccaaattttccccttctatgctcgccaaccagatgaaaagacaggctgataatttcattagtctatattataaaggtttgcagatgtgtgacgatgagggttgcaaatactcgactcacagcgtaaaccttagagttatgggggattctgagagaggaactgtctgtcctaactacccacgctgcaacggtcgcctagtaagacagtacaaggagtcagatctgtacaggcaactatcatacttttgttatgtacttgatgcaacccggtgtcttgaaaagctggaccagaaggcaaggctccccttcgagagagagtttgtagcagtaggccaaacaattaaattggcactgctagagatccagaaaatccgagacagatgtgcatttggatgggttcagctaaaggaccttgccgtatcaatatgatgtttttcttgtgtgaaagggctcaattagataagtttgaattaaccgtgcaagaaattcatctctctgtaggttattctagatctcgttggtaaaaggaacaggacacggcaaacggtgtatcgaaacaccagccgtctttggtatttccctgcgtgacagaccttgtatcatctatacatgtgttttagccagtggctgtattgtacaactttatgttgtgtccgtctccataggcctcggtgcatgtgccaatgtagtcttgttaatataattatacgcagcgtgtgatgagaaaaaaaaaacaagacactagattactaatgtcgcgagttgcggtagatgggaaaaatatgggagggaca

SEQ ID NO: 19846 - DNA, 656 bp, Zea Mays
cgggattcccctccgccgcctacgcgcccaacacgcccccgtccagattcatccacccttccccttcgtctccctccctccatccaatccaccccctctcccccttctcgtcgtcgccgccgccgccgcccatccggggcttggactgtcctttccccgttctgctggactcctggcggtgtttatggtctctcctttccagagacatgctgtataaactgctagcttttctatgtaggactgcatctggttcaaactgctatactgctatgttagtatgtcactgagtttgtcgcccatgatgcttctatggtgtctgaggcgattcaagtttgttagctctaaagctgacaggacatcctcgtttactttgcctagtttccagacggtctatgatcaagtgcagaactgaaccggatcgtaaggagttgaacatgaacttgttaaaatctggcatatgtagatgcatggatcgcgaaatccctcgtgtaggtgcagtgtccctcttctgctatgtgcgagatctgagggaacctggattcatttattgtttgaatgtttcactgtttctgtcgcaagtaaataatttattgcatgggaagtttataactctagacctggtaaaattctgagtagcagcaattctacatcttacc

SEQ ID NO: 19847 - DNA, 1894 bp, Zea Mays
ctctctcctgcgtccatcctctctctctcatctcatctggttgggtggagtggagataagctagagagatactacttgtgtagcgggcgagggtgaggtgaggtgaggaagaaagagagccctcgccgcgtgcttaggccccccccaagacgccgagagaggaaagggattaggcagcaagaggaggcgctccgctctcggattagaggcgagcttcctatttccagcaaaggcaaggagaggatcagctagctagctgctaggaggccggagggagagaaagatcggaggaggagctgcaaaggctagcttttctttggtgcggctggtgctggtggtgaactggtctcggtgctcggtggtgcgtggtgtggtgcacactgcacactctccctctcgcgttcgtcttgatggtgggtggtggtggcagctgcctcgcatggctgggttctctctgaggggcggcggaggcgggaggggcggtgaccggggcggcgatcacccgatcggcgccgacagcctgttcctgtacgcgcgaggggcggccgccgcggctgccgacacggcggccagcggcggcggtgggggcggcgggatagggttccagctctggcacccgcaccagcaggcgacggcggcggcggtgccgcacacgtcgcagttcttctcctccggcgccgtcgccacgggcgtcgtgctcggcttctcctcgcatgacggggccggcgggatcggcggtgcgggtggcgccggcgctggcggcggcagggccgggaccagctgccaggactgcggcaacaacgccaagaaggactgcacccacatgcgctgccgcacctgctgccggagccgcggcttcagctgccccacgcacgtcaagagcacctgggtccccgccgccaagcgccgggagcgccagcagcagctcgccgcgctcttccgcggcgccgccaacagcaacagcgccgccgccgccgctgctgcggccgcgagcaagcgcccgcgggagctcgtccggtcacttggccgcttgccgtccgccaactccgccatggtcaccacgaccacctcctcaggcgacggcggcggcgggaggttcccgccggagctgagcgtggaggcggtgttccggtgcgtgcggatcgggccggtggacgagccagacgcggagctcgcgtaccagacggcggtgagcatcggcgggcacactttcaaggggatcctgcgtgaccacgggccggcggacgacgcggcggtgggccagctgccgccgtcctctgcggagtaccaccaccagctgacggcggggcaagcgagggaagggtcgtcgcccgcggggagcagcgaggcggcggccacggtggccacgtcggcggcggtgctgatggacccgtacccgacgccgatcggcgccttcgccgcaggcacccagttcttccctcataaccctagaacctagcttaagttagctagctttgctgcttccattattcgtatcggtgctagtagcttaattcctttgatggttccatttacttcttccaacaaattaaagatgatgatgaacatgagctaagtagtcatcgtcatcgtcgcaatcaaattcgagacaagaagagaagagattttaattgttactgcatactactactacaacgtgcattcgagccgttgatcgatgaacactagtgcatgatcagcaatgtgtggatcatatataatgttattagctagtagagctagtgtactgttacttgttgagcaatcttgttttgggtttcattaataatttggctaccttaatgcaatgcaaagataagaattttcaagtgtagcttccttcttcattcattccacaaatgatgggagctccatttgacatgcagtagtcctg

SEQ ID NO: 19848 - DNA, 58 bp, Zea Mays
caagaagataagaagcgacaacgggacggagttcaagaactctcaaattcaaggcttt

SEQ ID NO: 19849 - DNA, 2604 bp, Zea Mays
cctggcccctgtgctccccttgccaccgaacgagagccaaaagcctcccgccccacgacgcgcccgccccggcggcgacgccccggaggacgtttcccgcagcgaccggcgaccaagccttgattgcctccgccccatggctacccgggcgcgggcgtagccgccgcctcggccgcagcaggctcggtccgcccccctcggcgatttctgttccagtcgcatcgcgcgacagctcgtcgtccgattcggatccccgccaccgcggcggaacgaggcgtctccggtccccgagggtattcggggaatttgagactgataagtcgggatcctgtcgataatgcggggctacgtgtacgagaccaatggttaccaccaggaagtggaagatgagtacggagatgagtactatgatcaagatgagtatgaggaggaaggttcgggtgctggggatgggtatgctgaggaggaagagcctacagagggacaaaaggagatccttgaattgagagaaagattaaaagagcagattaggcgaaaggcaaaggctgctgctgcctgcacagctggtcgatcatcttcttcacaaatacctcaagccagggacaaccggtgatttctcgtcgagtgatagaagaaagaaaatcattgaaagaactgcatagcacggttgcaagggagccaaggccttctggagtacataaggatattccatcgtcctctaaagtgcaaagtagagtaaatggacatcagcataaacaaaagattgttaatcaggtaaagaagaaggctgaggcacttaaggataaccgggattattcatttctactctcggatgatgctgacctgtcatcctctccaaaggagaaacctgctgctagatcttccttgactcaaagggctgatcgtgaggtgacacaatcaacagtaaagaggaaggcaccaacaagtcaacctgcacgcttgtcaaatggatatggacctaagaacacaatgtcaactcaaaggcatgctgaaggtaaggtaaattccatgagaagggaggatttctcgaatacagaaagggttgtttcacgtgacaatgagaggatgtatgaaagggttgtttcacgtgacaatgagaggatgcatagtattgcaagaaatggatccaaccaggcaagtactagcaaaaccacaatccaaaagcatccaagcaggggtcccattgctaataagcaaccgtccaaggattcgaatgatgcaactctgaggaagagcagtgtagcctcaaagcaccatcccttagagattgacagaccaaaatcctcgcaaagtcagaggatgcagtcagctggtcagagaccacagcattcttcccatggtcagacgccacatcaatccatgcagcataggacgcagcagtcattgcagagtcggaggccacaacaaatgacacagggtcagaagccacaacagtctttgcagagtcaaaggactcaacagtccttgcagaatcgaaggccacagcagtcctcacatattcagaaatcgcaatcctcacaagcacacagaccacagtcattaagtaacaggtctcaggctttacaaggacaaaggcctctttcttcacagggtcaatatccggagcaaagaagagtacatgcaagtgacagagtcaaacaagctgaaaggcagattcggcctccttccaagtccatgccatcacggccagtctcttccaatggaattcgtgatgatcatgcaaaaaggaagcaagtggcaaaaagaagatttgatgaagatgatgaagaccccttagcaatgatcagaaatatgtttgggtatgatcctagtagatatgcaggcagagatgaagatgtcagtgacatggaagccgattttgctactatagaaatggaagagaaaaggagcgcgaggattgctaggcaggaggatgaagaacaacttcgcttgattgaggaagaagagagacgcgagcaggagagaaagaggcgaaagatggcacgaggccgatagtcgaatacactcctatttggatgttataatatactaccttcgttctcgaatatttgtcgtccgctggttcatttttgaactaaaccgtgacaaataaaaaagaacgcaggagtatctggcaggcctgattgcctgaatacgaagccccatggcggatcagacaggcacttctcttgcagtcctgtttacccttaccacgatgattatctggaggcaaatcaagggaaaacgacaggtgaccaacactgggcacgtgtaacagcagactgtagttgtagtggtttagttctcgaagctgacatggactatatttaagttctcgtcagattgtttggatagcagaaggtttccattgttgcagcgcctcaccagattgtttcttcatatgatatactgattctttcagtcaagcctatataaggatgcgtaatacaagtgcccctcttgtatatctttttcgggtgtaatagtgttgtaataaacgatgttcgaattttcggatatgattttgagctttgtcaggcgatcactgcaccacggtccacagagatgcgcttctggccgggagccaatcgaaggaagcgggaa

SEQ ID NO: 19850 - DNA, 4096 bp, Zea Mays
cagaaacctcgtccggcggcatcagcatttcctctcccacatttcgccccgccctacgcctacacgacggcgctgcggcaagcgccgaccaatccatggcagacgaggcggagtggaacgaggctgaggccgggatcgcggccccgggcgcgggcgtggctcctccagcgcccggaggcggcgaggaaaccaagaggaagagggggaggcccaaaggtagcctcgacacgtataagaggcggaggcggaggcggcgcaccggcgacctggtgtcggcggtgcccgcggctagcctcggggatatgggccactcatgtggctgcattcccgctcccccactccctcccccctgcactgtgtacactgtacgcgacggcggcgtggcaatcacccctcaatccatggaggacgaagcggagggggtcgaggctgagtccgggaatgcgggcgcggcctccgccgccagagacggcgaggaaaccaagcggaagaggggaagtcccgaaggtagcttgaatgagaggaacaaggacaggacgcctaagcccaaggccaaggggaggcggaggcggcgcaccgacgaccagaccttgtcggtgtccgcggtgagcctcggggatctagggctcggggtagcggcggggaccaggtcgatcagagagaggaggccggcgcccaatgcgttcttcgacgtgggcagcgacagcgatactgagcatgatgatgatgatgatgaggagcaaactacgattgatcaggccaatcacgagagtgctaaaacaggtgattctgtaaagaagggaggaagacccaggaaaatggaagcgggccaattgcatactaggacgcagatttccaatggtaaaagcaacggccatacaaatgggaatcctgctgggaagaagaggggaaggggaagacccaagaaactgacagtagaacaagcgattactaggtgccagttctccaatggtgaaacaaacaagagtggtgccgaggcagcaaggagcaaacagtcaaggaatcgtaggatttcacagaatgcaaagaagcggaaaagagatgaagggaaggagtctatgacaaaaaagttgaacaaacggagtaagatgttgactggggaaaatgccctcatgtgccaccagtgccagaggaaggacaaaccacgggttgtccggtgtcagtcatgcaaaaaaaagcgattctgtctgccatgcatagaacaatggtatcctaatttgccagaagatgaatttgctgtgaagtgcccatattgtcgcaagaactgtaattgcaaggcatgcctaaggatgaggggagttgaagagcctccaaaaaaggagatctctaaagaaaatgaaattcgctatgcttttcatattgtaaccatgctgcttccctggatgagagaactgcgacaagaacagttggaggagaaggaagtagaggctaatatacaaggagtttcaatgaatgagataaaagtggaacaagctgagtttgacctagatgatcgtgtatattgcgataggtgtaaaacatctattgttgattttcatagaagctgcaagcgttgtttctacgatctttgccttaattgctgcaaggagcttcgcaaaggtgagatcccaggaggagaagaggtggaatatgtgccacctgaacctaaaggtaggagttattcttttggcaagattcatctactgaaggatgctgatagaagtaagaactcctcaaatggcgagtcttacaacggcatgcctgctgttgggaactccaataatggtctgttgctctggaaagcaaaaagtaatggtagcataccttgtccaccaaaggaagtaggaggctgtggtagtacacttctggacctcaagtgtttgtttccagagaagatgtttgccgagctagaatatagagctgacaaagttctcaggagtgggacattagctaaagcaatggttagtagaagtgatcggtgcccttgcttcaatcaatcaggcaagataagaactgaaagcaaatcagtaagggaggctgcaagcaggaagggctcaagcgataacttcctatactgtccagttgctattggtattcaagatgatgacatagtgcattttcagatgcattgggcaaagggtgagccagttgttgtttctgatgtccttcagttaacctctggtctgagttgggagccaatggtaatgtggcgggcattgcgggaaagatccaaaggcaaagcagaagatgagcaatttgctgtttgggcgatagactgccttgattggtgtgaggtggaaattaacatacataggttcttttcgggatatacaacaggcagaactcatgctaggactcactggcctcagatgcttaagctaaaagactggcctccttctagttcctttgacaagcgattgccgcggcatggtgccgaatttattagcgcattgccatttcgtgagtatactgatccacgatatggcccgctaaatcttgcagccaagcttcctgctggtgtcttgaagccagatcttggacccaaaagttacattgcttatgggttctacaaagaattgggcaggggcgattctgtgaccaagcttcactgtgacatgtctgatgcagtaaatatcttaacacacacagctgaagtcacttgtcagactgatattggcttaattgaaaaaatccaaaaagacatgagagagcaagatctgcaggaactatatgggggtctaaattcccgctctgagctcaagttgtcaccagctccaactgaatgcagggatgaatctgttgatgaaggattgaagacctcatatagtagagaaggcaattgtgtaaatagagacaattataatggtttggacatcaatgcattaccacctgatgacgatggagatattgcaaaggataaagaatcatctcctggatcagagtggcaaagtgaactaggtcagagttcagatcacaacaatggggtcaacacaactgatgagatgtacaatggagctcattacatttcacacaatcaaaaaagcactggcaggaaagttggcattaaacctcaagaagagaaatctgaaaaggctgattgcagtggcacatgtgcttatctaaaaggaagttctgaagataatccggaaatgcctattgtggagagctcagaggagcagagcaccggtggtgctctatgggatatcttccgcagacaggattctgataaattgcaagattatcttaggaagcattgctctgaattccggcatatttactgcaatccagtcaaaaaggtattccacccaattcatgatcagtccttttacttaactgaggagcataagagaaagctcaaggaagaatatggtattgaaccctggacgtttgaacagaagcttggtgaagctgttttcattcctgctggatgtcctcaccaagtgagaaatttgaagtcctgcatcaaagttgcgcttgattttgtttccccagaaaatgttggtgagtgtgttaagctgacggaggagtttagacgacttccatctttccacaaggctaaagaagacaaactagaatcaagaagatggctgttcatgccctgaacgaagctgtaaacttcctggatcctcgttcctcagaagagttgaaaattggggttggtgagaacatctgtgaggatgaatctgtagatgagaaggagctgccgcctagaagaggagttgaagtgtcaggcgttgatgagaagcctaaatagaaggcgagggaggcatcaagtccaaaagtgaagctgctgatgaggtcgcccattttaggttctcggaatcgtggttaattgatttgtcaaagcccctgttcatgtatggtgatcgctggctgacaccgatggatgaagagaagcaggacacgtgtgtgctgctgatatgtcgtgtcggcgagtgacatgaatatcatccctatccctatggtattattggtcgtttatgtttatgtttgatcatttgtcttattcagttttttttacaaataataaaacaagaggttaaaagtaaatgacgtcatttatttaattttaagacggggcagatgcaaaactgaa

SEQ ID NO: 19851 - DNA, 950 bp, Zea Mays
atccagtacaagacaacgagatgattcctacgcctcagttcagctgattaaatcaaacttatttcattcacagaagtccagagcgcattgttcacctgttattctataagctgattacattgttttcaaatggattaggggtcagcaaagaatttgccgccttcatgcacttcgacgttacctccaggaacgtgctttttcccccagaacgaggtgaaacagatacagacacctctgttcatcctcaacgcagcatatgattcatggcaggtaaggaacattttggtgccaggagtagctgaccctcatggaaaatggcatagctgtaagcatgatatagaccagtgctctgcatcgcagctacgggattcaggggtgattttctgaaggaagtggcagaactagggaactccgactcgagagggttgttcataaactcatgcttcgtgcactgccagtctgagatacaggagctatggttctcatctgactcccccgtgctcggaaacacaacagtagcaaacgctgttggcgactggttcttcgaccgcagctccttccagaagatagactgcccatacccttgtgactcgacctgtcacaatcggatctacgatgactcatcacaagcatagcaattacagtggcctcacttcgtactgccattcaccatgttattacatttgacgcttccagcattgctaacagtagggcaatgcgttgatagccattgattttttttttctttttacgaataagatcaggtgccggcggctttaactcggttgctaccggaaagtgagcgtgcatcttccgacggtacatggcatggtttatctggatggatgaatcgataatcataaattcttaaaaacacaataaatattctagaatttttatgttgtgcaaccgtgacttattttctctttgtattagtcatctatttatat

SEQ ID NO: 19852 - DNA, 269 bp, Zea Mays
aatcattgctaatctagggctggattggtgtaaaaaacaagacctaaactgtcgtcgcctgtttctagcccctaaaataagttaccaggtcttacagaaggtttgcgcatggctcaggatttctctggaaaaggcgaaactgaaaaaggaaaatcatgattgaagcttgccaggtccacaacgtgacatgatagatgaagcaacaatacaatgaaaagaacacaatgaaaagggtattgtaagaaataacttgtttcaaaaaggaacat

SEQ ID NO: 19853 - DNA, 2950 bp, Zea Mays
caacagctgatcgatgaaaggattgaagatcaagagtgaagttacgctgtcccgcagatcccaacaaattgctgtggtaaatttactgccgagagcacttcttatcaatagaattggaagaactatttttctatctgaatatcatgatgagactgaagagcccttacaaccatatgaacctccaaaagtatttcaatggcgatcagaatttggaagtgaacttttaaagttgaggttggagggataccaatggagtacaccttttagtatcaatgctaatggagttatgtgtgtgctcatgaacagcacaacaggaaatgatcaggcttttgtcagggtaaatgtgagaagtggaacaaaaagttcacggcatgaagttgtatttcagcttgattgctggtccagcccatacagggtggagaatcgctccatgttcttgcctatacggtttcggcagtttggtggtgatgatcattcatggcgtaatctgcttccgaattcatcagcttccttctttttggaggacctgagcagaaggcatctattggaagttttggttgatggaactgaccctatgaactccatgacatatgacatcaatgtcgtaatggatcatcagccccttactaattcagatgcccttaagaaggccttacgtgtcactgtcttgaaggaggggaaattgaatgttattcaaattattgattggctgccagataatagaaatcgaggacagataactgaaaggatgttatcaccaatctttcagccatcagaggtcgactatgggcagtcatctcctgatctggatagtgaatttcatgttactttggaactaacggagcttggcatttctgtaattgaccatatgcctgaggaagttctttacctctcagtgcagcaactgttacttgcatactcatctggaattggctctggagtaaatcggctcaaaatgcggatgcattggattcaagttgataatcaattaccatttgttcctatgcctgtacttttctgtcctcaaaagattgaaaatcagtcagactatattttcaagttctctatgacagttcagaccaacaattctcttgatttttgtgtctatccttatgtcggtgtccaggttcctgagaattgtgtgttctttgttaacatccatgaaccaatcatttggcgcctccatgagatgattcaacacctaaaattcgataggatatatagcaatcaaccttcagctgtttcagtggaccccatactgaaaattgggcttctgaacatctccgagatccgatttagagtgtcaatggcaatgtccccaagccaaaggccaaggggagtatttgggttctggtcgtcgttgatgactgcattgggaaacatggagcatatgccggtccgtatagctcaaagataccgggaggaattgtgcatgcggcaaagtgcacttatgaactctgctatatctaacattcaaaaggatcttcttagccaacctcttcagctactttccggtgttgatattcttggtaatgcgagtagcgctctgagtaacatgagcaaggggatagctgcattgtctatggacaagaaattcattcagggccggatgagacaggatagcaaaggtgtggaagactttggggatgtcataagagatggaggtggtgctcttgcaaaaggcatcttcagaggtgtcacaggcatattgacaaagcccatcgagggtgcaaaatcttctggtgttgaaggttttgtgcaaggagttggaaagggtataattggcgcagctgcacaaccagttagcggagttcttgatcttttatcaaaaactactgaaggtgccaatgcggtaaaaatgaaaatatcatcagcgataatggctgaggagcagttgctgcgtaggcgtcttcctcgagctattggtgggaatagtttgctctatccttatgacggacacaaagctactggccaggctatcttgcatctagctgaatgtgctacattccttggtcaaattgatatttttaaaatccgaggaaagtttgcttctaccgatgcttatgaggatcattttttacttcctaaggggaagatttttttaatcactcacagaagagtactattgcttcagttaccaatgatgacccagcgtaagttcaatcctacgaaggatccttgttcagtaatatgggatgtattatgggatgatttggtaacagtggagatgacccatgggaaaaaagatcctccagattcctggccttctaagcttattttatacttgaaagctaaaccttcaaattcgaaggaaattgttcgtttggtcaagtgtaatcgaggttcagatcaagcatctatcatttactcggcaattgacaaagcttataaagcttacggtccaaactcgttgaaggaattcttgagatggaaggtaccaaggccatatgcccctcgcaatagtagtggccgaagtatccaagacttatcatttggttaaaaggtattttaggttgacacttttggttaccaggcaaatgatatattctacatatacactatagatctctatgatcataccttgctcattaaaagcatttactattcttgtgatggggagatccatgtccgagttttggccaaaccactacagatctggtttccttcggcatatacaatcacattcaatatggattttttgacggaccggttcttcgcgaagagtttatcacttcactactacaccgtgtctcttatagatgtatttatgatcggtttcaggattatgtcatgcagtttattaattgtttttcatttttagaaaactaaactagtgtctcagggttgtacatggcttaagtccctttgaatataataatagtatgcgacaatgcaaagttggtaagatgggagttcaattcatttggtgatgcaaccactactgttagac

SEQ ID NO: 19854 - DNA, 2129 bp, Zea Mays
cctaattctaaaggaaacaaacattcctaacacagcctttaacccagctcgccgcccgcccctcgcggtaatgcggcgcctccactttgcgatgcccgcgtcctcgctcccctccccatcctcctcatctaccgtgctctccattccccacccgctcccaccgccgctcgcagatgccgcccaaggtggtcgccgtcgccgcgggcgaggcccacacactcgccctcacgggtgacgggcaggtgtactcctggggcagggggccgttcggtcgcctcgggaacggccgcgaggacgacaagctggtccccaccgcggtggcgcccgcggtctctgccagcgggacaccgcggcccaggttcgtcgccgtcgcggctggtgcctaccacagccttgcgctggacgatgaaggttcactctggtcatggggttacaatctctatggtcaacttggctatggggaccagaattccctttttccatgtttcgttgagcaatttcaggatttaggttctcctgaaacactgaatgatgaagaccagaacacacgtggtcgcacttgtttgaagctgtcttctgtcacagctggtggcatgatgtcgcttgccatagacagtttggggagcctttggatgtgggggagttgcccacagcagactgatgccggagagttttgtatttcaagtagctctatcccactacctgtgtgggatttccatggacacaccgttgttaaggttgcctgtggtaacgagcatgtagtagctgcagttagtgctggggagacctatactggaggtgaccttgtttgttacgcttggggaaataacaaccatggtcagttgggtctaggtgacaaggaaagtagatctcgtcctgtgcttatttcagcatttagtgaaggatcttcctgggaggtgtatgaaattgcatgcggagcttcccatactgcagtcctcgccaataagaagtccactgaccagatagaatctcggtgctggacatttggccttggtgacaaggggcagcttggccatggaaccacagccaccatttgctcaccacaacctgtcgatggattaccaaccggatccttccttatttctcttgactgtggattgttccacacaaccgtagtctcctctgatggagaggtgtggtgctggggaatggagagaggtcttggattgtgcccagatgctagcttttcgggagttgatgaaggggatgctttatatccaataagagttcagtctcctgagaccaatgggttcaagtttcttggtccagtgcagatcgcctgtggagctgcccacactgttcttgttgctggtgatgggtataggatgtgggcatggggcagaggccgcagtggtgtgcttgggagaggccagactgctgacagttacataccatgcgttgtgatgtggcctcctcttgatgagaactttcatgaggaccaaatgggaggatcaacatcaagagtgaatgatcacactagcactgagttggaacagaagctatctgctgcctcggaggagttacaattccttaggtcaaaactgacactcatggagagatatgccaatatacttcacatctcaatcttccgtaagccacttgatgaacgggcgctaccacgttcacttcaggaatcttccgtctttgatatcagaaaggaatttgagaacattttggatgcagcagatactgatgaacttaatcgtttagagatcttctaccgcagcatgctttctggcgttaaagacaagcttctgaagagaagagtacgagaaatggtccaacaatgcattatttcactcagcagggaggccaaaccctaaagataagtgaattggattattacacttgttaccggactgcaagtgggtacagtatcacctttggtctcactaaaattgcaaaaaaaaaaggtcaacccagtgtcttatctgtttcttcaaacatagtgagtagatctgtcctggcatcaagatcatcacctggccgaccattgcacgaagacagcattactcatactgacatctttttgtgcctctactactgacgggagggaaagggagcggatctggtgattcgtggtaacatagttctcaacacgttatcag

SEQ ID NO: 19855 - DNA, 986 bp, Zea Mays
gtaagttcctcgtggttctggtggttcacgtgagtacatgggaagaggacctccaccaggaacaggtcgttgttttaactgtggaatggatggtcactgggcaagggactgcaaggctggtgactggaagaacaaatgctaccgctgtggtgaatcgggccatatagagagaaattgccagaacagtccaaggaatctcaggcgtgataaaagctattcacggtctccatccccacgtggtggacgtggccgcagccggagctacagcagaagccggagctatagccgatccagatccccatctggatctcccaggggtggacgccgtgaacgtgacgagaggagatctaggagtcttagctacagcaggagcgcaagccccaggcgttctgtctcacctgcaaaggaaaaggagcgcagtcgcacacccaatggcagtaggagcccaaggagccccagcccaagggctgaggtgagcccaccactgaaggataatggtgcacgcaatggctcagaccatgaaggcaaccctggtggtggagagaacagcaagaggagtcggagcccatctgatggctaccgtagccctgtggccaatgggcgcagcccgagcccgagggacgatcggagcccaagccccaagggcaacaacgaagatgacgagcgccgtggttcacctagaggaagtcagtcccccctgaactgagaaattctgatcaaatttgggccgcacgattcggttgtaactgttatattttagtttgagacaacaaactgtatttgctcatttctcatacagtcaggtttatgctttttgagctagaaaacatgtgtaagaatttgttaccttcaagctattcctggtttgtgatatggtaatacttgaactatttagcttgccaaatctgaatacttttaactatcaagtatcttgagttagtttgtctgttttgctaagctgcagcatttctcactaacgctttcgg

SEQ ID NO: 19856 - DNA, 560 bp, Zea Mays
atgacgaaaaacgtctgcacagaaaaagagatggggcaaggtcaaggaagcaaatatgcagggatcattgtcactgccacatgcacctccgtggcaagtgtcctttggctttggcatcaatcaaatagacaagaggccacctctaccaccgccatccgcagtccatacagtgacccccacgaggtcaagaacctgtacgaggagaggaaagaacctggaagagaggagcttgaggagatggcgagcgccgagggcgagaggtgggtgggactggcgacggacttctcgcaggggagccgagaggcgctgcagtgggcggcgaccaacctgctccgcgccggcgaccacctgctgctgctgcacgtcatcaaggagcccgactacgagcagagcgaggccatcctctgggaatccaccggctccccgttgattcccctctcggagttctctgaccctattatcgcgaagaaatatggagcaaaacccgacatggaaaccttggacctcctgaacactacagctacccagaaggaagtttttgaatttcttttgacaaacag

SEQ ID NO: 19857 - DNA, 144 bp, Zea Mays
gccaagtgatcatcatctaacaacactgacttagtgttatcccaggcaagccccggtgcatttgccacccccttgttgttataaaacttttatcacttatatgttgcattaggtgataggagttgtgtgaataaacagttgatg

SEQ ID NO: 19858 - DNA, 3689 bp, Zea Mays
gggaaccgtacgagcatgagatacgttgccaaatccaaaacccaggctcccacgctgccatttcgcacaaaaactccggaggttcattctcccgccagttcccgcatctctttgaggcttccacctcaccgtcatcggcgcgcccgcatcccgctgccctccgatgacgccatcctacaactctggccccgcaggccccgccgggggtcgtagggcggcgaccttcgccggcgcttgtgtgtttctgtcgcggaatctggttgcccccgaggtgttcgacgccgtgcacgacgcgctccgcctcaacggtgccgaggtcctcctttgcgccgaccctagccgcacgggacccctcgacttccacgtcatctcatcctcctcccacgagagattcgccgatatgcggtccaaaggcttgaatttgctaggaccacagtgcattctttcctgtgctaaagaacgtcgctttctacctaaacaaagttatacgtgttgtcttgcaatggatggggttaaaacactttgttcaggctttgaaaagtctgagaaggttaggattgaagaactagtaacagccatgggaggtcatttgctaactaaacactctatggacgtgaattttgtaatcgtgaaggatgtcttggctgccaaatataaatgggctctgaatactttgaagaagcccattgtcaccatgaagtggttagagcaatgctggattgagcatcgtgttgtgcctcatgaaccttacaggattcttccctttactgggttgaatatctgtgtcactaaactggatccagatgaacggaagaagttggagaaaatagtagtgcggaatggtggccagttttctgcctgtctcacacggaagtgcacccatttagtagcaaataaacctggaggtgacaaatatgtcatggcccaaaaatggggtaatatttacattgtgaatccaaaatgggttgaccaatctgttgctcgaagagcttgtcaagatgaaaatagctacctcgtttgtcagacttcatctgcctttagtggttcaaagagttcccataaggagcaacaaaatccggagatcagtagtgcaagtgcaagctttcaacctgttccagcaacatcagttgatgattcagtatcaatgtcacaacatttgcctgcttcatttggtgatgcttcacggatcagcagcactgatattgttggtgcacctagtgtccaagagacagatgacatgcaggttgatagtcatattgctgaggactcagagccagaaaacgatgatctatatttatcaaattgtcgaatttctctggtgggttttgaagagaaagagttgttaaggcttgtcatgctgatacgtaatggaggtggatcccggcatattttgctaagtgagaagcttactcatattgttattggtacaccttcagatgaggaaaaaaaggaggtaagacgtctggctgcatggggtgtaataaatatagtgaaagtaacatggttagaagactgcaataaagcaaaaaaagaagtgaaagtatcctcaatgcatatagctactgagctcctcttgaagggattttctcaagtaagcatggaaaattctgctgatacacgtgaaactaaggtagccaaaagctcaggtgggatttttcatgttccaactgtcaatgacttgcatgaaaaacaccatgaaaaaggtgtgtcatctgaaaggaaaccaaaaagaggcaaacatgaaaacagtataagtaaaacccgatcagcagccaggactgaaaaatcaagtcaacagaatggattggccaatgttagcgagtaccagctccaatataaagtaacatcgataatgaattctggaagtagcagatcaaatatattcaaagggagaacattcagtttctcaaattcattttctcatgacaagagacctgaggttgttgattgggtcagagatggtggaggcgttatggtggatgacatacactcaactgctgcagatttcataattgagtgccacggacaaaacagcttgccttgtgacttctctcattcacttgtttcaactcaatggatacgatcatgtttggaggagaactgcttacaagatgttgggagtcatcctatcttctctcctttgcgctgtcgcatcccattcccaggatttgaaagctttcgtttctgtatttcactttcacaatatggagagaaagaaagacatctgctgaagaacttgtgctttctactgggagctaagtttacagacaaagcatataagggagtaacccatctcatctgcaaatttgcaagtggtcttaaatatgaggtttactccaaaagaggaactcccaccattacttctgagtggctctatgagtgtgtaaaacaggataaacttctccctgttgatcactttcagccaaaaccacttacatcacaggataaagatgcttatccgtgcactgccagccaatattccacacaggctaccagatttgattcctctgagctgcttagtggttgtcaagtaacaaaaaacaatgcaacacacaattctgtcaatgaagaaacaactatgcctgctgttagtagaaagagaagaatatctgttcctggtaaggttaacggtatttgtggaaacatcgaaaaaactgagaaacaactcgacaatagctctgtccctgatgtcgcagatgccatagaggttctatcatccaagatatttcaacctgacaattctgttgttcaagagcagaaagatacacactcctttgacatttcaaggagctggctgaacatgcaacagaagcaagatagcacctctgtcacaaaggttcaaaacttaaactctgtaccagtcccctccccagctcctactacttactaccctttcagtgagacgcagacagaatctcaggtcgttggatacgaagaagatttaacaggcaggcagaagatcatagacagggttcggtctcagagcattaatgtgactccgtcgagtgagattctttagttgtggaggcgaaccataacttctcccagatctgactgtcaaattgcgatagggaagatgtgttatgaaatctgcttgttgtgccatgtcggcttcaaattaagcagcatgaatggagtctacgaatgtggagtcgtattcctagccagatgacccgcgcagcataaatcaagaagatttccattgcatggcattcgatgaacggaacctcgcgctattacatcgtgatcttgtggatgtaaccacccttgtttgtagaactgacagacactaaacgcctgtgatccgtttggtcctgtacattaacaatcttgtacactatacaagagcaggtaaaggagttatatatatatatatatatatatatatatatgggtatgaacagatgtaacagttcatttttgatttaatgctcaattagtcgaggtagctggtgtagcactatgaaaatcattaaataaaataatgaatttagttaataatgatattaatagtaatgaattttcttttaagcgtgtgtcatttatttgcctttggaatgattttttggatgctcatgattgattttggtcatttaatagcatttcgttttaaataaaaatcctagtaaataatatatataataatattagtccaagaattaatatcttatttataaataattttagtt

SEQ ID NO: 19859 - DNA, 663 bp, Zea Mays
ggcacatcactactctactagctaattacctccgtttcggcgccgcatccagccccggcccacaacatatgcccgcgcgcgaccacgcggcaggtctcgctccccgtctaccaactcggtcgcttcgcttcagcggctcgtcgttgctatcacttcgtcgccgcgggtcgatagcaaagcttggcccgcttgcgcatcgcggctgccggacccggacgcacgcggccgcctggaggcgggcggctcccttccggcttccgcggcgcctgaggagctggtggagaagatgatggagcaggcaagggagaatgtgagcgccaagaaggtcggtcccggactgcgccggtggggcagcgccatgtggtgaacttgtgacgagtgagactcgcgttgtgcagttccagttcgattggcgcttgcttgcttgcttccatggaaagtgctgtacctgtcggtaccagaaccattggtaacagtacgcgatgtgattgacgcatacgtctctgagggactaatagatatatgggcaagagcttccgcgttggcctgctattgttcataagccttgggttgtacaaacaataaaccagctgtctttaagatagcaactcaacacaaagctatgtgttttcgtccatgtttatttgacatgggccatactga

SEQ ID NO: 19860 - DNA, 1245 bp, Zea Mays
aggtcggtcagcagtcagcacgtctccgtccccgacgatgccggggagcaatgccaatggagggcgcagcctgtacggacacggccgaccggccatcttcatccccctctccttgccgccctcggttccggactctgctcccctgccccatacccccaccgctcctcacgcctcgcctgactgccaaggcaatcccggaagctcctcccgcgcgcgaacatgatttggcctgcaacaacgcagaggaggtgatcttatgtaactacaaaagatagtaatggggatatccaaggtgacaggcattgccgcgacagcttttcttgtcacatctgttagtctgtgccagttgggaatgaggattattatgcttccattcctagccaccggtattgttgcttccattgtcacggttgcatcgcatgatgccatcaacctaccgtggatcttggggaagaactcggttggaagatttcctctttggtcgattatactgtttggtcctttcttgacgcttgctcggacatatgcgatggttaagagatacatgaggaaggaggccgtgtatgacaagatcgtggaaggcctatatctcggaggatggccgtttctcttgaaacatttgccccctggaaacccatctgtcatagattgcacttgtgagcttccaagaagttcattcgttccagcaaacgagtatctttgccttgcaacttgggataccagagctccaacaccgcaccagatcgaaaaggctgcacgttgggcttgtgaaaagagatctgaggggaagccagtttatgtccattgcgcatttggtcatggaagaagtgcctgtgttgtgtgtgcaattctagtagcgctgggtactgctgagaactggaaagatgctgagaacatcatccgtgaaagaagaaagataaaaatgaacgcccttcaccgtaaaaccttggaagagtggtccaaacaacgagttcgtcagaaaaaggataagtagttgtttgaccagatgcatggggttgccctgaatatggtgttattgctgcaccaatttatttcaatccaatattccatagctcatctgtatagttgagtggaatgaggaatatcatagggagcccagatcgtgtgtaggatctatctacggagtacctatgacactgtcatagtaacatattgatttgagattctagatttggtgagaacccataacctgtatcacaaagccttcaaggttggccagtttgc

SEQ ID NO: 19861 - DNA, 898 bp, Zea Mays
gtatctgagctgtttttagacacaagtggtgtttgctgaaacagttttttgaggtctaaactaacggaagagaaaagggaaaatcaaaatctgtatcttttgctctatcggatgcttctggggtagctacccctatagataccaattctgagatgggtaacatcggcgattcctgtagtgacaaattgactgatgaaaatttaagtaactcatctcggcatatcgctgaaaagcattctattaccaaggaccaatattcaaatggtcaggaccatgagcgggagccactagatcatgctgttcaacagcaaccaaaatcggatgttggagaaagagcatcatcaatgaaacgacgctgcaggaaaaaggtgcaaaaagttgggacacctaatcacactgttgatgattattttggtgaagactgtgttgaaccttcattagctgaagaagataacaatactggtgatgattacactactggtaataaccataaggctaggaaaaagtcaaggggtggtgtagaagagtcacagcagcagaaagttcaaaaaaataaaagcaaggtgtcttcacggggccgcaaaagaaccttgaaggatgaaacggcagagaagcctgagaagaagctaacccacaggatacgtcagaggataacaaaagaggttaaggctttactggaaacacctcgtgagcagataaaacccatgaagctaagcgcatcacatctcaggttgttacaagaagctagagagcgtgttaatccaaaagggattccatccgggccatcttctaatacaaggtatacttctttttttcttctatttctctatgcatgttattatctaaccaaattagacttgggacttttggttgggcataaatgaacatattggaccag

SEQ ID NO: 19862 - DNA, 1410 bp, Zea Mays
agcatctgatgtgctatgtgacaagtgggtaccacagaagctaaaagttaatgtaagcgctggagatgttgcttctctcatatatttgtggaacccttgggcaatagtcacttgtgtgggatcatgtacatcaccaatcgagaatctaatggttgtaataatgatctacggatcctgttcacgtctggctcctcttgctgcttttggatatgttatggccacacacctctctctttatcctgcaattctcatagtaccggtcattctgttgctgggttatggtctagatgctcctcctccaaaagtatttgttataaaagggtcaattgccagaaaaagtgatgtgtcagacaatgataaaacaagcagacagagagttgttcagcagttttcatggaaaccagtacttcactttatattttggctgttcatctggtcgtgccatgtgttgttattgagcagcgtgattttgaagaaagttggtggcctccacgagatgtttgaaaagacgtatggttttatacttacagtgaaagacctatcaccaaatattggtgttttgtggtacttctttgctgaagttttcgacttctttagaaatttctttcttatggtattcaatatgaacatcatttttatggtcttaccattggccatccgattgaaacatcgtccgtgctttcttgcatttgtttacacggcaattgtggcaatattgaaatcttatccatcggctggagattcagccctgtatcttggtcttctgggcttatttgtcaacgaattagcagaaatgcagttcacattcttcttgttttttggatatattggagtctccctacttagccctgtcatgcataatctgtggatctggaggggcactggtaatgcaaatttctacttcgccactggtttggcttatacttgccttcagactgtgttgctggtagagagtgtaagttcaatgataaagcacgacagaaagttaaggctacttgttacaagctaatttggtcctcataatcagaagctcaagtggtggacagctccgatgcttgcaattccctacatggtgctcttgattcttgaacacaaacagctcctcatcttggagttcgtagatgtaggtcatattcgatgtagcatgttgtactgtagaccccacacttgtacaatactaggaccgcaactctttcaacaaagacaaggaacacggtagggctcgtccttggtgactagtacgtagttgtgttcgctaccgagaattgttgtggatcctggctgtgatgttcagtgatccagcttggttgaactgccctcacgtacatttaattccgtcagtctgatggatcaacaaggaaaccaacatttgaacgtttaaccaaactgatatctaattttcgtttcttc

SEQ ID NO: 19863 - DNA, 2388 bp, Zea Mays
ttcaggattcatggattgtttgaaaagtgtactcaagatcatgactcgagaatggaagttttgcaaaataaaattcgcgaaaaagtgctctctgattcgaagtggaggcagctgcaacaagattcaaataaatctctggaagttgattctaccattggtgattctcctcgagttgatcagttgtcaacaaactttatggctgaggaagctgatagtttaagggccacctacattcgtaggctaacttctgtactgatccagcatgttccagctttctggagattagctttatctgttttcagtggaaaatttgccaaggcagcttctggtaacgtagtttctgattttgatgtgaatgcaaagccgactgcaaataagaatgatgaaaaaggtggagaagtaaagtacacaaaccacactcttgatgaagttggtagtatggttcaggctactatatcggcttttgacactaaggttcagagtaccttccgtgattttgaggaatgcaacattctttgtccatacatgagtgacactataaaagaaatagctaaggcctgtcagactcttgaagggaaggattcgtctccaactgctgtaaaaatgttgcgcacacttcattttgaaatgacaaagctttacattctacggctttgttcatggatgcgggcaacaacaaaggagatatcaaaagatgagacttgggttactttatccacccttgagagaaacaagtcccagtatgcgatttcatgcttgcccctggagttccgtgacataacagtttcagctatggaccgaattgatactatgattcttaatctgatgagcgagactgcgaagtcatatgacatttctcaaccacttcaggaaatcaatgagtctgttagacttgcatttttgaattcctttctggactttgctggttatctggagaggtttggaggtgaactaaccgagaacagaccaaacaaagaaaacaattatgtctcaaatggatacataaatggtactagagaaacatttgttaacacagatggagatttgcacaaaaagctgctggttgttttgagtaacattgggtattgtaaagctgaactttcagaagaactttacagcaaatatagacacatttggtctccagtcaggaataatgaggagcgaagttctgacatgcgagacctgaggacttctttctctgcacttgaagagaaagtcctggaccaatatacttttgcaaagtcaaacttgatcagaagtgctgcacaaagttatcttttggattctgggatttattggggagcagcgccaatggtaaagggcattcgagatgcaactcttgacttactgcacatccttgtagcagtacatgcagaggtatactctggcgctcggcctctgttggagaagacaatgaaaattttggttgagggtttggtcgacatctttcttagtgtttttcatgagaataagaccaaagatattagattgttggatgcgaatggtttttgtcaactgatgcttgagcttgagtattttgagactgtactgcacacgtacttctcacctgaggcgcaacaggctatgaaatctttacaagagaatttgttggaaaaggcctgtgaaagtgttgcagaagccatggaaaatcctggacaccaacgtcgaccaacccgtggcagtgaagatacagcatcggatgacagacagccatcagtatcacctgatgatttgcttgtgcttgctcagcagtgcagtagtgatctgctgcaaggggagttggagaggactcgattgaacatagcctgtttcatggagtcgacccttcaaccaacagctgcgccagcaggcccaaagcctgccgcacattcttcttaccaagcacagcatgctcccgtccaaacgtcctcgcctagttttagaaggcagcagactggtacaagttcccctgtagtctccaggcggcgccggtgagcttagtgcatctttccatcattggcgtagcctcttcccggagtttccttccttttcccccctcacatgtgtgctttttttaatcacttgtaattgtcatcctgttgtcatgtgttacgaatttcgatccattcttttggtgttgtataagatgaaaaggaggagtacagtactggtgctgctgcacgggatcatggaattgtataatatcgacgagtcaaatattattgctgcttgaagataccaccacagctttatgtatatggaattctggagttgtcggtctgcgccaacttccttcctgcggtcgtcaccgcatgtttgtacattcgtcgcttggacagttttatgtatcccgagatttgttaatattgtatcagttggttcgtgattgttgatatgtctgcatgcttt

SEQ ID NO: 19864 - DNA, 648 bp, Zea Mays
cgggtgagcctggcccgtgctcgcctggtaaaagtgctagggttcttctcgcccatcgcagccgccgccgcggctctcgcctcttgactcgctctcgcctctcggagcaaaagctgtgtccgctcctcctggtgatcccggagccagtcctcgccgcaccgcgctgtgtctgctcctcctggtgatcccgcaccgtgctgtgtccgctccatcttcctccgccgccacactcagcgccggtgcgagggcatgtctacctacccgaggacctacgatctcatccatgcggactcggtgttcaccctgtacaggaacagggagaagatcctcctggttgtcaagacgtattggactacccatgaggccatgaccaagatcagtagcaggactgtcaagtcatttttactgtagcccagaggcttcgcgcatgggctatgctacagaggcaggactcatgcaggactcagtttttttcccgggagcatagttggcggtctagtcttcggattgatagccactagtgtgtgtttttagattctgttgggctgtgtgctcctatgggcagaggccggaagtgactttcaaggaattgtatcatctcgatgtactgttcttgatgaataaaaatccttccctttcaaaaaaaga

SEQ ID NO: 19865 - DNA, 616 bp, Zea Mays
  misc_feature (615)..(616): n is a, c, g, or t
atggcgtcgccggttgtagtggccgcgacgctgctggtggtagcactggcggcattctgcggcacggacccgctccgaacggacaacatggtggacttcccggggtttgagtcccacctcgtcgacctccctgatcccgccgagatgccgacgcacgcggatgaatgggagcgactctgtggagccgatgtgcggttctgcggcgaggtgcaggggcccgagagcatcgccttcgaccagcagggccatacacgggcgtcgccgacggccgggtcgtcttctgggacagtgagcgaagctccgcggcgggccgaaggcctcgccgctggagtatctcccagcgagcacatctgcaacagcccgctcgggctctgtttcgataagactggggacctgtacatcgccgacgcctacttcggcttgctcaaagtccgccccgagggcgggctggccacgctgctcgcaacggaggccgagggcgtgcgcttcaacttcaccaacgacctcgacctcgacgacgagggcaacatctacttcactgactccagcattcactaccagagacgcttgtaggtactgatcagagggccagctgctatccacgaacgatagtgnn

SEQ ID NO: 19866 - DNA, 4596 bp, Zea Mays
atcctgtatccccaataaaagctctgcaacattgatgagtgaagataatatagcatgaagaaaaatatgcagttagccctatagccgttgaaaagagcttccgtcaggaagcaagtgcaattgaatctgcaggaaaacccctaactgtcatcttttctaacgatctccacaccaaacatctgcaacatgattgtgatgtgctaattaaggagactggtgaagaagttttagctcaggagaattgtaatgaccagcctgttcctgcccagaccgacctagaaattaagttaaatgatgaacttgctgatccggatgttttagctcaggagaattgtaatgaccagcctgttcctgccaacgagcctgaggaaaagaacctagctaacgtcatatcaactgatctccacaccaaaactctgcagcatgataatgacagaatagctgaagagactgataaagaccatgaagagcaaagcaatgtgttcggagaacggagagttagcttggaagcaaatgccaacgagcctgaggaaaagaacctagctaacgtcatatcaactgatctccacaccaaaactctgcagcatgataatgacagaatagctgaagagactgataaagaccatgaagagcaaagcaatgtgtccggagaacggagagttagcttggaagcaaatgccaacgagcctgaggaaaagaacctagctaacgtcatatcaactgatctccacaccaaaactctgcagcatgataatgacagaatagctgaagagactgataaagatgtttcgtctttggttttccctattgaagagcatgaagaaaaatatgcagtgagccctatagctgttgaaaagagcgtcagtcgggaagccagtgcatgtgaatctgcaggaaaacccctaactgtcatcttttctaacgatctccacaccaaacatctgcaacatgattgtgatgtgctaattaaggagactggtgaagatgttttagctcaggagaattgtaatgaccagcctgttccggcccagactgacctagaaatgaagttaaacgatgaacttgctgatccggaagttttagctcaggagaattgtaatgaccagcctgttcttgctcagactgacctagaaactaagttaaacgatgaacttgctgatctggctatggaatcaggttgtagcattactgaaaggaatgaagggcttgttgctcataatcttgatcaagaaggtttccttgaagcaacaccagagtgcaaacaggaatgtggtttgcctgaggagacagtaatttcctcaaaagaaacaggatctctgctgtgtgcagatcaatcaccaattggtctggaatctttattttcgcaagaaagcatagttgaatcagtggggcattgtgcacttgcttcagcaacaactcataccgaaaatggctttgatgattcaaaagattgccataacaagtctgcacttgaaaatgttcatgtgccagaaccttgttcacacaatgatactaaaggaggcatttttaaaaatgttgattgtatgcatacatcccagcgagatgatagaatggaaggagtaccagaggctaacactgatgaagaacatgttctgtcagcctttttgctggatgcaaatcacctaaacgtagtcattaattctgaagaagtggtttgtgagggtgaagatagtaaggagcttctccattcggaagactgtaaagcttcatccgagaaaacagatgtgaatgatggcaatgtatatggtattagtgatgctgtagtgagatgtgcactgcatgctccagccgatgataattatgagatttttttgggtcccaatactgatgtaccacgtcaggtttataatgacggatgcagtgatgtcaaagaagatcgatttgcttccaaaccctggacaattgatattattgaggatgcctctgtcaaagaaagatcaaatttaaaagattggcaacttgattccaagttggagggcacagaaatagtggaatctggcctttacttcaataaggatattggtaacattttacatagtggatctattggtgaaataactccatctggttctggtttatcaaaagattcatctgtggactatagaggggaggttttagatggcttctcaatggaagcatctcttgaaaggtcttctacacgtggggaacaaaatggttgtagactagatgctattgagaatccttcaattactttagcaacttctggttataagcatgaaggtgctttatctgaggaagcagtgtacacaaagaagaattacgctggaacatgcttgtcaaatcccagggaattaatcatggagctgcaatcccatttctcaaaggaaaacataaatgaatctgatcctcatgacagccttgtattcccaactgctgaaaattcagcagatgaacagctggttaaagtacaccatggttctaatctgtctcagttaggattaactgatctgttggatggaccaattgggtgttccaataccgacgtgttgtgccagtgtgacaatcataaaaatcaatccaatgaggacaaggtagaggaagttgaggcggtgtctgctgctaaatacatagaaagtgaagttgtgctgctcccatctcaagagagatcaaatttgaataatgagcagcttaacaccaagttggaaagcccaaacattatgggatcttgccttaactgtgataacgatgtttgtaatacttcggacaatggatctgtttttgtcattggtaaaagaactccatctgcttctggcttaccagaagattatcctaaggatagtgacttgcaacaaccggttttagatagcttctcagtggtttcatcttttcaagacaatatatctgggaagaaaactgtttctggtgtagcaggcagtgagattctttctttaagtttagcaactcctgattataaacatgaagatggtttctctgaggaagcagtatgcagaacaaagaattatactggaacttcctcggtagatccgaggcatttagacatggaggggcactctatttactctgagggaggtactgaaaaatctaatctgcaagataatcttgcatttctaagcgctgagagtggaaaagatgaacctattatttgccatgttgagaaactggttgacgcacatgcttcttcagatacataccaaggtccttgtcaagatctaggcagacatgaagaacaagagagctgcatgtctattcctatgcaagccaaagaaagtggaggggttttgaggtctagccacacgaaagggtcagttacagcagcccaaattgatttggcaggtgatgcccatcttattgtgagtgataatgctgctgccaagcaagtgtttagtgaggagaaagaggaaacaaaatctatctcttcttcagatattgatatccttcatgaaaaatcatactccagtggacacgatgaccatgctgcttgtgctgccgaaactcagttctaccatccacagaaagcatctatatctgatggactacatttgggtcctagttctttgcaagtagaatcactggatgctttggatagcgatatactgtatgttaacacaggagttctcgagcagcatcataaagagggttactatgaacccagtgtctaccaaatcacttcaggcatttgcacaatgtctgaagctgaaccattcgaagttttagaaactggaaaagatgtaaaaacgccatctaagctagatgagcaacttaatcctgggttggacggagatgaagctgagaaacacagcttagactgtggtacagacaccagtcctgtgatgagcaagagaaccctttcttcaccaggatcaggaccatgccagcagtatgtaaatgaaagcaccaccagtacacagtcgactgataatcacccaaacgacctacccgctccgagatctcctgaacaatccgcgtgttttcagaatgacaacgattcgggttcagtaggcatttgtcaaagcagcaggcgaagaggtatagatgaactttgcggtaagctgcagagtttcaaagtttccagcgccgtaaaaggaagctacgtagctatgggtgcacctcgtccgaagcctggggacagcacgagccgatctgcagccgcgctgctcaggaacatagagaacacaactgctgttaaagctggccgtcctcctgtcaagccaaacgccgatggtaaggactcgtctaggcgagccctgcagcccataagcggaaggcctgacagtaggtagttcggcggttccttaataagtgtgtcgtgtttgtgttcaaccctttgttgaaagccaggtccgtgtatttgtgcagcttgttgtcatgaagctgctgtgtgcgtgtcatttaacataagcgtgcgtgaagttgtgttatggaagtggctaaatatgtgttcgttaggaggtcaattggcttgaactgaccctgctgttccgtgatttctgtctaaatatacttgtgtggctgtgtcactttgattggccttatcgatcacatgcaatgggatcacatctagcgtgctctagggtcctcgtttggtaatcgctg

SEQ ID NO: 19867 - DNA, 2124 bp, Zea Mays
atccatacctcaacaccgatgctggaaccatgtcgccgttcgagcacggggaggttttcgttttggacgatggcggagaggtggacttggaccttggaaactacgaacgttttctggacatcaaattgacccgcgacaacaatataaccacgggaaagatcttccaggctgtcattaacaaggagaggagaggcgactacctagggaagaccgtccaggtagtgccgcacatcacggatgagatacaggactggatcgaacgcgtcgcggtggtcccagtggacggcaaggaagggcctcctgacgtctgcgtcatcgagctcgggggcactataggggacaaaatcttttcgccgcataacgacagtggcattcttgatgcaggggatatcgagtcaatgcctttcattgaagcgttaggtcaattctcgtaccgtgttggacctggaaacttctgtctcgttcatgtcagtcttgttccggttctaaatgtagtcggtgaacagaaaactaagcctacacagcacagtgttcgagggcttagagggcttgggttagcgccggatgttttagcatgtcgcagtactgagccattggaggaacatgtgaaggccaagctttcacagttttgccatgtcccggaccagaaggcccatgaagcgattctgaaggttttagacctccagtatgatggaaaggtgcctcgggaacctgagctaacaaagtggactaaaagagccaccaagtttgacaagttgaagactccggtcaagattgccatggttggaaaatacactggcctgtcggattcctacctgtctgtcataaaggctcttttgcatgcatcggttgctatggaaagaaaacttgtagtcgagtgggttccttcctgcgacctggaagattcttcagctaaagagacccctgaagcccataaaaaagcatggaaattgctgaagggcgcagatggcgtactcgtccctggagggtttggggacaggggagtccagggcaaaatcctcgccgcgaaatacgcacgcgagaacaacgttccttatcttggcatctgcctgggaatgcaaatcgcggtgatcgagtttgcccgctcggtgatgaagctacgaggtgccaatagcacggagttcgatccagctacgacgtcaccctgtgtcatcttcatgccagagggctcaaaaacccaaatgggagccacgatgaggcttgggtcgaggaggacctatttccatgtcagtggctgcaaatctgcgaagctgtacggcaacgccagctctgtagatgaaagacatcgccacagatacgaggtgaaccctgacatggtcccagactttgagaaggccgggcttcagttcgtgggcaaagatgagagtgggaaacgcatggggatcgttgagcttccctctcacaagttcttcatcggtgcacagttccatcctgaattcaagtcgagaccagggaagccatctccgcttttcttagggctgatagccgcggcgtctgggcagctagaaccattgcttcagcgcagcaatccgacaacgaaagcatgttcgatcagtaaagtcccgaaactgaaactgtaccccactgggcctgtgaataatccactgaacagcttggtgaacgggtactacccaaatggcactgggatccacacctagaagcgtagcgcttagcgatggtttgtttgttatttgtctctgatcaactgagagaagagaaggctaagattcagcaagcccccagctccagcgacacatggttccgacatttttaacgaggaacgccttccagtccgttgaagcgagctagccatagggtggtgaggtctagtgtgatgttgttgttgtttttttctctttcctttttttttggcctggaactaaggcgcgaagtgttttgagtagcgctagtagagcctggaagaagttatctaaactatttgtacattatggaagaacttatctaaggactgaatacacaaatgcttggccatgattgctttgttgccacaatatgaacaaccacgctcagatgaagagtattggtgttgttaaaaaatgccagtgaaattgttgttgttaatgtttgtgcctgtgttgccct

SEQ ID NO: 19868 - DNA, 131 bp, Zea Mays
ggaaaggatacattgggaattagttgtacacagtatgtaacgctgagccaaaccagcctagctcagtatggccttaagactttgaaagaattgcctgctagtaagtgagctactttccgtgctaatccgca

SEQ ID NO: 19869 - DNA, 895 bp, Zea Mays
aagagaacacgcgcggcacgggcgcaccgcgcaccccgaccccgcacaccgacgacgaagagaggagaggaggcggagctcgagcccaaccgcgcaactcacttccccgtcgcgatttgcattgccctcctcttggcccccgatctcgccgtgccctacccccagcctcgctccgccgccaccagagagatagcgccccccattcccacaatctaatccttccgtccctcgaggagccgagccctccgcgcggccgtgggatggggcggtgacaacaccggtgagtggcgtggggcagggagccggtggcgagggcatatcatggtgcagtgcctggacggggtgaggcagctgctcgcggtcctgctcaagtgctgcgacgtcgagctcaagcagccgcccgggctcgaggaccctcaggttctcgcgagggagaccgtcttcagcgtgagcgaggtcgaggctctgtacgagctgttcaagaagataagcagtgctgtcatcgatgatgggctgattaacaaggaggagtttcagttggcactatttaagaccagcaagaaggagagcctgttcgcagaccgcgtatttgatttgtttgacacaaagcacaatggaattttaggatttgaagaatttgctcgtgctctctcagtatttcatcctaatgctccccttgatgagaaaattgacttttcattccggctgtatgatctcaagcagcaaggctacattgagagacaagaggttaagcagatggttgttgctacacttgctgagtcaggaatgaatctttcagatgaaattgtagagagtataattgacaagagtcacttgcgtcaagaatcaagatcactagatgccttgttttaaaggcgtcgcctaggcgtccagg

SEQ ID NO: 19870 - DNA, 731 bp, Zea Mays
gcgaattgcagcttgcaggcaaggcagccccgtcccgtcccggtgtggctataagcctatacgtaccccatcatcgatcgccgagcgtgcgtgctctagctctagcaatagcagcgaggagacggtcgaggatggatcagaacaacagcaacaggcagcagcagcaggcgccgccgccaccacccgcgggctacccgacggcaggcgcggagcagcagggaggcagcggcaggaagcagggacgccgggggaagacgacctcgcgcggggagaagggcttcatcgaaggatgcatcgcggcgctctgctgctgctggatctgcgagatgtgctgcgactaggcagcccccccttccctccgccgccaggctttgagcctttgacaggaacggagagatctgctccacccatagctgcagttgtggctgcacgtacttgttgagctgttgtgttgtgtccatctcggtactttttgatttgttattagtagtagctgtgatgacgatgcatgggctgctctgtcttctgcagctctagcattacactcactactacgtgtgcgtgttgtaccgttttgtattgagtggtgacttgaaggtggcgctggtgatttgtactaccttctatatatgcatactccttggtacgcaaaataacaaaagtgacgaaagctagcgcagagaaatgcaaatgggcttgggccgtatcggcatactgggccgtgagtttct

SEQ ID NO: 19871 - DNA, 1309 bp, Zea Mays
ttccaaagtagtgccagttgtcagcgcttgttcctgttcgtgtcattgtcagggctacctttcgtgagagaaaggaacaggaaaggtccactactctgctgatgacgctctcatactacaggttaggaaaatatgcaccaccccacccccacccaataggaactgatgaattgctaatttctttgtaaggagaaaatatatcaaacagctatagctatttatatgttggatatatattactaatatgacggacatgttaaaactccagcaaaaagcccaggatgttctgccttacttggatggccgttgcgtttatcttgttggttagttcttggcttctagctccacatcaccagttcacctcaaaccctagcttcatcccatcatcgtagtacgatatttgtgtactttggtatgcaggaatgatgggttcaggcaaaactacagttgggaagatactatccgaagtgttaggttattcgttcttcgacagtgataagttggtagagaaggctgttggtatttcatctgttgctgagatctttcagctccatagcgaaacattcttcagagataatgagagtgaggtcctgacggatctgtcatcaatgcatcggttggttgttgcaaccggaggtggtgcagtgatccgaccaatcaattggagttacatgaagaaagggctgaccgtatggttagatgtcccactggatgcacttgcaagaagaatcgctgctgtaggaaccgcgtctcgaccactcttgcatcaggaatccggtgatccttatgcaaaggcttatgcaaaacttacgtcactttttgagcaaagaatggactcgtatgctaatgctgatgccagagtttcacttgaacatattgcattaaaacaaggccataatgatgtcactatacttacacctagtaccatcgccattgaggcattgctaaagatggaaagttttcttaccgagaagaccatggtcagaaactgacctcttgaatgagagggaaaggatgctgacaacatgtggcccttgtttgtttaattgtacatatacctttgcattattgcctaaactctttctacagtgttgttggattattgtttgtgcagcatgaaagaggaccgtttgagtttgtatttatgcaaatgaataagtaaataactttcagttaaaacaatgacaattcgttatttatctcgatgaatggttgatggggacattagggcattagcatggtactgtcatttcaatattcactatgtcagatatcagatggtgaaacaagaaaatgacatgaatccatg

SEQ ID NO: 19872 - DNA, 1468 bp, Zea Mays
aacgcaggagcaacacagcgtcgccggcggcgatggatcccctctccgtgctccgcgactacgctggccgcaacgagctggacaagatcatcttctccggcgacgagatccacttcggctctgactacaccttcccggcttccacccccaccgccttcgcctccaagcagtcaggtcgcccctacccgctctccgctgccgtcttcctcgcgcagcaccacgacctcaagcacaccgacttcatccaggccgcgcgcctccgccgcatcccgcccgtatcgctccccgaccgcaagaccttcctcgacttcctccgcttcggccacaactccctcccctccgccgacccgctcctcccctccgccttccagccgcaggagccccacctccatccgccctcgcctccgccggaggaccccgcagctaccgaagaggccaccacgggaaagcaaatccgcgcgctcgagcggcccttcaaggaccgcaactcaatcctcgacgcccgcggccgcgactttctcgccgtcttccatgccgccgtgcgccgccaggacgagcagctcaagggcggcggcaaggatgcggcgccctcttcccgccccaactctggctccgtcgctgcagccctggccaagcccaaggagttcctcgaggacggggtgttcgtgcccagcgaggagaggatgcgggcgaccaagggagggaagccggagagcgtcacggtgcagaagaagctgattcgtacggagagagctggcggcgctgggggtgccgtctccttcgaggttagggacaagccggcttcgctcaagtcagacgattgggggcgggtggtggccgtgtttgtgctcggcaaggagtggcagttcaaagactggcccttcaaggaccatgtagagatcttcaacagagttattggtttctatgtgcgctttgaagatgatagtgtggaagcagccaaggtggtgaaacagtggaatgtgaaaatcatatctataagcaaaaataaaaggcatcaagacagaacagctgctcttgaagtatgggagcgcttggaggaatttatgcgggcacggacataattgatgtgcagtcatggaaaggataaaagacaaccattttactagattcattcgcaatattggtcggtgactgtagatggcagaatggaatggccgggagcctatgaagactgcaatctttgtacgctaggatgtatttgtaatgttgtacttgcaaactgctaacttatttctagtttaagtatatgagacaattttgcaagttgcgcctgaaagtatattttctttctacgtctctatgttctgggggtcgctggctctcatcctgccattatctgaggtctatgttttaatttgttttttctatataataacctgcttcagtttaacgttatattgtaaaatgaataccctgatgtgtgaataccatgatctgattcgtggca

SEQ ID NO: 19873 - DNA, 2653 bp, Zea Mays
tatatgagagggaattcatcgacacagtagtttcttccgcaccacgtctcctacactcctccgcctgccgtcctgtcctgcgcccttactcctcggacgccccccacgccaccaatccccaaccccccattccgcactcccctctccctgccccgccgcgcttccttcgctgctaaagcggctgcgatggcgctctgggcgctgccggtcggcttccgcttccaccccaccgacgaggagctcgtcagccactacctcaagggcaagatcaccggccagatcaactccgaggccgaggtcatccccgagatcgacatctgcaagtgcgagccgtgggacctcccaggtaagtctctgatccggtccgacgatcctgagtggttcttcttggcgcccaaggaccgcaagtaccccaacggtagcaggtcgaacagggccaccgtggccgggtactggaaggctactggcccggacaggaacatcaagtccaagggcgacaagagcaaacagtttaccatcggcaagaagaagacccttgtcttccaccgtggacgcgccccgaagggcgagcgcacagggtggattatgcacgagtaccgcaccaccgagcctcagttcgagtctggcaagcagggtggttatgttctttatcgcctcttctggaaaccagaggagaaaactgagcgctccagcccaaaggaaatggatagaagtggcaactcgcctactactattcgttcttcacgtgacaaccaagaggcgaatgaggaagctaatacaccattaaataaaaaatctctagaatctgctctgcatgatccgattgagctgcccaattctgctgaaacccctgctgggccaaggaaaatgtgcctggcggacagaaatgataatttggtggctactgcaccggttgtttcccatatacctttccagggacatgctgctggtgtagctaaggttgatccttcagctgctgcttcagcccacttcgttaatccccagaatggaaatgacgactgcaacaattttatgtctgatttcacccccattctaccgcatgaaaatgcattcttcactggtacacagcaaggagcttttggttttgatggaaatggcatcatgaatcatcctgatgccctggatgctttcttgaaccaaacacttgttgatactgatgaacattcatcgacaacatcaaaagttcagtatgattctgacattccaacagaatttgcgaaccattggaatatgcaggatgagcatcaagactggtgggaaaagttagattttgagccatatgaaccaactttgcttccttatgacaccactgacctagacgtactctcagtagactctggcgccgattccttcaatgacctcttcaatgtgactggcattactcttaggcctcaacagttggactccactgtgcaaccagactgtgtgttccctgatcagggcactgcactaaggaggctgaagctacaggttgttgagtgtggggagagcataactaaagatgagagtgaagatgaagtatcatgtgttgaaagtccaaactattttgatgaatctgtcgagttcgctgcagagaagggtgtggcttcttatggggatggggctgactcaactgggattgttattagaagccgttaccctgccccaagttcaagctcagagagttcattcactcaacagggaactgctatgcgaaggctacggttgcagttgggccttaacgaaggcacatgtcctagtagtggtgattcatcaagctgcatcgtagatgaatcagaaagtcagcagaaagcagagattgaagaggatgcaagcacgaacctagctggaagtgttgataatctacctggcaatagccatgatgatgagcaaaaggacatccctgaacatggagttaaatctgtcctgaggctgcggaaaacttctgcggaaagtctgaaggatgtgaagcaggaggattgtctggagccagacgggagagcaccgatgcagagggtaggcttccaatcatccatcatctggctggttctttcggtggctgtgctgctgcttctctattgtggcgtatggatgagtatgatatgtatcctggtgcggtgttttgcgcacatgggttcctggcatcaacctgatgtgtgaacttctgtcataacatgcgtttgacagcagtaagacatcccgacatatgccaatgcagctaaaaataaaaaaaagaggtagcaagtgaagagggagaaaaaagagatgtgttattgtaggtcttagtacatcctagtcttgccaatgcagctcaaaagaaaaaagaggtagcaagtgaggagggagaaaaaaaaagaggtgttattgtaggtgttactaatgttgtagctgttgtgcagttgtaaatcccccttcggcagctggttttatttcctgatgtaatgtaagcaagagcaaggtcctgtcagatgcgtgcgctgaaagtctgaacctccgataatatctgatgcttcttgtagatagctgtttcagaattttcggttaatgaacccagttactgcttgcttgttgatctattttctgtgttgctatctgatgggattgttgtggtgaattcgagttcattgggaatacatgacagaattgtgaatgc

SEQ ID NO: 19874 - DNA, 1180 bp, Zea Mays
acgcggtcgttctcacgttggcggctggccaccattccctgtctcgtgctcacggcgggcggcagaccgccaggcgccaccgcgccagaccagctgaccagcaggcggcagtgcaggccatcagccgtcacggctctccctcaggtcggcagtgcaggccatcagccgccaaccgatctagtagtgcagaccgccagaggccaggtgaccaggtcggcagtgcagccgtgcaggcggccagccctctccaggcgtccagctaccaccacacacacgaagagcaggcgatgaaaatgtccgcttccgttgcggccgcctcccccaccctccgcttctcctccgccactcatcctctccaccgaccgctccgccggcggctcccgtcggttcgatgctccctcgccgccgccgccggccccggtgtccgggcgccccctgagctcgtcgactccatcctctccaaggtgaagggaactgaccgaggagtgctgctgccaaaagatgggcaccaggaagtggctgaggtcgcgctgcagctggggaagtactgcatagacgaccccgtcaagtccccgcttatattcggaggtaagctgaatgtgctggacagtaaatggattcaggtcgtgttcgaagcaccagaactgaaggtcggctccttggggtttcagtacggtggcgagagcgaagtcaagctggagatcacctatgtcgatgagaagatcaggctagggagagggtccagaggctcgcttttcgtcttccttagacgatgatagaatggcatgcatgtgtgttgagacttcagacccacaagcaccgatgaggggtggcgctgacgcggtcgtttgtacaatactgtgttcaggacttctatacgtttatgtaaaaattctggcgtccagctgggtaattctggcgtttcagtacggtggcctgatgaatgttgttgtgtagtttgtagcatccattattagtgctgtaagatgatgttttgaattctgatacaccagtgcgagtgtgatgaaccaaattcatacgacacgtttggaccatagaaatgcagagtactgttatgggatggagtaggacgaatctgcaggaatcatcagctcagctcgtgtcggatcctaggagtgtaggatctatgaatctatcgatgcagcctccagagatttcg

SEQ ID NO: 19875 - DNA, 1824 bp, Zea Mays
ttcgcatctggctgagaagcgattagtgttccaaagatggctcgtcgtggattgatggaacaggacttaagcaaactggatgtgacgaagcttcaccccctgtcacctgaagttatctcacgccaagcaacaatcaatatgggtaccattggccatgtggctcatggaaagtccactgttgttaaagctatatctggtgttcagactgttcggttcaagaatgagctggaacgtaacattactataaagctgggttacgctaatgcaaaaatctacaaatgtgaggatgacagatgtccgcgaccaatgtgctacaaggcctatggaagcggaaaagaagatagccctctatgtgatgtgcctggatttgaaaacactagaatgaaactcctgagacatgtttcttttgttgattgcccgggacacgacattctcatggctacaatgcttaatggagctgctatcatggatggagctcttcttttgatcgcagcaaatgaaagttgtccacagccccagacatcagagcatcttgctgctgttgaaatcatgcgtcttcaacatatcatcattctgcagaacaagatcgatcttatccaggaaagcgcagcgatgaatcagcatgaagcaatccaaaaattcatccagggaacaatagctgaaggtgcacctgtggtgcctatatccgcccagctgaaatacaacattgatgttatctgtgaataccttgtgaagaaaatccccatccctgaaaggaactttacctcacctcccaacatgattgttattcgctcctttgatgttaacaagcctggttcagaggtcgatgaaatcaggggtggtgtagctggtggtagtattctcaggggagtcctgagggtgaaccagaagattgaagttcgccctggcattgtcatgaaagatgagactggaaacatcaagtgcaccccaatctactcaaggattgtctcactgtacgctgagcagaatgaactccaatttgctgtcccaggagggcttattggtgtgggaacaaccatggacccaactctaacacgtgctgacagactggttggccaggttcttggtgaagtaggttcactacctgatgtttacgtagagcttgagatcaatttcttcctactccggaggctgttgggtgtgaggacgaaaggtacagagaaggcagggaaggtgtcgaagctcaccaagggtgagatcctcatgcttaacatagggtccatgtccacaggcgcccgtgtgctcgctgttaagaacgatcttgccaagctacagctcaccgcgcctgtctgcacgagccgaggagagaaggttgctctgagccgtcgcgttgagaagcattggcgcctcatcggatggggccagatccaggcaggtacaacacttgaagtaccagcgtgcccggtgtaaagcgtcatactcagacgtgagctgaagttgtgtgcaaaagagaaaaaaaaatgagtttgttgttagtcctgtccctgcgttactgcagatccaaagtcctgggtcactctaattttattttgtttcgttcaattttggaggccgtttgcattatgattcctgtgaacattaccaggtcggaaaccagtattgtgaacattatgagtacggcatatggatcagcatttgccaatttcttctttcgcaccaaaatttagacttgccttcatatggtttgtgcctcaagaagtggctgtatgcctgtatatataagactgtctgcaactctctaaatttccctcctatagcgcactatacagccaccttattcaggttctattctctatttttttc

SEQ ID NO: 19876 - DNA, 415 bp, Zea Mays
aagaaagcgagaccgtaccgaccatggtgaccacgtgagcacagcacctctctttcctcgctaaatttagctatgcatggcttcttcgtcatcgtctacttgccctccatccatcccacggatgtctcgcaaccccacgaatccaagcccatgtttgcaaaagcatttttcactctacctctcctaccaaagcgttcctctcttgtagttttggtccaagccgatcgatctcgcataccaaaattttcttcgatcatgtaggttttgctcagagcaatgtcagagcacataagaccctgccgattcctctgatcatttgctgctgctcaaagcattcatcaagattttactcgtcaggtttgtgtttactgcttggttaccatcgtcttgttgcaatgcgaactattgatgtgtg

SEQ ID NO: 19877 - DNA, 154 bp, Zea Mays
ttctaattaaatcatggctgcgcctgggcagcgttattgtgagagtggaagtggacgtgctgctactcccctcattcccaacatgtatcaagtacctgcaatgagtaatgcaagagtgagatgacacatctcagcaagtaaaataatatcaaac

SEQ ID NO: 19878 - DNA, 2079 bp, Zea Mays
cagcgtcgccatcccatcgtcgtcgtcttccatagctgagcttgtggtgtctccgcagtccgcacttggcaattccgtggccattatctactcctcggctcctctcctcgcagaagaattcgttcccccaatttggagttggaaaagcgtcgaccccagaaaacgggaggcctcgacctcgctagtctccgttccattcgaaaagccatcgcctggtgagcgagaaggggaaggtcgatggcgacgtgttctcgcccgctcttcgtctccgactcagcggcctccgcctcgccgtctcgggcgtcctttcgccgccttcgcacggtcgcagtcgtatcgatttgggaacccctgccccacccaccactgcgggctgcagcctgccgtttcgctcgaacgaagcaatgctccaggagatccaccgagtgtttggcgagtggaccgtccgtttccagattgacgcggccaataaggagaatgctgtcccgttactcttcactgatggtcactttgcacggcaacctcagccggtgctacaaggccatgagcgcgctgcggccagatggggtatccaggcacttcatgtccgctggtggtttcgaacgcgtcgttttaggggtggtgctcgtcatgtccatctcgggagcttcttatacagcaccgtcatcatcggcgctcacagaggaaaacttgcttttcctggaggcttggcgcgcggttgatcgagcatactatgacaaatcttttaatgggcaaagttggtttagataccgtgaaaatgcccttcgcaatgaaccgatgaacacaagggaagagacatatgcggcaatcaagaaaatgctttcaacattggatgacccttttactcgtttcttagaacctgagaaattgaagagcttgcggtctggtacgcaaggcgcactcacgggtgtaggtttatcgattggttacccaatggcaattaatggatcaccttcaggagttgctgtcatgacagccacccctggtggtcctgcagaaaaggctggcattcttcctggagacaccattttggcaattgacaacagaagcactgaagatatggatatatatgatgccgcagaacgcttacagggccctgaaggaagttcagtagatttgtctattcgtagtgggaccaataccaggcatgtcgttctaaagagacaaacagtcaatttaaaccccgtgaggtcaaggatgtgtgagattccaggttcaaaagatagctcaaagatcggttacatcaaattgacaacatttaaccaaaatgctgcagaatctgttaaggaagccattaagacattgagggacaacaatgttaaatcctttgtgctggatctgcggaataacagtggtggcctttttcctgaaggaattcaaattgcaaagatttggatggacaagggtgttattgtatatatatgcgatagccaaggtgttcgtgacatttatgaggctgatggcgctgatacaattgctgcatcagaaccgttggttgtgctggtaaacaaaggaactgcaagtgcaagtgagatccttgctggagcgctgaaagacaataagagggcagtcgtatatggggaaccaacatatggaaaagggaagattcagtcggttttcggattatctgatggatctggcttggctgttaccgtagcacgctatgaaactcctgcacataccgacattgacaaggttggtgtgattccagaccgaccactgccagcttcatttcctaccgatgaagatgccttctgcagctgccttagggattcaacggctgcttgcaatctgaatgctgctcagctgtttgcaaaatcatgaccaggcccttcattcaacattttgggtcttgggcgttgtacagataaccgtggtgtttcgtaggagctgcttgtgcgtggtgtgtgggtagtccgtaattcttttcattagcattgatttttgtcccagttttatcgcctgtgaaatgaaagcattgtttctgcgtgaaatcacggtcgtgttgaacatgcacttgatgcaacaattttgaatggaagcactaagaaaacctgc

SEQ ID NO: 19879 - DNA, 1473 bp, Zea Mays
atgcgtacatctacttgcctcagttttttcaccctcaccgtcctgccacagacattttggctcaacatcattagcatgccatccattgccattttgccacctttggtcctgaatgatgaggattattatcctgagcgaccaggggaaccagattgtccttatttattgagtagtagatgtaagtttaaatctaaatgcaagttcaaccatccaaaggaaatggtgaacgcattaggaacaagaacagacaatgaatcactaatcgctgataccactatcttaccagtgaggccttctgaacccgtttgttcgttctatgcaaaaacaggcaaatgtaaatttggtgccgtttgcaagttcaatcacccaaagctagaagatattaagacaccatctttgattgcaaaggaaaccatatatagagcaacaactgatgcagcagcgcacattggtgggacagatgattctgttccagcaaagacacatgcaccaattgccccagccgaggcacataatgcaaaggggcttccaataagaccaggtgaagtggattgctcgttttatatgaagacaggcagctgcaaatatggttctatttgtcgcttcaatcatcctgatcggtcagttgtggatatagcttttatggctccagttcaagctactcttccttttccagcacccattgtccctgcagtggcgttaaatccggctgcaaattttctgcaaagctttgatttccatgcaactcacgtgccggttgagcctatgccaatgatctatcctcaaagacctggagaaattgtttgtgatttttacatgaagacaggatcttgcaagtatgctcagaattgcaagtttcaccacccttttgaccggtctgcacctcattccaaagaaaacgaggatacacagcagcctgtggcacttactcttgctggccttccaaggagagaggatgctgaggcctgtgccttctacatgaggtctggcacgtgcgggttcggtgcgcgctgcaagttcgaccaccctcctcgccaggacgatgtctaatacggtgtactccctccgtttcgttttagttgtcgctggatagtacaaaattgaactatccagcgacaactaaaaaaacggaggaagtatcctgtatcaggatgtggtaccatgcgaatcgcactgttaatgcttgatgctgtcactgccatggtgggagcctgacttgtaaagttcagtatcaccggaagtgtttgtcggcgcgtgctggtactaacggtgtaccttcggcggttggatggtgtcaagagtaaaaatacaccgcctgttctcaaactttgactggatgctaatctccaaaatgtgagaaccaagttaccgtaacttgagttaatccgcttgcatggttatgtgatgataaggcgttgggacgtggagtctacatgatggtagggatataggagatcgaatcgcatgttcgcc

SEQ ID NO: 19880 - DNA, 2656 bp, Zea Mays
accgtgaaaaacaagcaccaccgtagctcagttacacacgacaccggcagacccgctcgccttcgtctcctcctcctccacctcccgctctcactctactggccggccctcgcctcggtgcgttcccgatgatcacgttcgcggacctgacggagccggcagcggccggcgccgaacggtgcgtggaccggcagctgtggctggcgtgcgcgggcggcatgtgcaccgtgccgcccgtgggcgccagcgtctactacttcccgcaggggcacgcggagcacgcgctcggcctcgccggtgcggccgacctctccgcggcgcgcgtcccggcgctggtcccctgccgcgtcacggcagtgcgctacatggctgacccagacaccgatgaggtcttcgccaggatccgcctcgtcccgctgcgcggcggggacgcggacgcggacgcgggtggcgtcgaggacgacgcggccgcggcggacgagcaggagaagccggcctcgttcgccaagacgctgacacagtccgacgccaacaacggcggcgggttctccgtgccgaggtactgcgcggagacgatcttcccgcggctggactacgccgccgacccgcccgtgcagaccgtcgtcgccaaggacgtgcacggggccgcctggaagttccgccacatctaccggggcacgccgcgccggcacctgctcaccacggggtggagcacgttcgtcaaccagaagaagctcgtcgcaggggactccatcgtgttcctccgcggcgacagcggggacctgcacgtcggcatccggcgtgccaagcgcgggttctgcggcgccggtggaggcggaggcgacgactcccctgcggccgggtgggaccattacgcgggcctcatgcgagggaatgtgagcccgtgcgcggccgccaaggcacggggcaaggtgcgaccagaggacgtggccgaggcggcgaggctggcggccgccgggcagtcgtttgaggtggtgtactaccctcgcgccagcacgcccgagttctgcgttcgcgccgccgcggtccgcgtggcgatgagggtgcagtggtccccagggatgcggttcaagatggcgttcgagaccgaggactcctccaggattagctggttcatgggcaccgtcgccggcgtccaggtcaccgatcccatccgctggccgcagtcgccttggcgccttcttcaggtgacctgggacgagccggacctcctgcagaacgtgaagcgggtgagcccatggctggtcgagctggtgtccagcatgccggccatccacctcgcgtccttctcgcctccgcgcaagaagccccggatcccggcgtacccggagttccccttcgaagggcagctcctgaacccggcgttcccgcccaacccactgccgcacggccagcaccaccaccatttccttcactcccactcccaccagcaccaccacccacccttcttcccgttcccggccggcagtgctcctgcagccatacagggagccaggcatgcgcaattcgttccacctttctcagaactccacctcacccacttgcagccgagcctgctgtaccccaggctccgccgtcccgaccatgtcggtccgacgaccccgatcccggcaagagtcagcacggacctgaccatcggaggcgcggcggcggcggcgcgcgacgacgacgacgacgacttcccgtgcgctcctccgtcgacgggtgccaacaggcagaagcccgacgccaagccggcggggctagtgctcttcggacgcacgatactaaccgagcagcagatgagccgcagcggcgcaacctccccagcggcgaccggcaacagctccacgtgctggaacgccgagaaggggcccaacgcctcggagggctcggggggatccggcgtcatccagaccagcccggccaaggccgcgtcgtcggagcggccgccgtggctcgggggcgacggcagccagcagcagcaggcctccggcgagctcgggctggggctggagcccgggcagtgcaaggtgttcgtggagtcggacacggtgggccgcaacctcgacctcgcggcgctgcgctcgttcgacgagctgtacggccggctgtccgggatgttcggcgtcgcgggggcggagctgcgcagccgcgtgctgtaccgcggcgccgccggcgacgagcccttcagcgatttcgtcaggtcggcgcggaggctcaccgtattgaccgatgctgggagcgacaaccttggaagctaaacgacgacgaggagcagtgagagagaaccgttccattccagccgcgagggtttatgttcttcggtactggtactgttagactgtactagtactgtacaggtgaggccgggagctaaggttttgttcaaaatccgttccaagtctgaactctgaagacatagagagagagggagagaggtttcagatcgtaaggcagcgccaccatgaccaggcacgttgccttcatctcgtgtgtgtccatccaaaaaatcgctgtaaaacttggggggtaattaaaaccctactagtactactactactcatcttgttccttgtctctctctctgtatcctcgttctgtcgttcattctcatgggcgcttgaatgccccccttctggccaaggccaatgca

SEQ ID NO: 19881 - DNA, 2567 bp, Zea Mays
gcacaagcaaaggcgggggagagagctccgtgcagtcaccgtcgtgttcggaacgagcgagagagcgggagacgagtcgcggcgcctctgctgtgctgtcttcttctccccctctgctctgcttcggctcctcacgcggcctcgccgagacccgcagaacagggggttcagacttcttggtgagagcgatatgagtgtcccaggtcaatgctcatcccagccacaatttatcaccagcgttgggaggagtaaccgctccaatggccccggcactcctcttatcgaaagcatagatgttgatcaaattgttattccagagaaaaacagttggaagaacttattctcatacatagggcctggatttctcgtctcaattgcatatattgatcctggaaactttgagacggatctacaggctggagcacagtacaaatatgagcttctttggatcatacttgttgcatcctgtgctgctcttattattcaatcacttgcagccaggctaggggttgtgacagggaaacatcttgcagagcattgcagggctgagtatcccaaggtcacaaattttgtcttatggattcttgcagaacttgctgttgttgcatgtgacattcctgaagtaattggaactgcttttgctctaaacatgctgttcagaatcccagtatggtgtggtgttctaataactggactcagcactctaatgctcttattgctgcagcaatatggggtccgtaagctagaatttctgattgcatttctggtgttcttaatagcaacatgtttcttagttgaacttgggtattctaaaccaaatgctccagaagttgttaggggcctttttgttcctgaacttaaaggaaatggagctacaggccttgctatctcattacttggtgctatggtgatgccgcacaatctttttctgcactcagcattagtattgtcaagaaaagtgccacggtctgttcatgggattaaggaggcctgcagattctatacgattgaaagtgcatttgcccttacagttgcttttctcatcaacatatctatcatatctgtcagtggttctgtctgtggttcaggtaatttaaacccagaagatcaagcaaattgcagtgatctggacctaaataaggcttcatttttgttaaagaatgtccttggaaactggagctcaaagttgtttgcagttgctttgttggcatctggtcagagttctacaattacggggacatatgctggacaatatgtcatgcaggtttttggaacttataccttatttcagttctagttcgcaagttgaatggcaggttgttttatgatgcatattactcgaggcatttgatgttgatcagaagtaatcaagcatttgcttgcttgcaacattagtttgtttagctgttagatatgaaaagtacagaaaataaattagtacataactcttagatttgcaatgaacaagcttgggcttatgagtttcagtgccaacctccaaggttctcttggtcagctagattgcagagaaaaaggacagatacggggggtttttagatcttcggatgaaaccctggatacgcaatcttgtcacgaggtccttggctatcctgccaagtttgatcgtgtcaattattggtggttcttcagcagctggccagttgattatcattgcatcgatgatactgtcatttgaactcccttttgctttagttccactccttaaattcaccagcagcaaaacaaagatggggcagcatacaaattcaatattcactgctgtgctgacatggatgatcggctcgtttattgttgtcatcaacacctactttctgataacaagctttgtgaaattgctcgtccagagcgggctgaccaccatttctcaagtattttccggtattttcgggtttttgggcatgctgatttacatagttgcgatcctatacctcgtctttaggaggaacaggaagtccacccagccattgctggagagcgatgctgagcttgcagtatcgggtagcagtgctgatgccggagcagaatgctcgctgggccatttgccccgtgaggacatctccagcatgcaacttccgcagcagcgttcagcttctgatctagattagataacagctgccaggaaaataaatgttttttttgttttttatatagtatagtaattacagaatagggtacgtcaggtattggcttctgttcatcctactgatgatgcttaaggaatgtatacaagaggacggatatctatgctgccaaacaaaaaaatggggcacaaaagaatttagtgcctgtttttgggaagtgatgtgaactgaatcctggaaggggcaaaaaaaaaaaatgttggaatccaattgttgaaaattcttcattctaaacatgaggccgttggtaaaaaatgtctacatgctgtaaacatactatattttgacattattatcacagttaatatatactggacatgctgttttatgtgttgtgcattccagtggctgcaggccttgctcagagctagtttggtgattagagaaatggagaagttctatgta

SEQ ID NO: 19882 - DNA, 3419 bp, Zea Mays
atggtttcctagcacaagatgtgcatggaccagcagaacagaagttctgaagggagagttacctgcatctgcatggaagagggaggagacccgcagcttccgagcatctccgcaccacgcaccacgtccgaaggcgcggggggcgtcgacttggatctccttgagcagctactgtccggcgacaacggctggctcgaggtggtctcacgctcgcccaactcggtagcgtttcctccactctcagccttcttctcggctgacgcgacagccaccacagtgacgacggcggcgccggccgcgaacgccagctggtggattcagacgggtggcgcgagcccctcctccgtggaggagcggttcagccaggccctgtcctacatccgggatacgcagagcgacggcgacgtcctcgtgcagctctgggtgccggtcaaccgcgatgacgggaaactggtgctgaccaccagcgagcaaccgttcacgctcgaccaccgctccgacagcctcctccggttcagggaggtgtccaccaagtaccagttctcggccgatgttaagtcgggggattcgccggggctgccagggagggtctttatcggcaggctccccgagtggtcgccggacatcaggtacttcaccagctacgagtatcccagggtaagggatgcacaatacctcgatgtccacggcaccatgggtctgccagtgttcgagaagggaagctacaactgcctgggcgtcatcgagctgatcatgacaaggcagaagataaacttcacctctgagctcaacaccatttgcagtgctctccaggcagttaatctcagaagtacagaagtttcaagcattccacgcataaagttcagcactgcttcctacaaagatgctttaccagagatactggaggtcctgagagcagcttgcttgacccacaagctgccattagctcagacatgggtcacatgtgctcaacaagggaaacgaggcagccgacattccgacgagaactaccggtactgcatctccaccattgatgaagcatgctttgtgaatgaagccgagatgcggggcttccatgaggcctgctccgagcaccaccttctgcgcggggagggggttgcagggaaggcctttacaacaaaccagccatgcttcttgccagacattggatcctcaactaaattggaatactccttgtctcaccatgctaagatcttcaagttaaaaggtgcagtggcgatccgcctgcggtgcacacgcactgggacagcagactttgtgctggaattctttctgccaacagattgcgaagcactggaggagcagaagtcagtgctggactccttgtcaggcaccatgcgaagtgtttgccagaccctacgtgtggtcacagatagagagatggaagacgaaacggtgctggaaatgaacgagctgaactcttttactcctcatgggaaggacaaagttgagttgtcctttggatgcaattcagcagatcgtagaggagaggcctcttggacaagtctggcaggaacatcacagcaagaatccgagttagctgcattgcggatgcatggaatgttctcacctggggggcagggtccatctctatctggtgttcaggcaactgctgaaggtagcaaggcaaaaaggcgtacaaaggccgagaagaccgttagtttgcagattcttcggcagtacttcgctggtagcctgaaagatgcagcaaggagccttggagtgtgccctacgaccctcaaaagaatttgcaggcagcatggtataacccgctggccatcgcgaaagatcaagaaggtagaccactctctaagaaagcttcaacagatcattgattcggttcatggagcagagacagctttccagctaaacaccctgtacaaggatatcacgaacacctcaatatcatctgacaacaatttgtcaggaagtgtcacggttcctccaaccaaccagagcaatctcaccgacgtcaacaagcaccaaccccacaagtcaagcagtaatgtgccatcaacttcacactcacactcttcgtgcagccacagttctgagtcaagtccctcatgtagcggtggtgcaacaaaacatgcacaacagggtataattgatcagatgaagtcagaaaatcctgtgaaagacagctctattcagactctgcaaacagaaaacacttcattatttgagcatttctcagttaatgagactccaattgatcttctacaggatgttactgaaaaggctaatggtggacatcattcttctcgaagcccgtcgtcccccaatcccaagcagaacacagatgcaaatatgagagtaaaggcaacatttggctcagaaaaagtgagattcagactgaacccagagtgcaattttcaagaactgaagcatgagatagcaaaacgtttgagtatagtagacacaaaccccttggttttgaagtacttggatgatgattcagaatgggtcttgatgacatgcgatgcagatctacaggagtgccttcatgtatacaaactagcaggaatccaaacaatcaaaatttcagttcatttagctgttagtccagctacaagggtgacaactggtcacactggtttgtcatgacaacagtatgaacctcaccactttgtgaggtttaatcagaattcaacctggatcacttggttttatggttttatacaggggaaaccaattccaggagtcccgagttggtagcctatgcaatgtactatgtgccaccaagtcccagttctgctgttagatcgattagtcttcgatctgttgctcaggttaggaactgatgatcaaacaaaagtacttgacaatgggaaagtcaattctaggaattaggataaaccgaagtaagcatgcattgcttgtaaacactcactgatgaacctaaatctctgaaaggcaatgcaattgattgaattaatagggtgatagggtgaagtatacctacaaatcagatttgctccaactccaagtatgttttggttcttggaatactgatgtgcaacaatccttgatgacttctttctgataattgatcagctacaatgtcccttaagatcccagcattccttcatcgcccgagtgaccaacatgctctgtctgttcaatggacattaaattctgcttctgaaattgcaactttctgcagcaagggttagatctaaaaaataggatgataggatatttagtttgttcaatttgtttgtcctttgccaaaaaaacattgtatgctatactacagtgtggtcctctttgaaagaacgcctgctactgtagacgttatggattgctttccttttaagaagcttccgtttataaaccgtttggtatgtcaattgtcaagtatcaatatagagattagattatgtcaatactctaat

SEQ ID NO: 19883 - DNA, 1022 bp, Zea Mays
cctcctccctcactagactcgaccctcgccggccgtcctgctagagatgtggttccgtacggagtgacttcggctagtgtatcactgatgactctaaatatgccaggcaagggttacacgagtagagttcgttgtcgggagcagcagcgacgaacgacaatagtatctatgcttggaaggaaatcaacggctagagcaactgttgtcccagaccccgactataggttaccaatcgctatacttgggattgctagtgcttttgcatatgccgacaatcttctcgctgctgcacctgtaggactgctggggcttcttcttttgttccagactacaagagtgaggttcgtctttgataacgaggccctggaggtgaaggttggagagcagctgcaggagtcaggtgaaaatgtattcgtcggcggcaagaaccgttggaagtacgcaggcggcctgttgatccttcacacgtcctttttttcagttttgtgtatcatcatgataacttgataagagggggtttacgatctaataacccaaggcatgcataggtactcaacgttcgtaaactgggagctgtggtggccacagtttcctgtcttggtttacttcaaggagacccaaacgaagcccgaaggacagatccacttcttccctgtgatattcgatggtcgacaattgtacgatgtgatggtggagcgtgctgggccctcgaagacgagtggccctaaatagttgcagctgatcttcctaccgtcgttttgctccctcgggctccctcacatttaaattgtaaaaatggtaaaattatatacaaacggggttcgattccaaccacggttcttagctttaaacccatcttcatacgtacctaaccaacaaaaacacacatctatgtgttttatattttatattttgtatttaaacataaatataaatataaatcgtaacaatatatatatatatatatatatatattgttaggatcgtaggtgggaaaaagaagacacaaagtttaacgtgga

SEQ ID NO: 19884 - DNA, 693 bp, Zea Mays
atggagcagcgggcctaactgcagaccatgatgcttggccaggagccacggcagacgacatcaaaggtcgggcacctaaataactcatcgattcaggctcttatccatgggctgaacagacactactaatttgcaatcaattaccgcaaaaatgagctcgagaagaaaatgttgttgaacttgcacaaaaagaaatggatagatgggctaattttgaagaggtttgacactcactcaaaaaaccaacgagcaaactgtccaggttccatccgtcttgtatgggaatgaccattgagcaagccaaaaaattacatgtgctcggattgtgctaaagaaaatggtgcaaagagaccctcaaactcatacccagtttcaccaaactctgattctaagatatggacctcggtggttttctccacgttaggaaagctggaagagtcttttctactcagttttatgataacagtggtgttatggtcaaacaaagtcttgcgtgtatgtaccaacagctaaactgtaaacacgacattaccatagttgattacatgaataattatcttttatatcttattgtaaaatctgaaacagttgtcatgtagatggttagcttgcattttacgctacaattacttcaaatcacttcttgtttcattttacaccaatttacgacatttattgatgcgttttacgtca

SEQ ID NO: 19885 - DNA, 1437 bp, Zea Mays
cgaggcggaaacgcgacgagatcgcggtcgcgcaggccgcgctagtaccacactagcactgacacgtcggcaggccacggaaggaggcggaaccattcgaatttcgaacgccgccggtcgctccctgttccctagctctctcctccgcggctccgcctccggcctccacggtttcgcaggcagagatgaagaaggcgtccgcggcgtcgcgctacgcggcctacgactccccgtccccttcgccgcgccgcgcggcgccttccgcggccgccgcgaccccgggagcagcgcacggcagcagccgcgccctggtggtcgcggggagatccggccgcgatctactgggcgccaagccgcaagcccacggcaacctaggctccgtgctacggcggctcatctccatggacaagaagccgccttcctccaagaaccagctcccggttccccctgccgccgccgccgcagcagcagcagcagcgaagaacaacggtggcgggaagctgccggggctgtcgcggaagttgttccagaaagcctcgtccaccgaggcggcggcgcccaggaagacgaaggccctgatggaagtcaagaacagcggcaacaacgccaacacgcggacgctcggcatggtgctgcgcagcgagcgggagctcctggcgcagaccagggcgcaggaggacgagatcgccgcgctccgcctgcagctcgagaacaaggaccgggaggtggagcggctcaaggacctatgcctgcggcagcgggaggagatcaggacgctcaaagacgccgtcctgttcccggacgtggagccggagccagagcccgaccgccgcctccgacacgagatttccacgctcaccgaccagatccagtgcctcgcgcaggaggtcgcccaggttaaggccgagaagcactcggcaaggtcgtgctttgacgaggatggatacttctcttcccctaggacgcctgggtttaacgaggagaccgctttctctctggagtgcagcattggggaagctgagacgccgaactacggtagcccagacgaaatgttcagcaaggatcttaatccttgcttgaccccgtgcattgccaagagcagatctgatgtatccgcacaattccagtcgtcttcctcccagttcacaaaggaatctagcggttctcgtcgcagcagcggcaaggaaagagcagaccgctcttatggttcttttggcaggccaatgtcaaagagctctgaccatcacaagccggccgcctcaggaagcagcaacaagcgacgagtatacagatccgatcaagacaaaatcaatcagaacctgttttgagttcaccatcgtcatcagcttgccagtgaagcgttgttgagatgtcatgatccaatctggattcaacatggccgaagatgaggtgatggagttgttgcattgcatcaag

SEQ ID NO: 19886 - DNA, 2492 bp, Zea Mays
gtcacaaaccgaggcccagcaaaatttccccgttcttgcttcccctccgtgtccactctcgatcttcccttccccctcggcgccggtctccaaacccgcttccgcaattcgtaccgcttccggttccgggggcgggcgggcagcaccgtctcggctctcggatactatggcttccggcgaggggtgggaggcggcggtgcgggcggaggtgggcgccgttgcctggtgggacgacctggacagcgccgacctccgcgccaggttcaaggccttcacggggcagcgcagcgactggcctcagcccacggtcctcttctggaaggaccttctcctccgcgtcgccaggcgactccgcgtctgctccgcccctgcccaccacgtgacgagcgcttggttcgcgcgccccggggggctcacgccgctatgcttgccgcaagttctggaagagatgcgtgcggatggggacgtactgctgaaatccgagctgattgatccatcctcaacgaacctgcaccagctggtcaggagggtgagactcatgaccatcagctccaggaaggcggtttggcaggaggatatcctcgtgttcaaattgttgattgaggaacgagctgccgatattgctaggcaattgagtgactctcattggacatcgacatgtgttgtcacgattagcaaattcaatagcttctttgttgacatggatgatgctcatattgcattatgttttttgacgcaacatgggaaagctaggtaccttttgggcaggaaacaagaccctattgagggtgtcaaggttgcactcactgcttcacaagttcctgctgtatccaaacttgaccatgacaccttgcacttagtctggacagaagagaagttgcaagaacagcttgatgtgcttgatcgacgatgggagatttcaaggcgaagggcattggcatccttcaagtctggagataaactagctgcttatcgttatgtgaggcagtctaaattattctcacaaagccggagcagatgcacacagttgttggaaaggattgaagaagtcatcagcctaattgctagtgctgaatcaaataagaaggtttatgaggcaatacaaattggtatcctggcaatgaaggacaacactgtcagcatagatgaggttaacatccacatgaaggagattgatgagcttgttgctgcacaaagagaagttgatgctgcccttgtaccactccagtcgttagatgatgaaggagatattgatgaagagttcagcaagcttgaagcagaattgcaggatgacgtccctcatattcatgttcaagaaccaatggcaccttccaacgaggaatcacctgatgaagtggttgaatcattgagccataacatgtcaagaattagactggagcccatctaaatgctccattttacgtttaatcaatttgacctgtacatagtgtgatctagtcaaatcatctagtcccaacaatgtgtcttatgtttcttgttacaccatccttataaaagggcaattctgttgcagatattcctcaatgttgcctgctgttttattgagcctccatggttcacctcctacattttttttgaaacggtggtttcaataccctaaaaacttagttcatatactgtttgatgcatatcgtttagtgactggcattttactttattttctcgatttcagcgcttatgctgtccataaatttagttattttcagtgcactgaatctgtggttcatatttgtatatggcatctattggagaaattgaagaacacatcttatcataggagaatcttgtgtaaatggtatagggttttttaggaatcaatgaaatgtatcactctttgtgatgttgatttgtattgtggcaggttttaagttcatcctttcataaagttgacttcctacaaaaatgaactgtctttgttgaactgtgacccgttcttatcattgctacctcaatggtgatggaaaagggagaagaatggatggatcatctgcaggtgcctctcattaagtattggcaacataagtgatttgtctgagatctattctatcttcatgatgatgctggcctttccggaccagtctttctccatatgagagagttgatcagggcatggataggtgctgactgctgaccaaaagaacaagtcgggatggagtagtaaaatatctgttatacaaaagcagaggaggaaaagaaaagataggcgtaggataagctggcaaggcacatagcatttcctcgatttgaggggatcaagatccatcaatggacgatctgaagataggcctgaaaactgacgacaacacctagtcctgaatgataagacctgaattattggaggggactttgcttgtgctttctccacatgcatagatgcatgaatgtatcagatgcctgtccacaccagtcttcaaagttatgtcacatcacgaataaaataggtacagtccgatcagttcaatggtagctcg

SEQ ID NO: 19887 - DNA, 563 bp, Zea Mays
gtccacatgtgtttgcaaacttagcccaataaaaaaaaaactgaatgccgacctggaattagtctacgactcaatagccgtggaatccatcccggccacggtcggaggaagtgactccgccgcgggccgccatcttcgtcggtgatcttttctcctcaagtcaacaatcaaggcaacgatctaccacaaaactttgttgatctaccagatggcgatcaagacaacgatcaagaaaatgtacaaggcaataatcttagagatgcaatagcacaagaaacgtggaatgattaccaacaacataaaaattagtggtacatttgttgagctatttgttcgtagaaactgtctttgtttattgttgcttcctaatgaaaaacatgttacagatgagcttactttgaagatatggttccctgtaaccactatgcctcctaattatgtcatgttgctgtttatgtcatatatgttgcttcctaattagtggtacatttgttgtggtattgttgcttcctaattctgttgtgtgtgtattgcttactctgaagatctggttggtttgtaac

SEQ ID NO: 19888 - DNA, 1284 bp, Zea Mays
ccagttttgatgccaaaagcatgctggagaagctacgaaacaaaagagtggtttttgttggtgattcaattggaaggaaccaatgggagtctctactttgtatgctctctagcgctgttcataacaagagctctatctacgaagttaatgggagtcccatcacaaagcacatgggtttcttgattttcaattttagagactacaattgcacggtggaatactacagatccccttttatagtccttcaaggccgtgcaccagcaggagcacctgagattgtccggtacagtattcgagtggatgcaatggattggatgtccgaccggggtaaatggaaggatgctgatgtactgatcttcaacactgggcactggtggaacaatgagaaaacaatcagggggggtgcctactttcaagtaggcgatgaggtcaaaatgggcatgagtgttgctgaggcttacagaagatcgatagagacattgtccgattggcttcgcaaagaagtcaacacgagcaagacccatgtcatctaccgcacatatgctcctgtgcatttcagagatggtgactggaagactggtgggagctgccacttggaaactcttccagacgcgatgccagtgaagtccctggacgaatgggccgacttgctccaacccgtggacgaatttctagggagcgatcttggatccgagctggctggtgtagacctgcttcgcgtgacgggaatgacggcccagagaaaagacggccacctctcggtctacctgagcccctcaggacccgtgccccgctacagacaggactgcagccactggtgtcttcctggagtccccgatgcctggaacgagcttctctacgccctcgtcatgaggaggcataagaagatggccggcactaggacaccggacgctgaagagggagatgtcttcagcagtggatcatcatcgtgacaaaacgagcttcgtagccatccatccatcctggctaggcgatgacagctgctgtttcacataggatgccggaatggcgagacacgtttttggaccatgggtgctgtttgcaagaagctgagctagacgtcagtggtagtatagctttgtgtgtggtgatggcaacttgtatggctaatggggaggtatttggaattggcagtgtaactagctagggtcgctacagcgaatgatgtacatatgtattcttttagcactcgttcgatgattcatattccatgtaggttttgatgggattaaaaagaaaattataaatttttttacctttgaa

SEQ ID NO: 19889 - DNA, 3382 bp, Zea Mays
tctccggtgcccctcaagaccaggagcactgccgcgcgccgcgtcgtcgactcgtcggtgagtgagtgagtcccggcctggcgtggcgttcgtcgcggggcatcatcatcagagccaggtgagtccatccatctcgctctccacttactgcacatgaacaaatggaacgcagcattgcctgtaccgtacttggtcgggtcatgtgatccgactcctatcttctgggcaagtaaaagatggagggggaaaaaattcaagcttctgcgtagggtctgtggcacaacataggggatcgacggacgactaaattattactatccacgagtaaaaattgcatattttttttggacttgggaaccactttgtaccttacctgtctggaatctgcacctagtagtacaacttaaatgtcccttgtggccatgcgcccatgccacagccactatggcagccagttgggctgggcaggctgacgacggacggacagaggcacggctgacaagatccccggcgatcctttgttgccggccgggcctgccctgcgcccctgcccctaccacgtggcctctgccgcccgcactcgttttcgactggaaaaaggaaccacgtactgctgcatgcgtggtgcgtggtctgggacccaaaaaagcaaaaaaaaaaaaaaagcggttcagtttatacgcgtgaccgaaaaacaggccgtctgcgctttcggcatcgtgggtggacgactggacggacgcggcaggccagccaggcactccttctcccggggggtgcgccaatcacggcggcggccatgtttagcgtccgtccatcccagcctggagtggagcagcatgaacgacgaacttattagcaacccccggccgggccgcggggtctcgggtggggccgtgcgtcgctgctggtgctcctcccggctcccggcgggcgggcgagtggcgacgccatgcaccacggtctacacgttgctgcacgggccgggcggcgcgccttcgtgttactgcggacggtggtggccgccgtcgacggcgacagctccgatccctgagctctatctctcacccacggccagctgcaggacttgaggtctcacggtcactcaagtcgtctggtctgagtgagccatggcggaggccaaccgcaggacgacgccccggccccgcgcggtgccgccgctgctcgccgaggtggaggtctccaacctgcccggcttcgacgtcaccccaacgccgagcccgcacggccaggacgccaccacgccgagcccgcgcccgcccacgaagccgtcgtcccgccccggggtgccgccgctggaccgcgtgccgtgccgcagcgaggtggtgttcccgccgctggactcgccgttccaggcgccgggctaccgctccgtgcagcccgtctccatcagcctcccggcgtcgcccatcggcttcggcttcggcgtgcccgtcatccccgcgccggccaacgccgccgccgccgactcggacgacgacggcctccggaggcaggccctccaggccaacgccgcggccggcgacccgcagcaggcgccggcgccgacgccgccgcccgcgcgggagaatggaggagggggcgtccggttcatgcaccagccggacaagctggtgttccgctcgcagcccattcccggcggccagccacagcgcgccggcagccgagccgcccgggcctgcagggccatcagccgggacaggcgctatgacacgttcaagaccttctccgggaagctcgagcgccagctcacccacctggccggcgccccggaggtccaagaggtgcgaggagatgacgccgtcgacgccgccacctcccgcaccacgtccatgcccaaagtcgatcgcttcttcgccgcactggaaggccccgaactcgacaagctcaagacgtctgaggaactggtgctgccgtcggacaagacgtggccgttcctgctccggttccccgtgtcggcgttcggtatctgcctgggcgtgagcagccaggcgatcctgtggaagacgatcgcgtcgtcgtcgccgaccacgttcctgcacgtatcccacaaggtgaacctggtgctctggtgcatctccgtgctgctcatgtgcgccatcacggccgtctacgcgctcaagctcgccttcttcttcgaggccgtgaggcgcgagtactaccaccccatccgggtcaacttcttcttcgcgccgtggatcgcctgcctcttcctcgccatcggcgtgccgccgtccgtggccactgagcccctgccgaggtggctctggtacgcgctcatggcgcccgtgctcttcatggagctcaagatctacggccagtggatgtccggcggccagaggcgcctgtccaaggtggccaacccgtccaaccacctgtccgtggtgggcaacttcgtgggcgcgctgctgggcgccaacatggggctcagggagggccccgtcttcttcttctccgtggggctggcgcactacagcgtgctgttcgtcacgttgtaccagcggctccccaccaacgagacgctgcctaaggagctccacccggtcttcttcctcttcgtggcggcgcccagcgtggcgagcatggcgtgggccaagatcacgggcgagttcggctacgggcccagggtggcctacttcatcgccatgttcctgtacgcgtcgctggcggtgcggatcaacttcttccgggggttccgcttctcgctggcgtggtgggcgtacacgttcccgatgaccggcgccgccatcgcgtccatccgctactccaccgaggtggacaacaccttcaccaaggcgctctgcgtggcgctgtccgtgatcgccgtgctcacggtgacggcgctgttcgtcaccacgctggtgcacgcgttcgtgctccggaagctcttccccaacgacatctgcatcgccatcacggaccacaagatgaagcccatcatggagctgcacgagagccatggcgaggacagcagcaccaacagcaacgacatcgagaccggcgccggtggcaaacagtgagggacgcgacgcctagctaggaagcatgcataagcaatgcacgcgcgcgcacacccaagtcgccgagcttcacgcacgccaagcgtggggggatgacgcgaccgagttcttgcttggattggattggatctttctataggattgcctacttggttcgatggcgcacgctgaggacctttgatggattgcatctattagttactctatctactactagtcagtagagaactacttgaatgtacagagtgggctacgttgtatgaaacgcggctgcttatttatcgtggaaacattatgcatgcagagtggctttaaaacttaagcatctcatcagttcctcc

SEQ ID NO: 19890 - DNA, 1280 bp, Zea Mays
ctttcttcccgccggattgacgaaatcgatcgctccgctcccaccggccaccaccagtccaccacacctcgatccccgcaccgcccagccggccgcccgcatccaccgcacaaaaccctaggcatggccccaccctaaaccccttgctccccacctcgtatggtcgtcgtccccttctccctccgcattgcgcgaaaccccatccgcctccgccttcttccggtctccgctgctcgcttcacccgtctcgccatgtcgaccacgccgccggcggcggctaccatatccgtcgagtatgccaagtccgggcgctcaatctgcaaggggtgcagcggggtcatcgcctccggggcgctccgcctcggcgcctctgcgcgcgacccccgtggcttcggcgccaccaagtggtaccacgtctcctgcttaccctcctcgtcgtacccgctcggccccatcgggagtatcaaggggttcgactccattaaggaccatgatcgtgcggaattgcgagaactagagaagaatcataaaagagacaatactgcagtcagccctccggaggaacaacgtccaaagaaagcaaggattcagatgttttcccctgcggagggggtgccagataatgtaacagtctctgttgagtatgcgaagtctggtcgctctacctgcaagggctgcagtgagaatattgccaaaggtgccctccgccttggtgcctcttttcctgatccccgtggctacgaaaatactaagtggtaccatgttgtgtgcttccctacatcatcatacccattatttccaatgtcaaatctgaaggggtttgattcaattgaggatcatgaccgtgacaagttgcacaaattggtggagaatcacaagagcgatggaaaagcggctgatgtattgaatgagtcaaatctgaagagagaaatggctcacagcatggatgactcgaatgaaggtgctgaaaaggatctggaaggaataaagattcactgcatgggggagtttgaagaaggtgctgaaaagaacctggaagaagcaaagttacctgcagggaacaaaatgattggtccatcgatatccttttcactttctgatataaaaaaagaatacaagaatgctacccttcctgctcattggaaggtttttgatacagttatcttccgtgagaaggaagatggccttcatgcttcatctaagattgctgcatttgattttgatgggtgccttgccaataccagtatgaagagacccctacgggaaaggcctcccacggt

SEQ ID NO: 19891 - DNA, 1351 bp, Zea Mays
tctgtacaagtggcgatgaacaagcacgtacacccgttcagcacagctgacaagtccatgaacaccgagtcaacggcgtacgagttcctcgagtttgaatccgtttcatccggtcggtgtagcttcgtgtcaacttcacttattgatgcccatccatgttctgcccgttgcaacgactggtcttacatctctgactgctggtggctctagaacaagaaccgggaactgacaatagcattgctcactggcagctgttattagtgtatagcttgttcacaatttcgagataaaagatccaatttcgaatagcgttggaattgttctgcaagtgttttcctgatgatgcctgtgcctgtgtgtgggactgggacatgggaatgcagcagcagaagaacgcgcacgtgcccaagttcggcaactgggacagcgacggcaacgtgccgtacacgctcttcttcgagaacgcgcgcaagggcaagggagccggagccgccggcggcaggatgatcaaccccaacgaccccgccgagaacccggaggccttctccgtggccgcgccgtcgccgccgccgggccgccacgagcgccgccccagcgacgcgccgccgccgccgatgtcgcccaacccctactacgccgccgggtcgccgtaccaccgccacgccgccggcgagccgccaaggagggccgccgggtacagcgtcgaccagtcgccggcgcacccctacagctccgagagcgccgggtacggcctcgtcgccagctccgtcgaccgctcccgcgccaagggcgcctcgcgcggcaacgagacgccgacgaggggctcggcggtgcccaagttcggcgactgggacgccaacccggcgtcggcggacggctacacgcacatcttcaacaaggtgagggaggagaagcagacgacccaggcggggaagccagcggcgtacggcaaggacggcatgcgtaccaacggccccaagcagcacgacgacgacggctacgtctcatcgaaattctcgtgctttgggtggtgcaagtagagagcgattgcctgatgaatggtgacgatggatggatggatgcagacgctggttcctctgggtctggggatgtaagtctggagaacgaggggcatgaaacgatctccatgatctttcctgtggtagattttcacttcaatttatgaagtgagacatagagttgctgtcatgttagaagtaagcattccattgttgcgttggttcttccgtattgaattgaatttacagtacatgtatcatgtatgtacgattgtacgcaggattggactctgaactccgaggtgaatatatgtgtgtttgtttggtgtcca

SEQ ID NO: 19892 - DNA, 3356 bp, Zea Mays
tccggacgcatggatttatctgaaatcctacgagactaagcaatataagaaagggcttaaggctgcagattccatattaaaaaagtttccagagcatggtgaaacactatcaatgaaaggtttgacgctaaactgcatggaccgaaaatctgaagcgtacgagcttgttcgacgaggcctgaagaatgatctgaagagtcatgtctgttggcatgtttatggtttgctttatcggtcagatagagaatacagagaagctataaaatgttacagaaatgcattgaggattgatccagataacatagaaattcttcgtgacttgtcccttctccaggcacagatgagggacttgtctggctttgttgagactaggcaacaacttttgtcgttaaagccaaatcaccgcatgaactggattggttttgcggttgctcatcatttgaattctaattcttccaaggcagtagaagtattggaggcatacgagggaacactggaagatgattatcctccagagaatgagcgatatgaacacaatgaaatgctgctgtataagatatcattgtttgaagaatgtgggatgctagacagagcccttgaggaaatgcagaagaaggagagcaaaattgttgacaagctatcattcaaagaacaaatggcatccgtcttgttcaaacttggccgctttgatgaatctgagagcatatacagatccctgctttttatgaatcctgataactacaaatacttcattgctgtgcaaaagtgccttggcttatactctgataatggtcaatattctgctgctgatgttgagcgcttaagtgcattgtacaactcacttaaagagaagtatgcttggtcatctgctgtgaagcgtatccctcttgattttctggaaggtgagaagttccaggaggcagcagacaactatgtcagacctctattaacaaagggtgtgccctcactattttccgatttaagcccactgtatgaacatcctggcaaggcaaacatactggagcagttatttcttaaactagaagattcaattagggattctggatgctttcctggatgtccacagaaggagcctccttccacactgttgtggaccctgtttttgatttctcagcactacgacagaagagggcaatatgacattgctttgaataaaatcgatgaggctatctcacatacaccgactgtcatcgatctatattcagtaaagggaaagatattgcaacatgctggaaatttcacagcagcagccgcattagcagatgaagctaggtccatggatcttgctgatcgttatttaaacagcgagtgtgttatgcagatgcttcaggctgaccaggttggccttgccgagaagactgctgtcttgtttacaaaagatggtgatcaacacaataatcttcatgacatgcagtgcatgtggtatgagcttgcttctggggagagctattaccgtcaaggtgatcttggccgggccctaaaaaatttcttggcagttgaaaagcattacgctgatatgactgaagatcaatttgacttccattcatattgcttgcggaaaatgacacttcgagcatatgtttctatgctgaagtttcaggatcgtttgcatgctcatgaatacttccacaaggctgctgctggagctatcaggtgctatatgaaactacatgattctccaacaaaatcttctaaggaagagaatgatgagatatcaaaactgccacctgctcagaggaagaagttgaggcaaaagcagaagaaagcagaagcgcgtgctaaaagggaggctgaagagaaacaagaggatgaaacagcttcatctaacagttcaaaatctggcaagaaacaacatgcaagaccagttgatctggatccacatggtgaaaaattaatccagattgaagacccgcttgcagaagccacaaaatacttgaagcttctgcagaataactcgtcagactcattagagacccatatactttcatttgagctaagcatgagaaagcaaaaggttttacttgctttccaggcagttaaacagctcattaaattggatgaagataatccagacagtcaccgttgtttgataaagttcttccacaagataaacagtcttcctggacctgtgactgattctgagaagctaatttggaatgttctggaagctgaacgacctgacatgaggcaattacatggaaagtccctcgttgaagtaaacagaagtttccttgaaaaacacaatgcttccttgatgcaccgagcagctggtgctgaaatgatgtatctcttagagccaaataagaagatggaggcaattaatttaattgaagattcaacaaatattacatcatcagggcatagtttgcttggtcctgtaaaaacatggcaaattcaagattgtattgatgttcataaattgctggagacagtctttggtgatcagaatgttgcaaataggtggaaggcacggtgcgcggaatattttccgtactcgacgtactttgaaggcatcaagagcgctatttcaacctatgccattgaccatagtctcgagagcccaccagaaaatggaattgcttcaaaccctcatctgaaatcaaaagatggagaacaagggagtttgaatgggactctgcatattgtagatgatttgagcagcctaagcattcggtaatgcacgaacaagttgctgaatggtcacaactggaacacaacattttagaactggagccagtacccaattaaccaaagcgtacacgaacaaggggaacaaagtgctctggtgcaagtagttgtcggcacatcacatatgaagagtatattattgattgggagctgaggtgtccagtcaggttattgtcttggttccagcctgtacctttttgttgccattttgtagacagggaaagaaaaaaaatcttccgtctcaattacggtgaagttgtgacagcgtttgttgcctagcgatatcagggtgtgaccattcgtttgaaacagtgctccctctctttttggactacaaaattttggcacaaagcaggtgtacaaggttaaaccttttaaaactttcatctatttgtttcgggatagtttggtgtgtgggggggtttgtcttgatcctttgtgctactgcaacatttggtcctcgacattgtaaattagttaatcttaaacatagaaactgtattccagttgtcatgacaaataatgatcaatgttaaccctgggtgtttgatctattccatttgggatgcgttgaaaagcatgcattgtcggatttgaagataaaaatccataatgttacatttattaatcatacttgtatagtgacc

SEQ ID NO: 19893 - DNA, 4740 bp, Zea Mays
aagagatggaaatgggtggcggcggcagacgcacgcagatcatgttgagggcgtccatgcggatgttggggacgatttcgacaatctcatcctcagccacgaactccacctgcagcacagacaggacaggtccaaacattccctttgacgaagatagtctagtccctgcctgtgattgtggaagggatggggttggttacctcggagggcgagaagatggagaggtgcgggtcggactgccccgccatgaatgccccccactggaacgccgggactcgtgagagagagcaatggaggcgctgctgcgggtcggaggcggcgaggcgagagcgaggtcgacggagagaggaggctacaggtcgctgggactctctaaactacagcccaatctgagtgcccgaaagcccatccaacaacagagcccaacagccgcttcacgcagcttcagttcgatttggtcgggtcgcggcagcgcacggcgggtgaggcagcggcgaggcggggcggcggggcgccgcggttgcctttctcgctgctcctgcagtcctgctcgctcagcgccgggacccgggagaggttattagggtttccttctcatcaactttagccccagcagcaacacagccagcagaagagggcgggcccgatgctggccgcccggaacccccctccgccgccccatgacatcgccgcgcgcctccaccacctgcgcgacctccgcagggtgccgctccccaaccgcgtcgcgcgcatcgccgacctccacaccgatgaggccagccccgtgcgcaagcttgttgccgagatcatcggtgagcttgggtcaaaacacatgaggtatctacctgatatgatcccttgtttgctgcaccttctgaatgatgagacgcctgcagtcgtcaggcaagctgttaagacaggaaccaacttgtttgccaaagtactccaaaagctagctatccagggtttattctccaatggagggattgatgatgcacttaaatcatcatgggaatggctgctcaagttcaaatcaggtgtctcgcacatggcatttcaggccaccggcaatgaaggtgtcaggttactggctattaagtttgttgaaaaaacagttcttatgtacacaccagatcctgatgtcccatctgatccgccaactgaaacaacagaagatatggcattcaatgtagcttggttacgaggaggtcaccctttgcttaatgttggggatctggccatggaagccagccagagtcttggattgttgctagagcagctcaagtctcctaaagtaaagtcactcagtacttccatgatcattgtcttcgttactagtctctcagctattgcccaaagaaggccttcattttatggacgcatattgccagttttactttccttggatccagcaagttctattattaaattgagagtcccgggcgcattccatgccttgaagagtgccttctctgcatgcctgaaatgcacacattcaagtgctgagccgtggcgagcacgcctattggaagctcaaaatattatcaaccaagggggttcaatagaagatgcagcaaatgctgctaagaatttcggggacacttcaaacagggaagaatcgtggcctctgatggagagaagcactgacggtagtaacaagcgtagtctggctgaagacatgaatcatgtgacagaggatgatgtccactccactaaaagagccaggcaatcaattgatgctaatgaacatagtgaagaggcaaacaagacaaattttgagtcgatgtctgttgatatctcatctagccagcccagctctataagaactgggaattcagaagctgtgtatcaattaattggtatgtttgctgcactagctgcacaaggtgacagagcagctggatcactgcaaatcctttcatacagtatcgctagtgacttactagcggaggtggtaatggttaacatgcaacatctcccaatctctcgtcctgaagttgaccaacagcagcttccttctacgagctctggagatggacttccactttcaagtttctcctctctgctggggattctgctgaagggagcgaaccaaattgatcaagatgaagtgtctccagctaaagaacctgcgctggtgtcgtcagttgcagatgacagaatgatacttcctgctaattcacctgttcctagctcagtaaatctacctatcgaagagaacagtaacagtccaacagttccattatgtatagaaacaacagaggccaaagtaaccagtgcaggtggcaatagttcgattgatattccagaatcatcagaagcttcccatgcctcaacagagccccagggaacccaagagcatgctagcacttttgccggtccatttcctgctgataatttctcagttggatttagtttggcacaatcgtcagaaactcgcagcccaagctcttctacattggaagcaaaccactcacagctttcatcccttagttcacaatatgttcttccaaagttggttgtcaataatattgatctcagtgatgaggccaaagatctccttcaaaaagaggcgtttgtgcggattcttgagagtgataagaaagaagcatctggtggttcaattgctcgccttccgttgcttgctcacctgggtgttgagtttcctctggaatttgatccttgggtgattcttcaaaagcacattctctctgattatgcgaataatgaggggcacgagttgactatatgcatcctgaaccggctatatcatgaggcagagcaggatcacgatttcctttcatctagaactgctacatcagtttacgaatcctttcttctaaacatagctgaaaatcttcgagacatgtttccagcttcagataagtcacttggcaaattgctttgtgagataccatacttaccagaaggtgtgctgaaactgcttgaaagtttatgttctcctggaagtaatgagaggcaggacaaggatattcagagtggtgatagggtaactcaaggtctcagtgctgtctggaaccttatcatgctaagaccttcaaatcgggacagatgtctggagattgctttgcagagttcaactcatcatctagaggaggtccgcatgaaggcaatacgtttggtggcaaataagttatttcctatgacaagcatttccaaaaagattgaagattttgcaaatgaaaaacttaattcagtgctggaaatgactccatctggtgattgtgtaactactgaaatggctacacctgaagcacacaaagatattggtttagaaaacttaacagcttcagtaacaggcatgcagactctgatgtctctatactttgcattgtgcaccaagaaacattcccttctcagacatgtatttgcaatatatggtaatctaccgcaagctgccaagcaggcagttcatcaacaagtaccaattctgatacgcactataggctcctcctctgatcttcttggaatcatctcagatccaccagctgactgccgggacctcctcatgcaggttttacaaaccctcactgatgctgcggttccatctaaagatctgatttcttccataaagatcttatattctaaaacaaaggatgttgagttcctttttgcaatcttggttcatctaccaaaagatgaggtcctgcctgtgttccccagtattgttaatcttccaatagacaagtttcaaagtgccatttcccgaatcttgcagggatcacctcggaatggcccttcacttgatccatcagaaattttaattgcaattcatgtaatagctcctgataaggaaggaataccactcaaaaaggttatggatgcatgctcttcttgctttgagcaaagaacaatatttacccagcaagttctggcaaaagcactaaatcaactggttgaacagattcctcttcctttgctattcatgaggactgtcatgcaagcaataggtgtttttcctgcattggtggattttgtgatggagatcatgtcacgccttgtgagcaagcagatttggaaatatcccaagttatgggtaggatttctgaagtgtgctatcttgacaaaacctcagtcatatggtgtgttgctgcagttaccagctcctcaacttgagaatgccttgagtaagaacccgacactgaagacgcccttggctgagcatgccgagcagccaaatattcggtcgacacttccaaggtctactttggtggttctgggtcttgctgaagatcaaccacagcaaccagcagtaacacaggtgcagagcagccaaaaccaggctgcggaaaccagtagctctgctgctgatacggctacagaagtaactcaggaatcttctggtgctagctaacatcttttatgccgaaatgggctaatgcttgcagaatcaaatacaggattggctggatggcagagtagatacttcagataatgaagccggtgaagttcttaaagaaaggtcaatgagtcgatgaaagtgggttcaatataggccaatttgatgaacacaggcattgaattatactagattaggctgctgaatagcgtaatacctacatccatttaggtgtgttttcttgttagcgtgctattgtaatgtctatattgtaatgggtctcgacccaccaaactttgttatattaatgcactcccaatcttgattaggattagggttttcaatatgttataaagctagattctctcttccccctttca

SEQ ID NO: 19894 - DNA, 1219 bp, Zea Mays
cagcctaccgggagcgactgagcgtacgggttatccccgtttctacgcgctcgctcctgtacctctccccagtgcccaagaatccaagatctggaagggccaggtgggaggaccaagcttcgtcgacgtcgactcctcgtcctccctcacctcgctcgcttctctgcaattctccgcagccctcctctttcggtctttcccgctggcctcctcttttcaaaaccctcgctaatctcgtgccccgtcccacccacctctagcttcgaatcctagcgcctcgcctccgcattctagggtttccccgcctccggcgccggccatggaggcggtggtcgtcgacgcgggctctaagctgctcaaggccggcatcgcggcgcccgaccaggcacccccactggtaatgccgtcgaagatgaagctggatgttgaggaccaggagatggctgacggcgcggtggtagaggaggtggtgcaccctgtggtgcgcggcttcgtcaaggactgggacgccatggaggacctactcaactacgtcctgtacagggacattgggtgggagattggggacgagggtcagattctcttcaccgaacccctcttcacgccaaagactcttcgggagcaattggtgcagcttatgtttgaaaagttcaatgtttcaggcttttatgcctctgaacaggctgtattgtcactctatgctgttggacgcatttcaggatgtaccgttgacattggtcacgggaaaatagatattgctccagtttgtgaaggagctgttcaacacatagcttctaagagattagagattgggggagttgacttgacaaacctgtttgcacaagaactgaaaaaatccaacccatcagtaaaccttgatgttgctgatgttgagctgctgaaagagcagtatgcgtgttgcacagaagattatttgacttttgaaagtatagaaagctcttgccaaccagaaaagcacactcttcctgatgggcaggttataacaattgaaaaagaggggtacattgttggtgaagctttatttcaaccacgtatattgggcttggaagattatggtatcgttcaccagctagttactagtgtctcaaatgtttcatcagagtaccatcgtcagctgcttgaaaataccatgttatgtggtggcacctcatcaatgactgactcgtttgatcgctaaggtttatctcacttgctttcc

SEQ ID NO: 19895 - DNA, 829 bp, Zea Mays
caagatttgattgaacaaatttcagaggtctaggttcaagaatggatgatatctgtgggcgggattgggtacctggtggcggtgaccatggcgatccagatcttgagcgagccatctccgatttgcaaagggaagccagagtttccatcccgctggtcgtttttgggcacatgcacaagagcctggcctacgggagaggcttgaggaagatgatcgcctttggagccaaccacatcatatatctgaacggagcagttgtgcctagagtgaaatttgcccaaacaactcctgggcacgagcaaaatcaacccgaaggatcgggatccagagctccaacgttgcgcgcgttcaccattgccgatctctatgaagggcgtgtggagaagatctctgaggtctgggtactggtgagtggcgccaggaccgaggtcgaggaggaaatcgtcttgtacaagcatcctcgagagcagcatatgtgatggttatgagaccattatcttaccaaaaaaagatgtggagttgtgagacgaaaatgtgactgttgtgaatgccgtaaatgtgggggcgatgctgaagttgtgtgttataaagtgccttgtattccaactgaaaggagcacttcattatagagagcctgttacggcttctacctctggcactctgtgactgttattagtaagtaataattgtagctgattgacggaagagagatcttttgaaaaagaaaaatgtgtctccattctaaggatggattcgggtgtctggagatccgaattatttgtattcggataaagtgctaatatagatatccgtattcatattcgatttt

SEQ ID NO: 19896 - DNA, 1883 bp, Zea Mays
tgctctcaattgggcgccttctatctagttctgcagggcaaaagaacaattgactattgcatatcattgtcctcccaccatgattccaaagattagacgatatcgacatgcagcatactgaacgcatcaagcatcctgatccaactctgaaaccacaggaccgagcgtggaaactcccggaccggacattccattttccattccgaagggggggtgagaaggcggggaatgagtacaaccaaggtgaagagacgtgtgggcaagtatgagctcggccggaccataggcgagggcaccttcgcgaaggtcaggttcgcgagggacacggtcaccggcgaggccgtggccattaagatcctggacaaggagaaggtcctcaggcacaagatggttgagcagatcaagcgggagatctcgacgatgaagctgatcaagcaccctaacgtcgtccgcatatacgaggtgatgggaagtaaaacaaagatctacattgtgttagaattcgctaccggtggcgagctctttgatacaattgttaaccatggtcgaatgagggaagacgaggcaaggaggtacttccaacagttaatcaatgcagttgattattgtcatagcaggggtgtgtaccaccgggatttaaaacctgaaaatttgctgcttgattcatatggtaacctgaaggtctctgactttgggctcagcgcgctatctcagcaaatcaaggatgatggactgctgcacacaacttgtgggactccaaactatgttgcaccagaggtccttgaagatcaaggctacgatggagcaatggctgatctgtggtcatgtggagttatcctgtttgttctgctagcagggtatttgccgtttgaggattctaatctcatgactttgtataagaaaatatcaaatgcagaatttacatttccaccatggacatcttttcctgccaagaggttgttaacaagaatccttgatccaaatccaatgacgagaataacaatcccagaaatattagaggatgagtggttcaaaaagggctacaagcgcccagaatttgatgaacaatatgacaccacattggatgatgtggatgccgtcttcaatgattcagaagagcaccatgtgacagaaaagaaagaagaagaaccagtagctctgaacgcattcgaactgatttcgatgtcagcgggcctaaaccttggaaacttatttgactcagagcaggagttcaaaagagaaacaaggtttacatcaaaatgtccccccaaagaaattgtccgcaagatcgaggaagctgcaaaacctctaggatttgatgttcagaagaaaaattacaagttgaggctcgaaaaggtaaaggcagggaggaagggaaacctcaacgttgctactgagatactgcaagttgcgccctctctccacatggtagaagtccgaaaagcaaagggtgacactctggaatttcataagttctacaagaacctttccaagaccttgaaggacgtcgtctggaaatccgacgatcttcaaacgcaacatgcttcttagcagaacctcagagaggaggaatggcaaactattttgtgcaccatcctttcaagcaaactattctgcatgtaacggtgggtgcccaggaaattgcgctggtgctccaccatcgttgtatatgctgcgtcttgagttgcttgctgtagctgaagggaagttcattcagtaggttttgagtatgagttttgtatatccgtatatgcctatgactatgagccgtgctggaacactatgatcagaaactgcgaaatggagcccagaatgttcttgccatcttgctccagttctcagcaccgggcttaacttgccttgcattttttgaagaagaaaaa

SEQ ID NO: 19897 - DNA, 2122 bp, Zea Mays
ccggatgtcccgcaaccaaacacatcctcaatgaacttcaatgcaccaaaggcacataacacatgcatgcataagccatcggtgcaactgtgctacaaaatggaaatatagaataggtgtttgtgttggtggtgctgcctaagctccaaggtcctgaaattatgaaggcaaaaattgtactgttggttattattatttgtcaatatgtgcctcgactgctccgaataataccactttaccttcaaatcacaagatctgctggcatacttacagagacagcatgggctggtgctgctttcaaccttataatttatatgcttgccagtcatggctttggagctctttggtacattctttccatccagcgagaagacacctgttggagacaagcatgtatcaatcagactggctgtgatcctacatctttgtactgcgggtatcattcacttgcaaataattctttcttacaaaatgcgtgcccaacaaatagcactgccaatccagaccctatatttggaatctttctaccagctctccaaaatgtttcacaatcgacgagtttctttgaaaaactattctattgcttttggtgggggctacaaaatctaagttcccttggccagaacatgaaaacaagcactaatacattggagaatctgtttgctgtttttgtctcgacatcgggtttggttctatttgcactacttattggtaatgtgcagacctatttacagtcagcttctgtgcgtatcgaagaaatgagagtgaaaaggcgtgatacagagcagtggatggcacataggctactccctgagaatctaaaggatcggattatgcgccacgaacaatataggtggcaagaaacaagaggggttgacgaagagggccttcttaaaaatcttccaaaggatcttagaagagagataaagagacatctttgtttgtcacttctcatgaaggttccaatgtttgaaaacatggatgaacagctgttggatgccatgtgtgatcgtctaaagcctatgctgtacacagaaggaagctgcatcattcgcgaaggtgatccagtgaatgaaatgctcttcatcatgagaggaacactagagagtaccacaacaaatggtgggcaaactggtttcttcaactctaatgttctaaaaggtggagacttctgtggtgaagagctcctcacgtgggcccttgaccccacttcagcttcaaatcttcctggctcaactaggacagtgaagacgttgtctgaagtcgaagcttttgctctgagggctgacgacttgaagtttgttgccacacaatttaggaggctccacagcaaacaacttcagcataccttccggttttactcacagcaatggaggacctgggctgcttgcttcatacaggcagcttggcacagatactgtaggaagaagctggaagaggctttatatgagaaggagaagaggttacaagcagcaattgtaagtgatggcactacttcgctcagtctcggtgcagcgctctatgcttcacgttttgctggcaacatgatgcggatcttacggagaaatgccaccagaaaggcccgtttgcaggaaagagtacctgcaagactgttgcaaaagccagcagaacccaacttcttcgctgaagatagctgaacttgtaccctgtagcaagcagggattcatggtccaaccggtgaagtttgtgcagaagttaagattggatgctgtagatagacagatcaggtgctctaaagccgtctggtttaaatcacctaattcgcgaaaaggcctggtccgagttagattctccgttgaaataaatttgaagctgacgttaaaaaaaaaatccgcttttgctccacgttaaattctggcttccatagtggtcggactagggtgctgagataagggtattgagattttttagatctgtgtgaaaagattttctgtaacgtaatatctgaaggctgtcttatcctctgtaggttattttaaaaaaaacacgtatatttcgattgtatacaggtttcatgtattataaacactctaatttaccttgtgcatttgaaaaaagagagaagatgctgtgaatataatcgattaattgtttgttcatt

SEQ ID NO: 19898 - DNA, 2273 bp, Zea Mays
catgaactgcctgtctcaacggcctactcaccacactggtgggcggcggcggcacagcacaaacggcaaacgattcgaaagttgaggggtcctttcctaaaaatccactccctctcttctcttgtcgccctctttttcttgtgctctgctcgtctggtcgggaaggagcccaagccttccgcttcctcaccccgctagtcccataccctagccagggggggatcgcacctcttccgacgatgtcgacccacgccgcctcccgccgctcctcctcctcgtccgcggtcgccaagcgccccgcgatagcggagggagctaccaaggcggcgggaccgggccccaccgccgcgcaggcgaagaagcgcaccgcgctcgtcaacatcaccaacgtcgccgctccgggggcgagggtcgccgccgttgggaaggtcgcgccaccggtcaccggcgcgaagttgaatccagctacctcaggtgcacccttaaagaagccatctttggcaaatgctcgcaccatccggggttctgctgcgaagtcggcttccatcaagccagctccaccagtatcacgccatgacagcagctcagagcagaagcataatgttcttgtgcctaccactgtccatgtgccaagtcgtgctcctgccttggtaccctacagcagtttcgtgtctcctggacgttcaagagattcagtttctactgatgagacgatgtcgacttgtgactccatgaaaagcccggacttcgagtacatagacaatgggggttgctcgatgctggcttcgttgcagcgacgggcggatgaacatctgcgtacatcagaggacagagacgttgaagaaaataagtggaagaaaaatggccctgccccaatggaaatcgacagcatctgtgaagttgacagtaacctcgaggatccacagttgtgcgccgctctggcttctgacatctacatgcatctgcgagaagctgagatgaagaaaagaccatcgactgatttcatgaagacgattcaaaaggatgtcaaccctagcatgagggcaattttgatagactggctcgtggaagttgctgaagaatatcgtcttgctcctgataccttgtacctgacagtcaactacatcgaccgttatctttctggcaacgagatcaatcgccaaaggctgcaattacttggtgttgcttgcatgcttatagcggcaaaatacgaggagatatgtgcaccccaggttgaagaattctgctacataacagacaatacatacttcagagacgaggttctagaaatggaagcttctgtgctgaactacttgaagtttgaaatgacagcgcctacggcaaagtgtttcttgaggagatttgctcgttctgcacaggcgtgtgatgaggatcctgctctgcatctggagttcctggccaattacatcgctgagctatccctgctggagtacagtcttctgtcttaccctccatcactaatcgctgcctcagctattttcttggcgagatttgtactccagccaacgaagtatccttggaactccacgcttgctcactacacgcagtacaagccgtccgaattgagcgagtgtgtaaagacactgcaccgcctttccagtgttggtcctgggagcaacctcccagcaatcagagaaaagtacagccagcacaaatacaaatttgtcgcgaagaagcagtgcccgccacaaatccctgccgaattcttcagggatgcggcatgctagacaatagaaagaagcccagcggttgcttacttgattgattcttctccctgatgtggccagttcctgtttgtggtcatgtatgttacaaatccagagagttcaatagcagcactccacggcatgcatatgtatctggaaccatgtttagctactacgctgatggaatctgcaagtcaagtgctgtgccttgagatagatatatgtaacgaacagctagttcgaccttggtacagaaaagcattcttccagcgccctgtacgtatatgcagctgggtctgatctgttgtatgcctgaactgcacaacaacagatgaagaaccaaatcatgatgactaaccaatttaatttaatttattagctgtttctgacctagctaatctgcgctttggagttggaaacacacagcatcatgctggctgctgactctataatagttttgttcttttttgttggtatatgcctgttcgtttcatctcagtatggctgtctaacaacatctgtacaccaaataaacacgttgtaaaa

SEQ ID NO: 19899 - DNA, 1654 bp, Zea Mays
gcatccggccatttctggcgccctggactggaacattggcaagctgtgcttcgagtccgataccgagccgtacgcgctggcccgcgataagaaggtcacggattttgcattggcgtccggcatcgaggtgctcacgcccgtcagccacaccctcttcgacccagaagaaattataaagaagaacggtggtcggccgcctttgacatatcaatcctttgtctccattgctggggagccgccagctcccgccatggaggaatactccgagctcccaccgctaggagacacaggggaatacgagctgttgccggtgcctacggtggaggagcttgggtacggcgatatcagccaggaggagattccaccattccatggcggagagacagaagctctgaggagaatgaaagaatcgcttcaaaataaggaatgggttgccaaatttgagaaaccaaagggtgacccctctgcctttgtgaaaccttcaacaaccgttttgtcaccatatctaaagtttgggtgcctgtcttccagatatttttaccactgcattcaggatgtgcacaggagcgtcagaaaccatacaaaaccacctgtttcattgacaggacagttgctgtggcgagacttcttttacacagtgtcttatggaacacctaattttgatcggatgaaagggaacaaaatatgcaagcagattccgtggagcgagaacgaagatctatttgttgcatggagagatggccagacaggatatccgtggatcgatgctatcatgattcagctgaggaactggggttggatgcatcacctcgcacgccattctgttgcttgtttcttgactcgcggtgatatgtttatccactgggaaaaaggacgtgatgtgtttgaaaggctactgatagattctgactgggccattaacaacggcaactggctgtggctctcttgctcatccttcttctaccagtaccacagaatttactcccctattacattcgggaagaagtatgatcctaacgggaactacattaggcatttcatcccagtgctgaaagacatgccaagggagtacatttacgagccttggactgctcccactagcatccagaagaaagccaattgtattattggcaaagactacccaaaaccagtggttgatcatgagactgcaagcaaagagtgtagaaagaggatgggagaagcttatgcgttgagtcgcgttgatgccaaacctagcaaagggaagacgttgaactcacgccgaaaaatgctacatggtgaccgagacacgtctaactcaaccattgctaagcgactgaagaggaatagccgagctgagtgatgcgcagctcctcccgtgacaactttacactacttgttccaccttcagcattttttttttattttcagttgtgttacctgcatctgtcatatgtagctcgtctgacattttaccaaagtagtctgaccgtaaggaaatgacttgagcccgtagctagtgtgatatcctacactgaaggacatatctgtaatatatgctcatgtaataacaggtgtaataataataactgccgcccatgtactctaggtcttatttggaaggtgtgtgcagcaaatgaacagttcaagtgcaatccattaaagcaggtcgttt

SEQ ID NO: 19900 - DNA, 1716 bp, Zea Mays
gacagacacacacaccaggcgcggtatccactggtggtgttggtcttcgtcgccgtcaaggtcgtagcactcgcgtttcacatgacggcctgcccgctctcggacgaacccattcacccgtccggccgtccgtgcgcggcgcacccacccggcaccggcaccagcatcaccgcccgcccggcgcccgtcacgctcgagaggaggaggaagaagaagggactgggcgacagcgcgcgatggccgccgtcgtgtgcgtcaccggcgccggcggcttcatcggctcgtggatcgtcaagatcctcctcgcccgcgggtacgccgtccggggcacctcccgccgcgaagctgctgaccccaagaacgcgcacctgtgggcgctcgacggcgcggcggagcgcctcaccatgctgcaggtggacctgctcgaccgcgccagcctccgcgccgccttccgcggctgcgacggcgtcatccacaccgcctcgccgatgcacgacaaccccgaggagatcatcgagccgattatcgccgggacgcggaacgtcgtggaggcggcggcggacgccggcgtgcggcgcctggtgctgtcctccaccatcggcaccatgtacatggacccgcgccgcgaccccgacgccccgctcggcgactccagctggagcgacctcgagtactgcaagagcaccgagaactggtactgctacgcaaagacggtggcggagcagggcgcgtgggaggcggcgcgggcgcgggggctggacctggcggtggtcatcccggtggtggtgctcggcgagctgctgcagcccagtatgaacaccagcaccctgcacatcctcaagtacctcacgggacagacaaaggagtacgtcaacgagtcgcacgcctacgtgcacgtcagggacgccgccgaggcgcacgtcagggtgctggaggcgcccggagccggcggccgccggtacgtctgcgccgagcgcaccctgcaccgcggcgagctctgccgcatcctcgccggactcttcccggagtaccctattccgacaaggtgcaaggatcaggtgaacccactgaagaagggctacaagtttacgaaccaacctctgaaggaccttggcgtcaagttcacgccagtgcatgggtacctgtacgaagcagtgaagtcccttcaagacaaggggttcctcccgaagacatctggcgccaaggtgcctgaacgacgcagctgcctgcctcaaacgacatcacagccaccacccgaaatcgtttcgaaactttgaggtggatctgcacacgtgctcaaactggccatgtgtttttttgtcagaacaagccgttcatttgattggttattaaaagattttgggcagtctgttcttacatagcaaaaatgtcttgtctctgtctatggtgcatcctgttgcttttgcactacaactatacacatccttgtctgggtagtctgttctttacatagcaaaatgcgaagtctgcagggtgatttcagcgatgatggaagcatgcccgcccacctcttgactgcatgcgctggtcagctgcggcttattctacacatcttgcttgtctgtactagcctttgcatcgtgccttcgtattatgcttttctcctttcatagtacttattgacctttgcggccatcatcatcattttcatgataggccaccttgcccaatcttgggtatggacttaaacctata

SEQ ID NO: 19901 - DNA, 2483 bp, Zea Mays
cgccacgtagctctcgaccgcgctctcgccccgcctccctctcgcccgcctctcgcccgggcgggcgctccagcgcgggcgagagcgagtcccacaccataccaggtcaccatacccgcctccgccgcctggccgcgctctcccgccatgaagcagctccacaagtcttcccccacccaagcgccatcgccggcgcacgcaccggctcccaaggcagccaagccggcgcgccctggcccgcgctcctggatcgggtatatcctccgcgagcagcgcctcctcttcgtcctcctcggcgcgctcatcgccaccaccttcttcctcatccgtccctacttctcgctctccccgtcctcccacctccccgacgtccgcccgctcttctccttcgccgcccgctccgctgtcccgcccggcttccgcccgcccccgcgccgcgtcgtcgtcacaggcggggcagggttcgtcggcagccacctcgtcgaccggctcctagagcagggggacagcgtgatcgtggtcgacaacttcttcaccggcaggaaggagaacgtcgcgcaccacctccggaacccccggttcgagctgctccgccacgatgtagtcgaaccaatcctcctcgaggtcgaccggatctaccacctcgcatgccccgcgtcgcccgttcattacaagtataacccaatcaagacgatcaagacaaatgtcatgggaactttgaatatgttgggtctggcaaagcgagttggtgcaaggtttttgttgactagcacaagtgaagtttatggtgatccacttgagcatccacagaaggagtcatactggggacacgttaatcctattggtgttaggagctgttatgatgaggggaagagaacagctgagacttcaactatggactatcatcgtggtgctggtgttgaggtgcgtattgcccgcattttcaatacatatggtcctcgtatgtgtctcgatgatggccgtgtggtcagcaattttgttgcacaggcactacgaagacaaccaatgacggtttatggtgatggaaaacaaactcgaagtttccaatatgtttctgatctggttgctggattgatggctctaatggagagtgatcacattggtcctttcaacttgggaaacccaggagagtttaccatgttggagctagcacaggttgtgaaggaaacaattgacccaatggcaaccattgaattcaaacccaacacagctgatgatccccatatgagaaagccggatatcaccaaggctaagcaactgctacattgggagccaaacgtctctctcagagaaggccttccgctaatggtcaaagacttccgtcaaaggatctcggatgagtaatcgaggcaatcctacgatactggtgaccggtttgattctgaactatgctgcaaatacagtcagaagctctttatcgattggagccatgcagtacagtgtactgtgtacacagagactgtagaatcacccaggccccatttggaatgtggggatccatacaatttccactggatagtactgtttctgtgaaataactgaaaagttcatgggaagttcgtgttaatcttttttttttatatcttggtggggcagaacagaagcagtcaaatatttttttgtgcatatgtgaaattccagagttgtgggtggtgagagataggatacaatgctgtatgtatttcaggaacttctgtaacacgagaacattcatcatgtgaaaaaatgtaactgaatgtgttggccagctcgctcttgctgtacattcaactgacagtccacaaattccccattctcaagtgaaaaataacagtctcgtatacagtatctgagcagttttctggatacatttgtcatcagaagttgacttccaaaaacatcgaagctttgcaacacacagctctgacaacggcaaagccggaggcgccactgtaccgccccgtccctccgacgaccgcgacgtgagactcctcctggtcgtcgcggcggacgccgaagaagctgatgctgtcgcccgcgccgtcgccggcgaacgaggccttcacggccaccatatggctgccgttgtcagccacgccggtgacgaggacgccctgcagcctcccatccagaggcagcccgaactccttgctgccgcggagccgctcgtcgaccacggtgaccgcggcaggccggagcgcgtccggcctcgtcaaggcgcgcagccagcggctgccgattggcccctcgtccgtgaagaccgggcgccgcgtggaaggagctgtgggtttgggcgacgcgacgccggtgccggtggtgtacagcgtgatcgtttgggcggagctgcgggacggcggcgacggcgaggaaccgcggcgtgccggacgggcgctggctgccgtgctcgtcaccgcgagcaggagcgcgagagcggcggcgcaggcttgcttgaggatgcgagtgcgagattgcgcgtgcatctt

SEQ ID NO: 19902 - DNA, 3271 bp, Zea Mays
tcgcccgctgcctggtcagggtcaaccattcggctacaccggcgcgcccgccacccaaccgaacccaccttccaccacacccactggcagcccagcccagcccagccgcgccgacgggccccgcgcgtcattctctcacagctagctcgtcccagcgtcggcgtcgcggaagaacgctatacctcgcttcgccgctagtccaccaccacctaacaccaactcctctccaacctcctcgtcccgtccccgtcgattcgattcggtcgaagcgggcgggcggaggaggaggaggaggctagggattccggatgggcgcggcgccgaggaggctctagaggcgccagccgagttggtggtccggggggagagggagcggcgggagggcgggcggcgatggaggagaaggcgtcgtcgccgctgatcccgccgccgtcggagatcgacctggaggcgggcggcggcggagagcagctccagtgccggatctgcctcgagaccgacgggagggacttcatcgctccctgcaagtgcaaggggacgtccaagtacgtgcaccgcgactgcctcgaccactggagggcggtaaaggagggatttgcattttctcattgtactacctgcaaggctccatattacttgagggttcattcgcacactgacaggaaatggcgaacactgaagtttcgtttctttgttactagagatatattattcatctttgctctagtccagattatcatctctgcattggcatatttggtacattttattgatgggtgccaacaatattggttgaggacagcctgggcttttgataatgaagttagtttttattatatctgtggtgcattaatgttttttgctttgttgggactatcgggatgcttcataacctgttatgaccgaagagtacggaacgacctggctcagccttgtcgagaattatgtctttgttgctgtcagccagggatgtgtgcggattgccacctacctggcacgctgtgcatgtggactgactgcactacctgcttcgaaggctgtgctaccacagccggcgagtgcggtggttgcttgggaggggctggggaagccgggctaccgcttctcctcatcatgggggtcattgtgctggggcttttcacggtcatcggcatattctacagtgtcctggtcgcgaccatggttggccagcggatctggcagcgccactaccacattcttgccaaacggttgctaaccaaggagtatgttgtagaggacgtcgatggcgagcgcacagactggtgtccgccgccactgcccgcggagcacatcagccagctgaagtctctggggcttctgtaatatggaggctggtgaccctaagctaagaccggcgtggcgttacccagctccagctgtacaggagggaggctatactgtcaggcattctgcgttgaaatgtgtcaatattgatactttttctctttttttttcccttcttttttgtacattgtaatggcaaagctttctccctgacaaaacccaaaacttatatcaagtgaaaccgcctacatttttactggacaattcctttttaggccttgttcggctattcccattatacatgaattgtatgatattggaaacaatttagaagaattttgacttgcttgagatttaaacccacccaatctcactcaatctacatgaattgagagctaaccgaacgtgatcaacggcaactgggattcacagtacgaacctcgacctcgggttctgtaactgggacctttgtaagccagtgttctacatttttacttgattctacatgcagaattgtatcaaattgtttcgctgtttgattactgaacggattcttccccaaaaaagtttataaaaataaaaaggcgttttaaaacttacaagcccaactgcccaagttctttcaagtttcagctcaacttcgggtgcgggcctgttgggctcaatactttgggaacatcggtctggtggcccatgttctactatgaagagcttcccagccaccgaggcctagctagctcacttcgctcccctctttcttccccacgaaaccagagcaaattccggcgagccggtgcggtgcggcggaggaggccgagggagacgccggcgcgagaaggagcatcaggaggaggcagcggagatggatccggactcggtgaagtcgacgctctctaacctggccttcggcaacgtcatcgccgccgccgcccgcgacctccaaaaggaaatggtggctaaagacaaggctcaatcagcacctgcaagccatgatgaagttgatcttgatgagctgttggatgacccagaacttgagaagttgcacgcggagagaattgctgcccttaagaaagaagttgagaagcgtgaagtgctaaaaaggcaaggtcatggtgaatacagggagataactgaaggggacttcctcggggaggttactggcagtgaaaaagtcatatgccatttttaccaccgtgaattttaccgttgcaagatcatggataagcatttgaaggcccttgccccagtctatgtgggaacaaaattcgtcaagcttgatgctgaaaatgctccattctttgtggccaaactggcaatcaagacactgccatgtgtaatattgttcaagaagggtattgctgttgaccgattagttgggtttcaagatctcagaagtaaagacgattttccgacaagagcgttggaaaatattctcaagacgaaagggataattgatgagaagaagaaagatgacgacgatgacgatgaagaaagcgaggctaagaataggagggttaggtcttcaactgctcaagactctgactcagactgaacctgagatgaggatcgaggactcaccgtttttgcactttggattttgtttgtttgtttgttctgtgttgtgctgtactgtactgtaattgatttgtgtaaccatgtatcggtaccagacaccacaacaagaacatgtacaagagattctttagcatccattgtgtgtaaaagctagggtttgtggctgccttttatttcgtttttcctcagccatcataggatggtacggctgatgtataatagattactatttgctatgtgggcgtcagatttgttttggcgtgcgctagagtgaaaaaggtcgcatgaaagcgaatctaaacccatgcgtgcttttgttttgtttttctgaaagggaatccatgcgtacttgagattctcattattagtacgtattagggtttgagcaaca

SEQ ID NO: 19903 - DNA, 1026 bp, Zea Mays
gtttctaaaatctttcccaaattcaaacaccccttaatcttatactttgactgccattagtataagattgaagcctcctaatttgaaggggtgtttatcacaaacaaacttgtacatgagtatttgaaaaccttcaaacgctaatcctagcgagttataagttagtacaaaagggaggcaaatgagttctggacccgagcaggaaagaaaccccactcccaactcgtttccctccacccacatggcgctccaggcgcaggcctccccgtcgccgtccacctcgccgacgcgcgagaggacgggcagcggcgagtggcctgacgacgtggacaagctccccgccggcgcatctgcctctccgccctactcctccgacgccgtcgagctcgtcgtcgtcgcctccacgcaccacgccgccgccgccgccaggtactcggaagccgtgaacgtgatcggtttcctgtactcggtgttccagttcgtcgcgctcgtcgagctcatgaggaggaacaagcatttgatcccccatcgcaagcgtggtctcttcgacttcaccatggaccaggtgctagcataccttctgatatcgtcgtcgtcgtccgcaaccgctcgagtgagcgacctgatcgacaactgggggagcgaccctttcccgacgatggcgaacggctccatcgccatatccttcatggcgttcgcggtgttcggcatctgctccctcatctccgcgtacaacctgttccgccgagacatgtagccgccagccgctctcgtcaacctcttgttgcccttccattgtatttgtggacacgagttttcggcgcggacttcacattgtgctgtacgtgtgtgtatatgtgtgtgtgtgatgggaactctgaactgctagcaaataatatatctctacacggtgaagggcagctcacttgtatggtgaaccgaatgtgggaaaaagaagttctagtggctctgaatcgaagtagttttgctgcatggcatcaagaccaaaggtaatcgattggtggc

SEQ ID NO: 19904 - DNA, 1135 bp, Zea Mays
ctagcacacaattggtagctccaagcctccaactaggcaactacccgttaaattggtggcactcatcatgtgaggcatttgggttgccatatgtgccaccttacctaggcagtggggacttccagaatggcgcaaactttgcagtcggcggcgcaactgctctcaatggctcgttcttccgtgagcgcggtgtggagcctacatggacgcctcactcccttgatgagcagatgcaatggttcaagaagcttctcccattcattgcaccatctgagacagagctaaatgaaataatgtccaagtcacttttgtttgtgggagagattggcggaaatgattacaaccatttaatcgttagggagaaatctgttgatgagctacatgaaattgttcctaatgttgttggcgccataagctcgggcatcacggaccttataaatcttggagcaaagaagttagttgttccagggaacttcccaatagggtgtgtcccattttccccttcaatactgtgcgggcgtcctggatctacagtgtgccctgacccatcaaaatacatctcatgggatggtctacacttcaccgaggcgagttacaaagttgtcatccaaggagtactaggggggtacgccaaacctcctctttcagaagcctgcaagggtgcggagttcaaagtttctcaacttcaccaatgtacagataatccaacaaacaccgtatcatacgatgccttgagctcttttatttgatctgctgagctcaagtacttttatatttgtgctggtaaaaaaagtgcagtttagagttacagtgggcagtgtagatgctgcaggaccgggtatcttggacacttctcagagcggagaagagatccatcgatctagagtcatgtagttctacaatcaacttggctgctgggaggaggtaaaaaaaggtggggattttgtagtgtggaaatttgcaataaccgaagggatacaggtggtcatactgctatataggaacctagatctatgattctgcttctgagggcaatgtatgtagatatgggctcagttgccttttaacagatacatgcatatatacagtgtaaatttgttgattcacattaaccaggataataaccgttgtcgaa

SEQ ID NO: 19905 - DNA, 631 bp, Zea Mays
cccgggccgaaaaaactcggatcggcctaccgccgtacgccgcatctgttcacttcacccagcgtgctctctctctccctcctccctctgtgcgacggctgggtgggcttccgccgccgccctacgccaagtgccggggccatatagccggtctcttcgccggcgacgagaacgcatcaggcgaggctaacggcaacaccgagccaggccgtccgggtttaattggttcgcggcgatgggccgcccggagccggtcgtgctgttcgctcagacgatcctccactcccagctggacgagtacgtcgacgaggtgctattttctgagccagttgtgatcactgcttgtgagtttcttgagcagaatgcatctccttctacgccaaacatttcccttgttggtgctacatcgccaccttcatttgctttggaaatgtttgttcactgtgatggggagtctcggtttaggcgtctttgccatcctttcttatattcacattcttcatcgaatgtgctagaagttgaggtatgaataaattcatagtttctagtttgtcttccttttaagtgacacttcttatttctttgctatttttatccatatcttgctgaggtaaggattgctgtagtccag

SEQ ID NO: 19906 - DNA, 5004 bp, Zea Mays
cttcattcaatcgaaaaaccgtggtgccgcatagatcctaccttaccatgtttcgtactacaactccgtgctattgctgcagctggatgttccgttgtcagactggctgtccatgcagttggttggtgggagattctagttgtccattgtgctgcactgcagcagtagacaatcgtgtttttcggtgttttgtctgtctctccttgatcattcagatgcctgtacagctcaactgctatagctagctgtatatatctggttgaagaggactaatctagcaacaatgtcatcgcttcagttattgcaactaacagaacgggggcgcaaccttttgtcttcaagaaggagaacacttgcaattgtttctggtgcagtacttgctggtggagctttagcatatgcgcagtcaggtcgatggaaaaaacaccaggaagcaaattcttgcagtgatgcaaactcacatagcagtaataacggaagaactagtcagaacggcattgatggtaaattggttaaaacaaggaaaaagaaaagtggactgaagtccttgcattttttggctgctattttacttaagaagattggcccgaatggaacgaattaccttattggcttgatactaacagcagtcttgcgtacagctgttggccacagattggcaaaagtacaaggatatttattcagatctgcattccttcggcgtattccgacctttacacgtctcattattgaaaatcttcttctatgctttctccaatccacgttatatcagacatcaaagtacttaacagggtctttaggcctgcgcttcaagaaaatcttgacagatcttgtccatgctgattattttgagaacatggtgtactacaagatctcacatgttgatcatcggatcacaaacccagagcaaaggattgcaagtgacataccaaagttctgctcagaattaagtgaccttgtacaggatgatctggctgcaattgtagaagggttaatatacatctggcgcctctgctcttacgcgagtccaaaatatgtgttatggattctggcatatgttataggtgctggtggtacaattagaaaattttctcctgcttttggcaagctgaagtctacagaacaacagctagagggggaatatcgtcaactccattcacgattgagaacccatgctgagagtgtggcgttttatggtggtgagaacagagaagcatcacatattaagcagcggttccgggcacttgttaaacacttgaatgttgttcttcatgaaaactggtggtttggcatgattcaagattttcttctgaagtatcttggcgccactgtgggagttatcctaattattgaacctttctttgcggggaatcttaaacccgaatcatccaccttaggacgggcagagatgttgagcaatctccgataccacaccagcgtgataatatcactatttcaatctcttggaaccatttctattagttcaaggcgcttaaatattctcagtggctatgctaatcgtattcatgaattactggatgtctcgcgtgagctatctggtggccgtgatagattgattactcaaaattcttctgatggaaattatattagcgaggcaaattatatagagttttcagatgttaaggtggtgacaccttctgggaatgtcttggttgataatttgaaccttcatttggagtcgggctctaatctgttgatcactggtcccaatggtagtggaaaaagctcccttttccgtgttcttggtggtctgtggccaatggtatctggtcatattgtcaaacctggtgttggttccaatctcaacaaggaaatattttatgtgccccagagaccatatacagctgttggaacgcttcgcgaccagttaatctatccactcacagcagaccaagagactgaaccacttagctatggtggcatggtggatcttctaaagaatgttgatctggaatacttgctagaacgctatcctcttgataaggaagttaactggggtgacgaattgtctcttggtgagcagcaaagattaggaatggctagactgttctatcataagccaaagtttgctatcctggatgaatgcactagtgctgttacaactgatatggaagagcgcttctgcaaaagggttcgagcaatgggcacatcttgcataacaatatctcaccgtccagcattagttgcgtttcatgaaattgttttatccttagatggtgaaggagggtgggatattcaggacaacagaaatggttccttctctcccgaagttgagtttgatgtgctgaaggcatcagaaagtgatcgcaagtctgatgcacttaccgttcaaagggcttttatcaccagcacaaagggaaatgcgtcaatgaagcccaagaaacattcttattcaacagaggtcatagcatcttcccccagtatggagatagaacatacagtacaatcatctattgtcacacaattgcaatgctctccaagacctttgcctgtcagagttgctgcaatgtctcaaatactggttccaaagctatttgataagcaaggagggcagctgcttgcagtggtacttcttgtattctcccgcacttggatttcagaccgtatagcttcattgaatggaacaagtgtcaagtatgtcttggagcaggacaaagctgccttcattcgtttggctggcactagtgtgctgcaaagtgcagcaaattccatcgtgtcaccctcactgaggaaccttacttcaagaatcgcccttggatggcggattcgcatgaccaatcatttgcttcaatattatttgaaaagaaatgctttttacaaggtattcaacatttcaggtatgagtatggatgcagatcaaagaatgacacatgatgtagagaagttgaccaatgaccttgctggcttgcttactggtatggtgaagccattagttgatattatttggtttacatggagaatgaagcttttgtctgggcgaagaggggttgctatactgtatgcttacatgttcctaggtcttggttttctaagagctgtgtcccctgactttggggatcttgcaaaccaagaacaagaacttgaaggcacgttcaggttcatgcactcaagattgcggacacatgctgagtcaatagctttctttggtggtggatcaagggagaaagctatgattgacgctaaattcatgacattgctcaaccactcgaaggttctattgagaaagaagtggctttatggtatttttgatgattttgtgacgaaacagcttcctcataacgtgacatgggggctgagtatgttatatgctttggagcacaagggagaccgagctttgacttcaactcaaggagagttggcacatgctctgaggttcttggcatctgtggtgtcacaaagcttcatagcgtttggtgatattcttgagttacacaagaagttccttgaactctctggtggtattaacaggatatttgagcttgaggagcttctacaggcatcacaaagcaatcctgtcatgccttctgatgccacaaatgccggttccgaagaaataatttccttccgtggcgtgaacattgtgacaccatcgcaaaagctattggctagccaactgtcttgtgatgtatctcaagggaaaagccttcttgtgactggtccaaatggtagcggaaagagttccatctttagggtgcttcgaggcttgtggcccattgcttctggtagtcttagcaagccatctgaaggaatttttaatgttcctcaacgtccatatacttgtcttggaaccttgagggatcagatcatataccctctctctcacgaggaggcaaagttgaagatgctctcaggcgaaacaagtgacaagtctacagcttccgagctgttggatgatcacctgaggacgattctagagaatgttcgcttgctgtatcttctggagagagaaggttgggatgctaccactaactgggaagatactctatccttgggagagcagcagaggctggggatggctcgtctgttctttcactgtcccaagtatggcatcctcgacgagtgcaccaatgccacaagcgtggacgttgaggagcatctgtacaggctagcaaccaacatgggcataacagtcatcacatcctcacaaaggcctgctctgattcccttccattcgttggaactgaaactcattgacggcgaaggaaagtgggagctatgttccatccaccaataaccgattgccatcaaccagtttatttatgttcaccggagtagggtatttacaagttgcaacgcacagaggaaaaaaaactcgtccactcgggtgtagagtgtgtgacggagtcttttttttttttggtttcccttttcttttctttttctctcccctttgatggaaatcttgcgatacggaaagggagggaggaaggaaatatacggcaggaaaggaaagtattaggagaggttatagatgcaggcttcgtcatttgggatagcatagtacatgttcctggcatgatatgccagcctgattgatttttatacgagatacagaataagttaaaataaaaatggatatggcacaaagtgtgcccttgtaaattaaatgggaaactaatctataggaaattcatcctctctgtgtcgcccttgcatcgaacgtatcccaatccatatgtaatggcctaatgggaagataccgtatgcaatcactcatatttgcgagaaaaggaatcggcaattaaaatactacacattctgtgaggttgtggtgtttggaattctagtttatgctattttagtggtaattatctacaatgttctagaagcaagtcacttttatgatgcgcccgctaacaaggcaagggtattttatagttagaatctaattgacggataccgtacgacaccctaactaaatttaatactcataaaaaataaatttaatatcaaagtactcataaaaataaatttaatatcaaa

SEQ ID NO: 19907 - DNA, 906 bp, Zea Mays
cccgtgtcgacaactcgccaccaccttctcttccgttccagaagggacagcgtccgtgtcttccttgctcactctcctcaccactaccctgacctgacctgctcccaagctccctctgcctgcctttataaatcaccggggcagagcgcctcagtgacacacgccgctgctccaagaaaccaccgccgagcccaaccgcacaagcgcgcgaggcaggagagagagagaggcggggagcaaaacaatggaggggaaagaggaggacgtgcgcctgggcgccaacaagttctcggagcgccagcccatcgggacggcggcgcagggcgccgctgacgacaaggactacaaggagcccccgccggcgccgctgttcgagcccggggagctcaagtcctggtccttctaccgcgcgggcatcgccgagttcgtcgccaccttcctcttcctctacatcaccatcctcaccgtcatgggcgtctccaagtccacctccaagtgcgccaccgtcggcatccagggcatcgcctggtccttcggaggaatgatcttcgcgctcgtctactgcaccgccggcatctccggaggacacatcaacccagctgtgactttcgggctgttcttagccaggaagctgtccctgactagggccctcttctacatcatcatgcaatgcctgggtgccatctgtggagctggagtggtgaagggcttccagcagggactttacatgggcaacggtggtggcgccaatgttgtcgcacctggctacaccaagggtgatggccttggcgctgagattgttggcaccttcatcctagtctacaccgtcttctcagccaccgatgccaagaggaatgccagggactcccatgttcctctcatagattgtgcacatacatacatact

SEQ ID NO: 19908 - DNA, 3025 bp, Zea Mays
acccccgtcctcagtcacgccgcacctaacccttcgtcagtttcagtttggcacctccgaagcttccgtccgaatctctgctgcctccttcctcggccaggcttgcgggcgatggcggcggagcagaccgccgagcagttccggggccaggcgcggctgccccacttcgcgtccccgcggcgctacgacctgcgcctcacgcccgacctccccgcctgcgtcttcactggctcggtggcggtttccatcggcgtggccgcgcccacccgcttcctcgtactcaacgcagccgagctcgacgtcgcgaccgggggcgtcagcttcgcgcctcagggctccgaccaggtgctacaacctttggaggttaccaacgtgccagaagatgagatcctgattattcgcttcaatgaggtgctttctatcggggagggaactttgacgattgcattcaaggggactttgaatgataagatgcatggattctacagaagtgtgtatgagcttaatggagagaagaaaaacatggctgtaacacagtttgaaccagctgatgcaaggcgctgcttcccttgttgggatgagcctgctttcaaggctgttttcaaaattactctagaagttccttctgagacgattgctctgtcaaatatgccagtaattgaagagaaggtcaatggccctaccaaaatagtctacttccaagaatctcggataatgtctacatacttagtggctgttattgttggcaatttttgactatgtggaagatttcaccacagatggtactagggtattttgctgtgccataccccctccccaaaatggacatggttgctattccagattttgcagctggagccatggagaactatggcttggttacataccgtgaaacagcattgctatttgatgagatgcactctgcagctgccaataagcaacgggttgcagttgttgtagctcatgaattagctcatcaatggtttggaaatcttgtcacaatggaatggtggacacatctgtggcttaatgagggctttgcgacttgggtgtcttacttagctgcagatcagttctttcctgaatggaatgtttggactcagtttctagaggaatctacagtaggtttcaagttggatgctcttgcaggttcacatccaattgaggtggacataaatcatgttgatgaaatagatgagatatttgatgctataagctataggaaaggagcttctgtcattcgtatgctgcaaaactatcttggggctgaggtctttcagaattctttggctgcatacatcaaaagatttgcgtattcaaatgcaaagactgaggacttatgggctgcccttgaagaggggtctggtgaaccagttagaacattaatgcattcatggaccaaacagcaaggttatcctgtcattaatgtgaaactcaaggatggaaagttccaactggagcagacacaatttctttcaagtggatctacaggagttgggcaatgggttgttcccatcacactatgttgttgttcctactcgcgccaagcgaagttcctttttcatgggaaacaagaagattttgatttgtcagcgtccgggtttacggactgccaaaagaaagatggcttctggattaaacttaatgtcaaccagactagcttctatagggtgagctatgatgaggaacttgcagcccgacttcgatatgcaattgaaaccaacaaactgggtgcagcagacagatatggcgtacttgatgatgcctatgccctctgtatggctggcaaacaaaagctagtctccttgctgcatttgatttctgtgtacaaggatgagactgagtatactgtgcttgcacacataatcacgacaagtctgcacattgccgagatgatggttattgctgctccagaggagttggttcatctgaagaagttcctaattgatttcctggagccatttgcgctgaaacttggctgggatgctaagagtgacgagggccatctgaacgctttgttaagaggtacactcttaaccgctcttgcagaacttggccatgaggctaccataaatgaagctgttcgtcgatttaatgtctttctggaagacagagagacaccactcctccctcccgatgttcgaaaggcagcatatgttgctttgatgcagacagtgagcaaatcaaacaaaactggctatgaatcactactgaggatatatagggaaaccgatctaagccaggagaaagttcgttctttggcatcatcccctgaccatgatgttgtccgtgaagtattgaatttcatattgtcacctgaggtgaggaatcaggacgcaatatttttgctaagaggggtgagttcaggggcacacgaggtagcatggcaatggctgaaggaaaactgggattacatattgggagcctactctggaactctgctcacctatttcgtcaacataactgtctcgccactggccaccgatgaacatggtgatgaggcggaggagtttttcaagagcagaaccaaggcgaacatcgcgaggactgtgaggcagagcatcgagagggtgaggatcaatgcccaatgggtcaagaacatcaaggccgaggctgacctcggcaatgttctcaagaagctggcttacaagcactgatcagagacggtccactttcatttctgtgttaatcctagtaccgagatgtaactttgttctctggaataagtggattaataaagggcactttcgtttgtgtgtcgtcctgagctgccttgtccgtagattcttacaaactgttctgtgcgaaagctaccatgatagatatgcgtcgaattgattgattctatatcctgataattgattgtgtatcgcccatgtcgcacaggagaacggtaaatttgttccaatgattgtctgactgcgagttggcttccaaacctgcacttcatcattattttagggtctgactctattactccctccgtttcgttttagttgtcgctggatagtgtaaaattaaacta

SEQ ID NO: 19909 - DNA, 2214 bp, Zea Mays
cgcattcgcattcgcatcccacacagccacccacttcccaacaccaacagccatctccattggctgcagaagatccgggcgtcagggccgtataaaaaactacgcgcccccaatcctccgcaccgcacccagaggaggcaaggagcccatccacatccacctggtcctgctctcaccacaccgccgcgccaatggcggctcgccggcagcaccgccgcggcttcccgctggtcccgctcctgctctccctcctggccgccgccgcgtacggccgcctcatctccgacggcggcccgtccgcgcagctcctctcggtgatccgcctctcggggtcctcgccggccgcgggggcggccgccaaggccgaggagaagtgcgagcagtcctacgggttcctcccctgcaccaccaccgtgctcgggaacctcttcctcgtgctgacgtacggctacctcatgtacaaggcggccacgtacctgtcggcggggagcgagctgctgctcgagatcatggggcccggcctcgtcggcggcctcctcctccccatcctcggcgccctccccgacgcgctcctcgtgctcgtatctggcctgtccgggagtaaagaggaggcacagagtcaggtactgatcggaatggggctgcttgctggttccaccgtcttcctcctcaccctgctttgggggacctgtgtcgttgttggcaaatgtgaccttgggccaaaccgtgaggcagttgatgtaacagacaccaagggcttcagcttgactggcactggtattacaaccgacgtgcagaccagctatgcagcgcggatcatggggctatctgttatccccttcatcatcgctcagttcccaaagatgttgaagacccaccacgggcagcgtctagctatgttgctggccctcattgtgtcattcttgctcgtgctttcctactgtctgtatcaggttttccagccttggattcagaggaggaagcttgcatacgcaaagcacaagcacgtgatctctgggatactgaggcacgcccagatgcagtcactcggccgtctgctaaacgatgatggcacgcccaatgacgacgtcatcagaaagctgttccgcaagatcgacatggaccagagcgaatccctgtcccgtgctgagctgcacgccctcatcgtcggtatcaacttcgaggaggttgactttgacaggacggatgcggtggacaaggtcatggacgacttcgacacgtcccgcaacgatgtcgttgagcaggaggagtttgtgcaggggatgaagaaatggctcaacgaggccaagcgcagcgtgcccgtgggcggcgccttctccaccaagttcatcaatgaataccacgagaggacgaggcaggagcacaacgagctggttgacaggtccgatgaggcggtggagagcgtggagaaccccgggtggtgcatcgccaaggccgtggcgctgctgctgctgggcgccgccatcgcggccgcgttcgcggacccgctcgtggacgccgtccacaacttctccaacgccacgcacatcccgtccttcttcatctccttcatcgcccttccgctcgcgaccaactccagcgaggccgtctccgccatcatcttcgccagcaggaagaagcagcggacctgctccctcacattctccgaggtgtatggcggcgtgacgatgaacaacacgctgtgcctcggcgtgttcctggcgctcatctacttcaggaacctgacatgggacttctcgtcggaggtgctcatcatcctgctcgtctgcgtcgtcatggccctcttcaccagcttccggaccacgttcccgctctggacctgcctcgtcgcctacatgctctacccgttctcgctggtcctcgtctacatcctcgactacgtctttggctggtcataggctctcatcggcgcctcgagtgaacacgaccctgattggagcacctgggttttaacagccgccggtgtttctgcttgaccttgtaattttgactcatgtgaagctatctgtccagacttcttatatttctttgtgtatccaaagcacgcacgtacttcgtcaaacagcagctgcatgttttcagctcccttgtctgtacgtacatattgattttattttacctcaattgttagagttgtttgttataaagtttaaactaaaatttacaccaaaccggttaaaacacatatatagg

SEQ ID NO: 19910 - DNA, 746 bp, Zea Mays
aaagacgcctctagtatacagaaaaaagcaacacagcagtaacattcacagtccgcaggccgcagcagctgaatttcgaaggagactgtttcataaacaggagccaggcaccggactttccaggaggataccacctcccgaacatggtgcgtcgacgacccgccaccggggcagccccgagaccccacctcgccgccgtcggtcgcgggctgctcctcgcgtccgtcctcgcggccgctgcctcctccctcccagtagccgagtcgtcctgcccgcgagacaactcactggtgagagacataagccgaatgcagcagcgcaactacgggagggaaggattctcgcatataactgtcacaggtgctcttgctcacgggacgaaggaggtggaagtgtggctacaaacatttggtccaggtcaaaggaccccaatccacaggcattcttgtgaagaggttttcattgtcctcaaggggaaaggcacgctcttactcgggtcgagctcgctgaagtacccaggacagccgcaggaagttcctgtctttcagaataccacattttcgatccctgtaaatgatccacatcaggtctggaattctaatgagcacgaagatttgcaagttcttgtgatcatatcgcgcccaccggtcaagatttgacatcatcatcgtctttatcagtaccatattttctggtgtgtatctgcagcaatttcgattgtacagtgaataattcattgcaagtta

SEQ ID NO: 19911 - DNA, 3864 bp, Zea Mays
aaacaatttctttcctttttctctctctcccttcttccacttatctgcaaaaaaaaaaaaaatcgttctgctaatttcggagctcaagacgctcgccccatctctcctctcgtcgtctctctcatccatcctgccaaacaaaaaacgaaaaaaaaaaatactcctgctgtttgctagagcgagtgaaaaaaaaagaatagtctcagaaccatctagagacagcggcccgtggagcggacagctgagcgagcaagcctgcgcccttccgaagtagaagctgttctgatccacagctctcgattccggaaggagttggtcaagaactggggatcctgagttgaatatgatatcaaatccggtggactggtatagtttcggacccggatagaattggtagggatgccagattggagggtgcgtgagtttgaaggtaaattcactgatgagtttgcccacagtaacaacaacaaacatgaaagtggagttgaggctcctggtgtcactagtagtaagaagttgaagcatacagttgccggtgagaaaattcaaggtgtcatccctggaataaatagctcagatccacagaaatgtaattcagagaacatccaacatgagaacaggatagtatcccagaatataaacagtgctggtgactgcattggagactgcaaagacagctccaacgccttctcttcaagggaagaaaatacaatcgctgaaaccagatgtccaacggatgactggaactcctgtcagtttgcactgagcaatggttcatccattctcaataaccacagtgctccacaggatagcctcacttatggagataatgatctaaactacattgattggcctggcattgacaattttgaggatgttgacacattattcaggagatctgatttcacatatgatccgcagcagctggagaatacagatgggttatcttggcttccttcttcagatgctgtttactcttctgatgttgctttgcagcaagggtttgactcgtcttattccgattatgatattctggatgatctctcagcattccaatgtgcagaagataaatcactaccctcagttggtccttcatcggatttatgtgataatcaattcaatgatacctatctgttcagtgagcagaagaatgcgaatgcatatggtgaacagatataccaagaggatgtgatggagttgttgcccactgaccagatatgcagtggacatgaaaacattgatatgttgcagggtggaaaccagtattcatctgaacatacaattcaaggtattgaagacaagaaattttctatagcatcaacttctcagctgagctcctctcagaatttactgaagcaaaggcaccacttagattccaattcaccaagcaacattacttatgaggcctatgaagaaaagttcggtccatctagtggttcttttgcacaaaggaatttaaaagtgcagaagaaaactatgaacatgcaaccaacacagccgataaatgataatgtcatgaacagacatcctcaaacattgacaagaagtgcttcttatccttgtgagaacaatgaatctgaaagaagaggattagggaaaagaactctgggggatcctcaagttacaatgggtacttcaatggtagtggatggctcatttgtatcatccatgtcctctgatatctctgttgaagaaagcagctttcgacaactgcagaatgctgttagtcagctggatgtgcaaaccaaattgtgcattagagatggtttataccgattggcacgaagtgcgcagcacaggcaagttattccaaatatgatgagcagcaatgaagacaacccggatataaaggatctgcagaatgcagaaactttgcgcaagtatgatatttctaacaaagatcttatatatacttacacaagcatgaatcagtatctctatggctttgaaaagtgtagtcgttagcattcccctcattgtttaattagaaacttcacattgttgtctaagcgctcctaatgcaccatctttcctctgaaacacccaatgcgatgtgttttgcacagcctgttatctctaaaatatcttggtccttaagatgctagttgattgaggtttaattgggtgtttggttcccctgactaaagtttagttcgtgtcacatcaaatatttaaatatcaattatgagtattaaagataggcttaattaggtttaataaatttgccttgccgtttactgtagcatcgtatgagtgaatcatagactatttaggcttaaaactcatcttaacgtttagtacttagttgtgtaatttattttataattagactacatttaatactttaaacgagtattcaaacatccgatgtgacgggactaaaatttagtcccttggatccaaacgggcccttaaatatagctcttaatttgagtcacagattaattaacctgcctgttgactgtttacatgttatttgtgatgctatagtatctagtccgttatctatagttttagaacagtaagaaatgtaagaaaggaggcagttgattatccttccatggcatggcacaatgtctgaagccgatacttgttacagtacttataatgcaagggaggcaagaaatatgtgtagcctttcctttttgatgtttctgtttggcagattcgtcgatcctcggagcatcgagacacagacaaacccgatcgaccggtctatcgctctgctacttttccaccagtcatcggaccatgcggctgtggctgtcgacgatgcctcatcacttaaaccccctgctggtagcaaacaccaccagggccctgctgctaaccaaaaccaaggcctgataccagattcatcggtgtattcccctggagatggggcccccaaggatgtacagtccctggacaagttctgaatttatgtccctgctctccatgggcacgttcggttcccggggaatggtcgtctggaacgaatcctggtcggattgcttctctaattgatataagctttgatcggttggaacgattcttggtggaatttcgggataaatgaacaggccctaatgcgtctccgtgacctggttaaggcggcataatacggctttcacatgatgtttctaggcagatgtaaaaaacaagtatattgtgtacccaatagtctgtagcctgttccaatcacattggttttgacatgcgtgtatcctatgggtaggcggccgttgtgctctctagtggcgttgactcacatctgtgtaatctaaaaaaaattctttctttccgtggatctctaactatacctttgaactgatatacgggagtggatggattcggccaacgatcattatgccatgttgctaagaaatgattgcgtgagcctgctgcttctacatgtcaagcctttaatcaatcagcctgggcgttggaaagggacagatggctcttgagcaaaacctttgcttgattaacatgagcaagcaaactgtgggtccgacaatgcattaacggttgacatgtgtttgattagatggtagactgtgggcccaacgatgcattagcgcttgacattttcttgacgggctagttagcaaaagatggtaggcatatcaatccgacgactggtacctcgttccgcaacactaatcgctgtcctgcttattcaaaacgtagatacttcttattcaaaaggtaaatacaaaatgctacttccaagtgaaacgagctgatgtttcttttaccacctatgcctcacaattgtgtcaacatggagcgtgtgctaacatggatattggatcatgctatcgagtttttaatattaaaagagttgaaaagtatttgacacgacaaataataaaaaaataa

SEQ ID NO: 19912 - DNA, 1607 bp, Zea Mays
aagccattaaacaaacacaaatagcacacacgggcacacggcaggcctacaactacaagaggagaggagaagagagaggagaattttcaatgctgccgcgcaccgtcatcactagctagtggaggggcggacgagaaggcgaggagctgaggggagagaggcttcacagagcttgcttgagcctggagggggctgccgctgtttgtctctccactccacccaccagcagttacctcgggagggcatggcaaaatctggtgcctcctttccggagtccagttggatggagagggatttcctggccgcgatcggcaaggagcagcagcacccgcacaaggaggaggcaggcgcggaggaatctgcttacttcggcggagcaggagcagcagcagcagccccggcaatggactggtccttcgctagcaagcccggcgccgccccggcgttgatgtcgttccggtcagcttcgttcccccagttctcctccttcgacggcgccaagaacccggcccctcgtatcctcacgcaccagaggtcgttcggccccgacagcacgcactacgccgccgcgcaccgcacgcagcatgcgctgaacggggctagagtcactccggtctcgtcgccgttcaaccagaacagtccgatgttcagggtccagagctcgcctagccttccgaacggtactgcgttcaagcagccgccttttgccatcaacaacaacgctgcggccagttctactgttggtttctatggaacaagggatgtggtgaggccaaagacagcacaattgacgatcttctatgctggttctgtcaacgtattcgacaacgtctcagctgagaagctgtccctcaagctagaaaggcgtcccttgctcgattcttggagaaaagaaaggaaagggtgacaactgctgcaccttacccatcagccaagagcccgatggagagcagtgacacgtttggcagtgggagcgccaacgacaagtcatcatgcacagacattgccctctcaagcaaccatgaggagtccctatgtttagggcagcccaggaacatcagcttcatccaagagtcccccagtacaaaactacagatctgatctgaatatctgatcatgcccaatgttcatagatttgtccaggctgactgatgcaaggaccatacgatacttttgcattcaggcaaggactcgagaggaagagattacgtatgttatcggtgccgctagctgttgtttatgatgatgttttgttgtgctagtttactgtgatgctggtggtgcccccacctaactaacaagagagctgtcacttgcagactcttgatttttttttgtcctagcgccatttctttagcggtatcaagtcaatttatataggcttacaaattctgcgccttttgtatggccaaagtgtaatatttttgttcttgtattatgaacctccatgctgcagaatgcaagagcaaatcttattgtcgatggtgttctcattgccagcatgtgtacgcagtagcggttcatgttgttttgagctgttctgttttaataatatctcaaaaggttgccgattggtgcccgtaaggatgacatttcaagaacagatg

SEQ ID NO: 19913 - DNA, 2457 bp, Zea Mays
ccattttcgagcgcagaagcgagagagatccggagcagccgcagtcccaccgacctcgccgccggtcgccctccatctcctcgccgctgcctctcgtgacgacgagtccctggaggggctgcagcaggagcttgacaactgcaagaatgaccaggaagtcgcaaacattctagccagtggcatcaaactgcgcgagtacacaaaaggcgtcgagaataacatacgccaaatcgagctggattctatccaggattacattaaggaaagtgaaaatctagtttctctgcatgatcaaatttgtgattgtgacaatattttgttacaaatggaaacagttctgactggattccagacagaaattggttccataagttcagagataaaggtccttcaggagaaatctatggacatgggattaaagctgaaaaatcgtaaggctgcagaatctaaattgtcaaaatttgtcgaggatataatagtacctccaagaatgattgacataattgttgatggagaggtcaatgatgaatacatgaaaacacttgagactctaagcaaaaaaatcaaattcatcgatgctgaccccatggttaaatcatccaaggctctaaaagatgttcaacctgaggttgagagactacgacagaaagccgtctcaaagattttcgagtttgtcatccaaaagttctatgccttgagaaaaccaaagactaatattcagattctacagcagagtgttcttcttaaatacaagtacacgataaatttccttaaggaacatgctaaggagatatatgcagaagttcgtacggcgtatattgacaccatgaataaggtgctaagtgcacatttccgggcttacatacaagcattggagaaactacagatggacatagcaacttccactgatttgcttggtgttgaaaccagaagcacaggcttcattttctccattggaaaagaacctctgaaaacccgtccttcagtgtttgctctgggtgaacgaataaacattttgaaggaaatcgaccagccagcattgatacctcatatagctgaagcgaagtcacagaaatactcgtatgaagttcttttcagaagcttgcagaaacttcttattgatactgccacttcagaatacctgtttactgatgatttctttggcgaagaatccatattccatgatatatttgcaggaccgattcaagttgttgatgaacatttcaatactgtactcctgaactgttatgatgcaattggcataatgcttatgatcagaataattcatcagcaccagctcatcatgtttaagcggcgaatcccatgtttggactcttacctagacaaagttaatatgtcactctggcctcgcttcaagatggtgttcgacttgcatttgaacagcttgcgaaatgcaaatattaaaacactttgggaggatgatgtccatccacactatgttacaaggagatatgctgaatttacagcttctctagttcatctcaatgttgagcatggggacggtcagcttgatctaaatttggagcgattgcggatggccattgaggatttgcttgttaagttggccaagatgttttccaaaccgaagctacaaactgtctttctgataaacaactatgatttaacaatttccattttgaaggaagctggaactgagggtgggaaagcacaacaacacttcgaggaggttcttaagagcaacatcgcaatatatgtggaagagttgctcctggagcagttcagtagtttgatcagattcgtcaaatctcgtccagcggatgagacggctgcaaattccgagaaagccagcattgccgaagttgagccactggtaaaggatttcgcgagccggtataaggccgcgatcgagctgatgcactatgatgtgatcacatctttcagcaactttctttgcgggatggagatcttgagagcgacgctcgcacagctcctgctatactacaccaggctctccgagtgtgtcaagagaatcaacggcggctctgctctcaacaaggaccttgtctccatatcctccatcctgttcgaaatcaagaagtattctaggacgttttagttgtttcacccccttccatgtacactaggacggctagctgaggggtagctgtgtatccttactttgtaactggtatgtgcgactgcaggggaaacaagggcattttgtcgtggtttgtatcttcgtctgtgttacccgacttgacccctgcccctttccagcacagaactatgatctctaggctgtctccacagttatcctattctatcttctgtcctatcatctattttaaacttcattttgtaaacagtatcgattatagtgcaaatctacaattttatacgatccgctgtggataaccatatgctgcatactaatgaatgcgtaccaaacgcttgccttaatgttatttttatgac

SEQ ID NO: 19914 - DNA, 642 bp, Zea Mays
aaatggagaggacgatgtactcagggtgtttgtctcgcacccaagcagaagatcagaatcaagctgcggtcctactgggtgccgttgatagaggactcatgcaagaagataattgaagctgcccaaacaaccaacgcaaagaccatgggtcctgttcctctgcccactaagcggagagtctattgtgtgctcaactctcctcacgtgcacaaggattcacggttccattttgagatccggacgcatcagcggctgattgatatcatgtatccaactgcccaaacaattgattcattgatgcaactccagctccctgccggtgtggatgttgaggttaagctatgattctgttggagctaaacttttccaagtttgatgtaatgtggtactcattttctgcagcttttcttcttgatccttttgttgtctggatgggcaaaacactttttcatgctggttgcactgattctgggacaagactaacgaagctttctaacttgcagactactttcatattttcttttagagacttttggactgagctcaactggtcatatcaaactattatttggtcaattttatatgtatccaagtaaacaacagttgtaaatcaattattaggataactacatagcaaaaatt

SEQ ID NO: 19915 - DNA, 1760 bp, Zea Mays
tctccgcgtcgctcgccgtcccatctttggcctggacacctggcctgcccccccttcgcggacgcgccgggtcgccggccgaatccgccctcccgccgctgccaacgtcgatctgcgcccgcccgcccgcccgccaagtgagattcaaaggtaggacgacgggggggtcgagttcttgtcggtttcattcctggccgccgacttcacatgtcaacaaccccaaggagcagaagccagggtagtaggaccactaggccgtggatcttgtcagggatggactttgctggttccagacggaagcctaatctcacggggaagattgccgtggctgctgccctcacggtcatgtgcataatcgtgttgaaacagtcccctagtttcagcggtaccagcgtgttctctcgccatgaaactggggtgacccatgtgttagtaacagggggtgctgggtatattggctcacatgctactcttcgtctccttagtgacaagtaccgagttaccattgtggataacctatccagagggaacattggagctgttagagttcttcaacggttatttccagaacccggaaggcttcaatttatttatgctgatttaggcgatgccaaagctgtgaacaaaatattttcggagaacgcatttgatgctgttatgcactttgctgctgttgcttatgttggtgagagcacaatggagccactcaggtactaccacaacataacgtcaaacacattgacagttcttgaggcaatggcagcacataatgtaaatactctgatttactcgagtacgtgtgcaacctatggtgaacctgatacaatgccgattgtagaaacaactcctcagaatcctatcaatccatatgatacttcaacgtgattggatcagacccagagggacggctaggagaagctccaaggccagagctacgcgagcatggacggatatccggtgcttgctttgatgcagctttgggaatcattccagggctaaaggttcgtggaaccgattactccactgcagatggaacttgcgttagagactacatcgatgtcacagatcttgtagatgctcacgtaaaagctcttggtaaagctcagccaggcaaagttggaatctacaatgtcggaacaggccaaggtagatcagtgactgagtttgtagaagcttgcaagaaggcaacaggagcttctatcaaggtcgaatatcttgcacgtagacccggagattatgccgaggtatacagcgatccgtcgaaaatccacatggaactcaactggacagcccagtacactgatcttggccaaagcctcgcccaggcgtggaaatggcagaaagcgcacccgaacggatatggaccagcctgattcagagttcaaagattgagagagactcgtcacgcagatccaaagggtccatgtgcagtcatgtagccttcagacagttggttcttcatcaccatagaaagatagcaaagagcaacagaagagtcctgattcttttattgcagcgctcgaagaaggaaaaaatatcacagagaaccccctacctgctccttgattagtttcaaatatatatatataggtcctcgttgacattttaatataatttgatgtgtgctgaggcgctatataataacacaaacgaaattttgttgtagacagggtagatcgatctcgtgtatcaacttttgtggtggtagaatgaaaggatataaataagttgatgtaagtttttgtttccaaacttgtttg

SEQ ID NO: 19916 - DNA, 4085 bp, Zea Mays
ttatcgctcaactcggtgtcctaacagtttctactcctcaacctggttcggtggtgtgattatctccctctaccaggcggttccgtagtaaacaactcggcccggcagtcgttcccagggcgagatcggatcgatcgagagcttcctagacctggacctgcgctagacctcaaagactcgatcgcaccgcatcttctctctctgctcctcgttcgcttcgtcgccggcgaccccgccgccagcttccccttccgctggccgccctttgcctcgcccctgaggcgtcggtttccactgcataggagtggggcggcgatccgactggacctagggttgcgagaccccatagggtgaccctaggagcatccgcctccacgtgggtgaggcggaggagggaggatgtcgtcgctcagccgggagctggtcttcctcattctgcagttcctcgatgaggagaaattcaaagagaccgtccacaagcttgagcaggagtccggattctatttcaacatgaagtactttgaggacgaggtcgtcaatgggaattgggatgaggtggagcgctaccttggtggattcacaaaggtcgacgataaccgctactccatgaagatattctttgagatccgcaaacagaagtatctcgaggctcttgataagcatgatcggtcaaaggctgttgaaatcttggtcaaggaccttaaggtatttgcatcctttaatgaggagttgtttaaggagatcacacagcttctgaccttggagaactttagggaaaatgagcagctttctaagtatggcgatacaaaatctgcaagagcaataatgtttgttgagctgaagaagctgattgaagctaaccccttgttccgtgataagctacaatttcctagcctgaagaattctaggctgcggacacttattaaccagagcttaaactggcagcaccagctttgcaaaaatcccaggcctaatcctgacatcaagactctatttgttgatcattcatgtggacaaccaaatggtgcacgtgctccatcaccagcaaacaatccattactcggatctatgcccaaacctggaggtttccctccattgggtgcccatggaccttttcaaccttcaccaacacctgttccacctctggctgggtggatgtcaaaccctccagcagtaacacatcctgctgtgtctggtggtgccattggatttggcactcctacaaatcctgccgctttgttgaagcatcctagaacacccacaactgctaatcctggtatggattatccatcaggagattctgatcacatctccaagagaactagaccagttggcatgtctgaggaggtgaatcttccggtgaatatgctgcctgtgacttatccgcagagccataattaccaacaagatgatttccataaaactgttgcacggaccttgagccaaggatcaacaccgatgagcatggattttcatccacttcaacaaactcttcttcttgttggtaccaatgttggcgacattggattgtgggatgttggtaccaaagacagactcgttgtaaggaacttcaaagtctgggacctcagtaaatgtacaatgattctccaggcatcactggttaaggatccagctgtgtcagttaatcgcataatatggagtcctgatggaaccttgtttggtgttgcttattcaaggcatattgtacaaatttattcctataatggtggcgacgatattagacaacacttggagattgatgcacatattggtggtgtaaatgacattgcatttgctcatccaaataagcagttatgtataattacatgtggagatgataagacaattaaggtatgggaggccaccagtggagctaagcaatttacatttgaaggacatgaagctcctgtttattcagtttgtccacattacaaggaaaatattcagttcatcttctcgactgctttagatgggaagatcaaggcatggctatatgataatatgggatctagagttgactatgatgcaccaggtcattggtgcactacaatggcatatagcgcagatggttcaaggttattttcatgtgggactagcaaggatggtgaatcacatctagtagaatggaatgaaagtgaaggagcagtgaagagaacatatcagggatttcgtaagcgatccatgggtgtcgtgcaattcgataccacacggaacaggtttttggccgctggggatgaattcatgattaagatatgggacatggacagcacgggtcttctaactaccattgatgcagatggtggcttaattgcaagtccacggatacgcttcaacaaggaaggaactcttttggctgtctctaccgttgacaatggcatcaagatcttagcaaatgctgatggacttcggttgctgcgcacgctggaaaatcgttcttttgatgcttctcgtaatgcatctgaggctgtaacaaagcctctaataaatcccttgactgctgcggcaaatgcagctgcagcaagcagttcaggagctggtgctccgtcagctgtaactgcaatgaatggggataccagaagtttggttgatgtaaaacctagaatagctgatgagtcactggacaagtcaaaggcgtggaagcttatggagataactgagtcaactcagtgcagatcaattaaactggcagacaacatgagaacgagcaagatctcgagattgatttacacaaattctggtcttgctatcttggctttaacttcaagtgctgttcatctactctggaaatggccacgcagtgatcggaattctggaaaggcaagcgcgagtgtgtctcccacactatggcaaccaccaagtggcattttgatgactaatgacacgactgacaacaatcctgaagaagctgttcactgctttgctttgtcgaagaatgattcatatgtcatgtccgcttctggaggaaaaatctctctgtttaacatgatgactttcaagacaatgacaacatttatgcctgcaccgccggcagcaacttttcttgcatttcacccccaagataacaacataattgcaattggaatggatgactcaaccatccaaatctataatgtccgaattgatgaggtcaaaagcaagctcaggggtcactctaagagaatcacgggtcttgccttttcaaatgtgctaaatgtcttagtctcttccggagctgatgctcagttatgtgtttggaacacggatggatgggaaaagcaaaagaacagatttttgcagataccgtcaggtcgccaatctaatatcttggacactcgtgttcagttccaccaagatcaaatgcactttcttgttgtgcatgaaacccagattgccatctatgaaactacaaaactagaaccagtgaagcagtcaactgatctatgcaagctttatggatgccactgttggcatatttaatgcatcgagtttgagacttcaatgtcggattcttccagcttcgtatctccccccaaatatcagtccgagtgttcatcctgttgtggttgcggcacacccttcggaagcgagtcagtttgctctagggctgactgatggtggtgtttttgtgttggaacctttggaatcagatagaaaatggggaaatcctccaccggtagaaaatgggtctgctagcaacttgtccgcaccgcctcctaatggagcttcaagttctgatcaacctgaaagatgattgagaagatggaactggtagatttttcgtggcatgagtctaaccaagatgggcttcaaaaggtggtgcaactaaccttggcagatcggttccaagggactcggacaatgggctcaataaaaacaagctcaacagcagtttatccgttgcttatatatatttctattgactgtatcgagtgaagaggatagttctagtatttcattttgctttgtttactgtgctgtgaaaaggagttcttatcagtagataagctgtagacaactatcagtttggctcctacattttatgacttagtgaaagtatcttgtttcatttgcctattggccccgatccgccgttttttatgaactgc

SEQ ID NO: 19917 - DNA, 517 bp, Zea Mays
cccgcttgtttcacttgctcgccttcacccctcgccgccgccgccgtcgccgtcgcaagcgatgatgctcgacatcaacttgttccgcaccgacaagggcggcaaccctgaccttattcgtgagtcccagcgcagtcagttcgcctccgtcgagctcgttgacgaggtcatcgccctcgacaaggcatggcgcgaaaggcagttcgagctagataagatccggcaggagctcaacgctaccagcaagaagatcggcaagctcaaagccatacgtaccagcaagcaagaagaggaagcgaagaagctcatggagagcacagacgaaattaagaaaaggttggcagccaaagaagttgaggtgcaggaggccaagagcaccctcgacgccaaggtcacgacgattggcaacatcgtgcatgagtctgtgccagtcagcgatgacgagagagtagaggataatttgaagaaccacgtggacctttgcaggatgcttgatattgtcgcattggaaaagggt

SEQ ID NO: 19918 - DNA, 1032 bp, Zea Mays
gtggtttcttctgccagtgagcatgctgagattttctttttgagccgcaagaaattggaatcatgggtcatcaaactgatgaagaagactttgctagtctcactgaacgagtttcacaagaaatgtttgacggagtcatccgtgaagtggttgaggaaactggagttcctgctagctccctaactgatcctgtcttcattggagtttcccgccgagaagttaacgttaggccgactgcgttcttttttacaaaatgtaacattgattccagtggcgtaagcgagctttattctagagctcaagatggctatgaatctactaaactctacacagtatccgttgaagagctacaaggaatgaggcagcggatgcctggatgccacaacggtggtattgctctgtatgagttgatgaggaatgctgcaaaaaaaagtgaagatgtcattgatgaatagttctgatggtgttattacaccacaaacaagtgtggaggtattcgcatctcgtacaaacacccgtgcagaacactgcatgtgacatccatcagattgctgttctttgcagtagatatgtgccatttccatgtttgttgagcctgacataggtctccttagaccgctgcataagtgcccacaaagagcatgaagcttaaagtttcctctgaatactaccggaataaatttcatctccggatgtaccaccaaaggaggcacaccagagcggcatcatgatgctaatctacatggtgagatgacccgtggattgtaatgttctttcaggattgaatttcctgggcaagtgatgcctgaatctgtcagctgttcttctgttggtttctgctgtagcggtgtactaggagtatgtaggaaccgaaggtgaagcttacattactttgctctgagaacgtttatatacttgttacctttggtatggatatactagttcgtgctagggtatggattctacatatttcatcttgacttttatcgcttcacacaattgccatcttggtgaattcgagtatagcctgtg

SEQ ID NO: 19919 - DNA, 268 bp, Zea Mays
agaacgaatctttgtcccccagcacgacggacgtcctcgcggcgatggatggactatgcaattttataggatcgtgaggatgcattttgactaaacctgcactttgatttaaataagcaacattgatttggtggctaaatcaacagcacattgtttctgcacccatcatttggtggcacaattaatggttgcggatgcttcttggaaggcataaaaacaaaaatgctagactcctgctgtgggaggaagctgagaacatagaatacac

SEQ ID NO: 19920 - DNA, 689 bp, Zea Mays
caacactatgttctgcagcgattcactctctgcttgccctttcggatatgataagttctgcccattctacaaatccgtttggatgatgcgcaatattattcacttcaacacattggcaaatcaggctgtggagcgggcagctggtactgatggccaaaagataacatacggtgtcataaaacaccgtttgggcgatctattttatcgcctagtatctcaaaagttcgaggatcctgccgaaggtgaagaagctttggtcggcaaatttaagaaactgtatgatgacctcaccactggtttccgcaatctcgaagacgaggcacggtgaactagtgtagattctgtgtaaacaaggactgccaaatgttttataagatacataaattgtagattgagatcatctgtaagaattattcccaccgttgcaccatctcttcgccaccactgttttagtcatcggtgcctgatgggcaccctgtttatttcatgtatcatttattgctgtcattgtaataagcgatgggcatgattgtagttgaataagtacaatgtccatgtattcagacaccagtatcgtgcttatttgtttgttaaaaaaactatgttgcctttttgggatttgttcgtgcttattgcatatgatggtttaaaaaagactaacgtatgagtaaataaacttattatgagtg

SEQ ID NO: 19921 - DNA, 2493 bp, Zea Mays
tctccttgtcctcactcacctacccttctctatcaatcttccattgtccaccaccctcacgcctcgccctcccgtcccggcgacggcgaggccccctccgcctccgactcccgcgcgactgccccggaccccagtctcgcccttgtccaccgtcatggccgcacccgcggttgcctccccgagccgggcgacccccaccgacatccccaccgccgcgccctctcccgcctccccgccgcgccgccttgcgtcggcgccgcccgccgtcgacgcgtccgggtcctcctccccggcctccgcccattcgggggaccagctctccgcccccgacgcctcgagcccgctgctcgcgagcaggagcgaggagtacaggcttctgttccggctgccgcccgacgaggttctcgtgcaagattttaactgcgctgtccaagaaaatattcttcttcagggacatatgtatttatttcttcaccatatatgtttctactctaacatatttggatatgagacaaagaaaacaatacctttgcaagaggtaactgatgttcgtaaagcaaagacagctgccatttttcataatgccattgaaattgttgctggtagtagaaggcatttttttggatctttcttgtcacgtgatgaagcctatcgaattatagtagatggctgggaacaacatgttagtgatgcaagattgctccttgaacgtcaggagacaaagtcagctagtagcagtgaagaaaatggttatgttgtattggaaggaacaaaggaatctaaacaagatggagatttatcactgccggacaggtctgtcaacagtacagctgtctcaagtagcaatgctgatggtggtgattcgaacatcaacatttccaaaaggttttcagaagttgaggagaacggacttgaagacaacatcgtcgcgctaaacccattcaatttggagccagttgatgctcctcctagtgtacctgaatcttacactatgatctcggagtcgaagtttcaggtgcctgtggaggttctctttaatttcttgttgtctgatggtgcttttggctttgtggatgatttccacacaaaatgtggtgacaaagaatttagttgctccaaatggcgtacagatgagcaagggggacttgtaagggatgtctcatttttgcatccaataaaaatttatcttggtgcaaaatttgggacttgtcaagaggttcagaaacttcgtctttacaaaaacaggcgtctagtcattcaaacctctcaatcaataggtgatgccccatatggggaccattttactgtagagggcatctgggatgttgaacaagatagcctagatgagaactgttgtgacctcaggatatacatcaatgtagccttctcaaagaaaacaatatttagagggaaaatagagcagtcaacaaaagatgaatgccgggaagttttcagtctctggattaagctcgtatgtctattctcatacttgaagatatttctcagtgctacttttcatctggagggtcatgatcttttgaagcaggagtatgatcgatcaaaaggcgcctccagcacacctgattctggtgttcaaccaggggctacaacaaacgaggaaagtgccgtggaagtagcagttccagtggtgagttcctcacatgatgaatctggtgcgagaagcctcattcctcctactcaagatcaccagcagaggacaggaagagatccttccatcacgtccacttcacaagaattgtggggttctctatcgtcatacatgaggtcaaggcaacttggtccagtactagcaatgtcactggtagctctcattatcctaatgcaggtgaccatcatagttctactaacaagacccccccaggtccaaatggatcctcatgggatctggacgggcagttcagggtacagcaaagaaagcatagagtgggtgcagaagcgcctcagcttactaagcgaggagatgcagctcgcggaggcacacatggagacgatgaggcgcgagtttgcctggctcaggtcttacctggagagactgcagaggacgcggggcagcacatgacggcggcgcgtgtacatggcacaggggcacgagttcgctacgcgaattcggaggtgtatacaaatacaatacaatacaacccggaggtggtgttcagtgtttcttctgttgttacagatggtacagatgcaaacagagagaggtggattgttgtttgcagaggtatttgccgtaaggcagaactgcaagatcccggtatagcgttcgatgtaaatagctggagcttccccattgcgctggggtgatgtacaatgtcagggacgagtcactgcgatcacgctacggcggtgacgcgttatgttatttataaatttctgactgaattttaacttctaaaagctacccggtccgtccgcggtccgtccaaaaatgataaacagtactacctccgtttcacaataatgttcttttta

SEQ ID NO: 19922 - DNA, 1833 bp, Zea Mays
ggaaaattatcagtccaatcatatcccagcacgaagagccgccgcaatcctcctccccgtcccctaccttcgtcggtgctctcacccgccgctggtcgccattcctccagatcggcgcccagctcgcagcccactaggcgttgcgctccctctccaaccccaacgaaaccccaggggaaccctcatccccctgtcgtctcccttattgggggccagacatggagagcaagcagtgggggaagacgccccaggaggcggtgggcgcaggcggcggtcgccaagtggatctagatgaagaggatgacctggaggagttccggctgcccatgggccaccgccccaccgagaacctcgacacggatgggctccagcaagcctctgtctacacccagctcaccgcgtccaacgtcggtttcaggctactgcagaagatgggctggaagaccggcaaggggctcggcaagaacgagcaaggtatactagagccaataagagctgacatgagagatgcaaaattaggtgttgggaagcaagaggaagatgacttcttcacatctgaagagaatgtgcaacgaaagaaattgaatattgaacttgaggagactgaggaacatataaagaaacgggaggtatgcaatctaacacctggtgctagtttctctacattcatgcagttttttccctgggctgatgcttgacatgctggaacctagatataatagttgtaagacctctatagcctagaagtagctgtactttcgtgatgtgaggatagctagcatcaaccattaaagagtcttcagcattttgtgcgctttttatttggtggtttcttttccctgcttggtgcaaatcatgacaatccaggtcatagcagagcgtgagcacaaaatccgcagtgaagtcaaggagatacagaaggtgttcttttgcaacctctgcaataagcagtacaagctggctcatgaatttgagagtcacttgagctcatatgaccacaatcataggaagaggtttaaggaaatgagagaaatgcagagcagcagtggtagtcgagatgacagacagaaacgtgaacaacaacgagaagagaaggagctggcaaaaattgctcaacttgcggatgctcataggaagcagcagaaggataagcaagaaaagtcagagacggaggatgcggcacccaaaaacatggcagcctctagcaaccaggatcagaggcaaaccttgaagttcggattctctaaaatggctccttccaaggttctagttggtagtgccagcaagaagccaaaggttgccacgaaagtttcttcggtctttggcaacgagagtgatgaggactcgtgacctttgccagagggtggcagactggcagttgcttcttctgtcgtgcattggtctggggacttgataacagcaccgagaattgtatgaacttttgagggtacactgtataaggaaatctgtactgttgttgctggattttggaagctgtttattaaccattcgcccttgtaggcaggcaatacccttcagtttgggacacacctttgtattgtaggctgtattatcgttgttggcttttaatgttaaaaaaaacctttgtattggatgctacagtggtgtcacattttgtctgtcaaagttggaggcttaattttggacactttttttgttggttgcccttctcgtccgtggagaggatgtcactgcttcagtttaaagtttctttattttttgaacaaaaatcatgtgattatgcttatgtttgagttgagttgcataaacttgcactttcaataaggctgccggctgttgcaaaaaaaaaaa

SEQ ID NO: 19923 - DNA, 687 bp, Zea Mays
gttgccggaagtaataatgccttgcaaaaattgaagtaccagtggactgacaaacaattagttgcatgtacaacttttctgttctgttacccggtcgaatgctctgttactgagaatatgatgccatgcctatgaccacttggctttgatgatggaaactcttgggaagatgcctcggaagattgctagctcaggaactcgttccaaggattactttgatcggtatggagatttgaaaagggtcaggagactgaagttctggcccctagaccgtgtgctcgtagaaagatatccacggactttgatttgatgtaaccaaggctgagaatcaggagccactttttaggcgcagcctgatgagaacgggacatgagattcagctcggatgtagcaagcgtttcgctggtgtgtttgggggtgcagactgcagagctaatgtgatgttaacctgcatgtgtgttagtagggccaaaatattgatgtattattattttttggtaatgtgatctggccaacaaccttttcctttagctgagaagatgaactgctacagcactgcagtgtagtggttcagctagttatccaatggattgtgtgctgtaacctgtaacatttgtttgaaattgaccttatggatatcggaaaccaaccacttggtggtgcaaatgggacaaaaccaggggcggt

SEQ ID NO: 19924 - DNA, 1573 bp, Zea Mays
ccccaatccaaacaggaacggaacggaacccatcccatcctctcagcccccaatccagacgcaatctaggttatgggtaaaggttgagaggaatctcagttgctaccgtctctagttccttcctctgctcggttgcttggcgttgggtcactgttggcaaggtgttgggtcgacgattggagctggcgtctacgtccttgttggcacagttgcgcgggagcattccgggccggcattgacgctttcatttctgatagccggaatagcagctgcgctttcagccttctgctatgcggagctggctagccgttgcccttcggcaggaagcgcctatcattattcgtacatctgcgttggcgaaggagttgcatggttgattggctgggctttgatacttgaatacacgattggtggatcagccgttgcccgtggcatttctcctaatctagccttattttttggaggacaggatagtctgccatggattttagcacgacatgagatcccatggcttgatgtcgttgtagatccttgtgcttctttcctcgttttcgtcgtcactggccttctctgtgtggggataaaagagagttcatttgtgcaaggagttgtgacggtcttaaattgctttgtgatgttatttgttatcatagccggtagctacatcggcttccaaacaggatgggttggctacaaggttgctggcggatttttcccttatggagcgaatggaatgcttgccgggtcagcaactgtcttcttcgcctacataggatttgattcagttgccagcacggctgaggaggtgaaaaatccacaacgagatctgccactgggaatcggaacagcattgtcgatttgctgttccttgtacatgttggtttcagttgttattgttggtctggtaccatactttgctatggacccagacacccctatttcatctgcttttgccaaacatgggatgcactgggcaatgtatcttgtaacaactggtgctgttcttgctctctgctcaaccttgatgggatctatattgccacagccaagaatattgatggccatggcacgagatggcctgctaccatcattcttctctgatgtccataagacgacacaagttccagtcaaaagcacagtagtgactggcatctgtgcagctgctcttgctttcttcatggatgtctctcaactggctggaatggttagtgtaggcacgctactcgcgttcactatagttgctgtgtccatcttgattcttagatacgttcctccagatgaggtacccctcccatcttccctgcaagcatcattccgcttgagccaagaaaatgacgaggaaaagctgaggggtacccttggagatgatgatcatgagcaaggctcagctgaaataagtgatgttgtagtagaaccaatcactgaccccctgatcgagaagcagctatacgcaagcaatttgagtgaggcaaaacggcgtaagaccgcggcatgcagcatcacatctgtttgcataggggttctgatcctcacgacgtcagcctcggcaacattcttgccctttaacaatcta

SEQ ID NO: 19925 - DNA, 741 bp, Zea Mays
gagaccacgtcgccttcgacccttctccgtcctcccggaacgcccgtcccgtccgtcctccccccatccacatccatcccgtgtgcttctactgctcctcgatttgatcaccgattaggggaggcggtttaccagtgagcacgcgcgagagataggataggaggaaagggaagctagcggcttcgctctcgcggggagatggcgcaggcggtggaggagtggtaccggcagatgcccatcatcacgcgctcctacctcaccgccgctgtcgtcaccaccgtcggctgcaccctcgaaatcatttcgccgtatcacctgtaccttaacccgaagctcgtggtgcagcactacgagatttggcgcctcgtcactaacttcctctacttccgcaagatggatttggattttctattccacatgttctttcttgcacggtactgcaagcttctggaggaaaactcatttagaggaagaactgctgactttttttacatgctcttgtttggtgctactgtcctaactggcattgttctgatcggagggatgataccttacatttctgagacatttgccagaattctgttcttgagcaattcattgacatttatgatggtttatgtctggagcaagcacaacccttttatccatatgagctttctgggcctgtttacctttacggctgcgtacttaccatggtgggaaatagtgcagttggcgaaatgctgagatgcggtaggattt

SEQ ID NO: 19926 - DNA, 2719 bp, Zea Mays
ggaggggttcctttcttctcccaccgtcgctgccgccagctgcccagctgcgcctcgtcgtcagagggttccctttcctgttcgatgtgacgcagccccccgctgcgccccgacggcggcggcctcaccggctggcgatgggcacgacaaactgagacctccctttccacccaagttctctttcctccttctctctctctctccctctctctgcggaaggtggcggtgctgcactctgttggtacaagagtctggagtgcagtgcagatccacccggccggacctggatcgatatctccgtttgttggttcaataaaaccaataaattctggggttcaactgaacccccaatccgagtataacggccactctgtgctgcaaggtttgtctaagattttcgtgcaataacggccatgtggaggctcaagcagttcatccccaaggagcagcccagccccagcggcctcgagggtcggacggtcgatgttggcaatgtcaaggtgcacgtccgagaggccattgctgagggtgggttctcatctgtctatgctgctcgagacctggtaaacccagcgaagcagtacgccctcaagcgcgtgattgtccaggacgaggagtcgctgaacctggtccagaaggagatcacggtgatgcggtcgctcaaggggcaccctaatgtggtcacactggttgcacacgccatactggacatgggacggatgagggaggcactgctgctcatggagttctgcgggaagtcactggtttctgtgttggagggcagaggagcaggttactttgatgaggagaaggtggcgctgatcttccgggatgtttgcaatgctgtctttgcgatgcattgccagacgccacctcttgctcacaggctcttgggtgtctcttgtatagaatttgctacttcaaatcagcatttgatggagaatcaaagctccaaatacttaacgggaactatcgcatcccagaattgccgaagtacagttcttctattacaacacttatcaaagacatgcttaattcttctccagatgccagaccggacatcacacaggcaagggctttgcttgattggccattcacttccatgaacttaggtgtggttccgtattaatgagttacttccattggagctgcaaaaggatttacctgatggatctccatctggatcagcatttgaatctcacactgccactgatgaagtatcaatgaggccacagcagatgagtggctcttcatcaagagagaatatcaagaatacctctcttagtgattcttccaacataatggtacaaagtcctctgaaagctatagggaacatgggttctatgggtgcattttggtcaactcaacatgctcaggagctatcttttgctgatgacaaggagccagcttttgataaagagcccattgatcaagtcagatcaaagcaatcacaggctaagaaccagaacacagcagctcgcaattcatctcggaagtctctgtctgcatcagttgatagttcccctggggatttcgaaattaggttttctgcaaatggctcggagtctaggttggaggaaaccaaaacggtaataacagagaataaaacaaagatacaaactactgccttcaactcctgtgcgtcagactttgataatatcaaaatgaactcacgaaacactactgacagtataaacataactagcaaattgaaagagcttcaattggaagcagaagtaactttactcaaggaacaattaaagatagcaaacctggagaaggaagaaatttcgttgaagtttgataagttgtctgccatttgctcctctcagaggcgagagatacaagagcttaagcaagctttggctgcagcttatgttacgccaccagctaaacagttcagagaaaattcaagtgttgaagtcaccccacccagcaaaagcctcgacactccgccgagggagaagattgaaggaacccctccagagctccggcaaggcctgtttacttcaagcccaggaacaccaagccctgacctgaaaacatggtcagctttccttgaagagccaaaatctcaagcagctgtgaagagtgtccaccccaggtcagtccgaactctgcgtgcatcaaacagcaacaaagccagctcgttgggacagtcaaatataagttctagcaccgatccatttgcgtttggtcaagatagttttaaggctgctccttctggaactgtacttcccctgttatcaaacatggggaatacttctcagctcagtaatctgaatatagaagaaaagaaagacggatcctaccaaccagatggatggactgggttttgattgtgctatagtaatttatgtgccaaaagagtcaagagttcatatggtcttggtggtgtggtatactgaaggtgcagagaggaatgcctgaactggtgtaggtatgtgtgacaatgctttttgtacaattgttctggtcctgagctagcatcgtgatgcgttcagttgtaactgtagtgcaaatgtaagttgcaacttgcaattaattgctagatattagatataggaagatgtttttttttcttatgtagacaagcttgtggtgtcatgaattttggaggcatgctatatagatatagccatctattataccatatcatgaataaagggttatcatttagtgacaattggccaatatactcactttaatactattcatg

SEQ ID NO: 19927 - DNA, 2888 bp, Zea Mays
gtgggcaaagcacagggaggcggctgagaagagcagggcgcaaaggtggaggcgtatgtggtgatgcctgaggcctgacggttttaggactcagctaattaaagcaagggaacaacaacaccagcagccacctcaacaacagcaacagcagcagcaaatacaaatgcaacaaatgctgttacatagagctgcacagcagcagcaacagcagcagcgtagagatggttctcttctcaatggtactgcaagtggattttctgggaatgatcctttaatccgacaaaatccagctaatgcgaattcgatggcagcaaaaatgtatgaagagaggttaaagctccctccccagcgggattctctggatgaggcgtcaataaagttgcagcaaagatatggagaaaatgtgggacaagtaattgatccgaaccaagcactattgaaagcagctgcagctggacaatcctctgggcaaattttgcatgggactgctagtggtttgtcaggtactccgcaacaagttcaggcaagaagcccacaacaaccacctacagcagaacagaatatcaggaccgagatcaatccagtgttgacaccaagagcagcaggcactgagggttcattgattggtatccaaggatctaatcaggctggaaacaatttaactctgaaaggctggccgctcacgggacttgatcattttcgctctggaattctgcagcagaagccatttatgcaatctccacagcaatttcagcagctccagtttctgaccccacagcagcagcagcagcttttgctgcacgctcagcaaaatctgtcgtcctcgatgtcaagcgatgttgataccaggagattaaggatgcttcttaacaacaggaatgtggtccttggacaggatgggcagacaaatagcggcggtgatgttatcccaaatattggttcgccagggcaaagtggtggatcgcgtaatgatatagatatactaataaagaagaaatttgctcttctacagcagcagcagcagcagcaaagtcatagccagcagcagcagcttcagcaacctgcgctctctggacagcaatctcaaagttcaaaccagcttctccatcagcatggaaaaccaggagttgggagcttgcctattgatggaaacttgccaaactcttttggatttcctgaacaaggatcaaagaagagaaagaaacctgtctcatcctctggtagagctaatagttcaggaacagcgaacactgctgggccatctcctagctctgcaccctcaacaccatctactcacacgccaggagatgcaatgtccattccacagctgcagtataatggtggcccttcaaaaccattgatgatgtttggctctgatggcactggaagcttgacttctccagcaaacccgctgggtgatgttgaacgtctgttggaagatggttccttggatgaaaatgtagaatcttttttatcgcaagatgacatggatcctcgagaaacaatgggacgctgcatggattctagtaaagggttgggttttactgaggttgcaaaagcccgtgcgagtacaaacaaagttgtttgttgccatttctcattggatgggaaacttcttgccaccggagggcatgataaaaaggtcgttttatggtttacagatgtgctaaaacgtaaatccgcattagaagagcactcttccctaattacagatgtccgattcagccctggcatgacccgccttgccacatcttcctttgacaaaaccgtgcgggtttgggacgctgacaatccagattattcgctacgcacttttacaggtcattcagcatctgtcatgtcacttgattttcatccgaacaaagaagacatcgtttgttcgtgtgatagtgatggtgaagtgcggtgttggagcataaataatggtagttgtgtgacctgcgttagggttttcaatggaggagctactcggttaagatttcaacctcgccagggtaaatatctggcagctgcctcagaaaagggaatatccatactggatgcggagacattacaagtttgtagaactcctttgcagggccacgtacagattattcagtcagtatgttgggatgccgcgggcaactatctggcgtctgtcagtgaagattctgtcagggtgtggtcatttacctcagggaactacatcgaatgcatacatgagctgatctgcagcgggaacaagttccattcgtgtgtttttcacccaaattacccgaatttgcttataatcggttgttatgagtccctagagctttgggacataagggagaagaacacggtgacaatcagcaacgctcatgacggcatggttgctgccctagccgcgtcaagtgcatcggggctggttgcatcagtgagtcatgatcagctcgttaagctctggaggtgacactgaacacagcaacgctcgtctgtgtcattctcatttccagtgtcgtggcaaaagcgaaagggcagctgatctgatctcctaggttgatttgcgactgtggcatgcgcaaactattcaaatagttgtcagtaatgtgcttcccttatttctttgtttgtttatccatgccgggtgatactatgttacaattttatctatttagagaactgctattataatttgacctcccacttaggcctatttggctactctagtatttattccaatccatgtgtattgaagtgggttagggtgtaaattagtttaatttatacacaattcaactcaatacatgtggatttagttgaatactagggattaatgtaaatactatagtatccaaataaagtaggcttatgttcatttcatcccctagtccacggggattgaaggagattggagtggactgatagtg

SEQ ID NO: 19928 - DNA, 1041 bp, Zea Mays
gaaccattaacatctgcctaaacacatgatggccgagtgcatgcattatattctactccgtccatctacacagatgctaaacatgcatcaaacgaatcttggccagtaaaatacgatgattatttcccctacgccgattcaacaaatgcatactggactgggtattttacaagccgtccaactttcaagcgatacattcgagtgtacagtggatactatctggctgcgcgtcaaatagaatttttgatgggtaggagctccttgggattgttcacttccagcttggaagatgcaatgggtattgcccagcatcatgatgcaatctcaggtactgcaaaacagcacacgactgatgactactcaaaacggattgctattggagcatcaaaggtcgaaaaaggtgtaaacgctgctctgacttgtctaaccaactctaacaaaacatgtgtatcctctgtaccaaaatttagtcagtgtccacttctcaatataagctactgcccttcgactgaggaagcaatttcagcaacaaagcatttagttgtagttgtttacaatcctcttggttggaaacgtagtgacttcataagggttcctgtcaatgatgaagacctggtggtcaaaagctctgatggaaatactgttgtgtcacaaatagttgtggttgataatgtgacaaacaacttaagaaagttatatgtgaaggcttatcttggagtcacagcaaacaaggcccctaagtattggctaacatttcaagcttctgtaccaccaatgggatggaattcttactttattttgaaatcaactggatctgggagacttaccaattcaacaaagctttctttggtatagatcaagtaaaggagatgccttggacccacaggcatctggagcttatatatttagaccagatggtaatacaccaactattgcctcatcatcggtgactcttaaagttatccgtggacctctatttgatgaagtccatcaacaattcagctcgtggatttatcaggggcgactggcataggtggtgct

SEQ ID NO: 19929 - DNA, 1990 bp, Zea Mays
atggcggcggccggtcactgctactaccatgacgactatggcgacgatgaccacaacccatggtcaccattcatgcaatccgaagctcaaatttccccgctacgacagcaagtccaatcccttgcattgattgacatatgggaagaccgtaaaatatttgatacccaggcacaaagcctgaaagatgattttttcaggaggttaaaggacattagaaaccagttgaaaaatacaggcagtgagcagctggagaaggttgtctctagctacaaacatgtcctgaatgctcctatggatgaggatactctgatgcgaaaatgccaagcagctcttatcaattttgatgaactcaataaaacatatggaaataactccattttaggtagtagcaatcgttcgggctttatgcaggagctgcaggaacaacatagcattctcagaaactccatcgaacaacttaaagtgtcagaatcactcagggccaccctgatttttcatttgaaggaagcgttgaatgagcaggagctcaaagtggaacacctcagaagccagcttcaggcagctcagccccgattcaagagagcttctgagctctgcgtggggcttggaagcaacatggaaaggcgtcagccatcaaatcaagggcttaagaggtccagtctctccgatccacttagcactgttgctccagaagctgtgaaatctcttcaaaagggacaatcaagtgcagtgctgtattcacaggagggaaatggtgttgagcacagcgtgacagagacaaagcttgctgcaggtgctgcttcagatgatatacgtggtggtgctttgtcttcacgagtcaatgggggcaacactatgctgaaaatagaagagcacacttctggtaacaagaggcagaagctagaggatgacgcacatatttctcagcctcggtcagagtcaccgccgccgccgccacccccattccctcatcctgatacatttcaaccgcctccgccaccacctgagtatcctcgatcgccagatcctagcccaccaccgccacggacttcactgccaccccatataatccccccaccgccgccgccaccacccgcaatgccactccatatgttctcacatctaccacctccagctggtacatttgtaccttttcctgctggaccacctggcccaatgtattgcacttatccatcttttactcctgttgtcaactttcccatgaccagcccacctggtttccgtaatctaaccccgcctccatcttttcgaggattagctggtacattctatggccctcggttccccaccgcgcccccaccagcagacaggaaataagagtagtaacttacctgcagacttacagtgccagcagctttggcaagtatcataccagtttttttctgtttcaacagaggatacaaactcgtggggatgcgtcaccatgtgttgtagagctcaggaaactgttctattgttgtacattcagccagtcagcgtgcaacagtcaattttctgaactagttctggtcttggtcccagagtagaaagtgtagagcctgtacatgtcggctgctagagggaatttggaattccgagagcccggacccggagcaaatggctgcgtcagtttaatgatcgactgatccagtagttcctggtctaggcggtggagtaaaaactgtagattccgacagcttagggagaagatatggaacccaatagccgaagacagatgttgtagcatgacatgttgtaactcatcacagttgtgctcttcgctagatcatccgagaacacgtagatgttcttgtgatgtcttgagcgtgtaatcctgctgtttggtgtaagatatggcttcagctgctgtcgatggtcgaatctcttgctctgtttttaattacccttttttgctctcggctattctagcgccaataccttttgcgtctactttcgcatgtgttcccaaggaatttagtggtctgtcttg

SEQ ID NO: 19930 - DNA, 2341 bp, Zea Mays
ttagcagtagcaatggatgatgtaatggcatgagttacaactcaagcgggtgctcacaagctggcactgtaaaatgttgccttttggttgtgggaatcggcgttggtagcaggtgctcacaagctgggcactgtaaatgttgtcttttggttgtgggaatcggcgttggtagtttggagttcctgaacgtagcactggttaaagtatctttcttttcttccttgcaaaggcttttatgagttatcacagcacacccacaagcaataagtggttcatgatgaagaaagaaaagtagtagcaatcctgggtaaaagttcaaagtgccctgattttcgcattttgtgtcatctcggatgaactttgctgctcagtcaggaaattatctgaaaaatttttcatcagcagctcgattcttgatcttacaatagttggtattgattatacagagggtgactcgaccctacagggtcagcaacctcactatttgaaaacaagctgcaaaccaagcctagatcatgggagtcccgtgtacctgctgggacatacagggaaaaaagaactggtgattggtgagggcaaggtggttattggcacagacaacctcataaaactctcagccgagggggtgacatggtgtcctgggtctgctggttttgatgcccaagggaacctagctttcatgatctgtgatccaatgaagctggcctcttctcccaccgcaagatcatcctcggcatcctcatcctcatcacattcatggaagaaggatcagccaatgcaatttgggattcccatatctgtagtttgtgattggttatatcagcactggcagggcagcttggacgaggttagcaagccaaagttacctcttgttcggctgatgtccagcaggagtgatcactcaagcacctcgttcactcgtcgtcatgtgttcaagcctgacgatgagaacgatgatgcatccgtttgttcaaagcctaaacatcagcaggtatcaggtagcacagccactgcaaggatttcacatgaagcaaatcctatagttgatctgcgcacaagctgtgagcagggtgttacgactccagaaatatatgaatcgccaaggcgaagttcttgtcaggctcagaagaacgctgctgcaccaattcaactcttggacatcaacttcccacccagggttccaaagactatatttctaccattgcctctgaagcaaatgctttctgatgagaacaatgttgaaacgtcgaagccaaaatatcggtcaaaagacaatggcttcccatcagggctgatatggcaccgcaatattgaggctgagtgtagggaccctccggtagctcttcagcatatggattgcagcagcgagggacagtcgagctcatcacctgctgagataccggagtatggatgccaagaccagtacgatagcgaggaggaaacaatgtactcagctgaaaccatggaaagcaggaacattccaagccccagggagaaacatgtggggaggagccagagctgtgttacctacagcaggtggagctctccaaggacctcatcaatgcagaatggaaccttgcgaaagcagcatacactgatccctgtgcggaagacgcactcgcagaacacgactcttccgcagaggagtcatgactacttaagcccaacagtttcctcagccatgaagaagaggaactccatggaacagcagcaggccacaaagcctcgacggagcaccatacagtcttctccaaaatggatgttttgatggttctatctatatctggttttgaggtggaaacaatgaagaaagcaagtgcctactcggtgaaaactactgctcctatgtttcctactcaaaacttacatgtaagtctgctcccttccctcagttctctacttctctccctgggttcctgtgtgcagaatggcatggataaataaagagaaacaaaaaggaaaagaaaagcaaaaaaatcatcacaaaagattacagatgaaatgtgttgaaggcggcatttgtgaggtgcgatgaggactgttatattcctgccgactctagtgttcagcttacaattttcaactaaacatttttaatatgttttttttggtattttgctattcatccatagccatgatgactgtaatcattttgtttgctactgcttgcggccttatgtaccatgtgtgtcatcctgaattagaccaggaaataggttgagagttggctaccaagtgagtttttttttttcaattgaccgcttgtccgcagtgttggctgtgtgccatactatatagcaatgtaaatagcttttatttgaatgatgcggcagagttcatt

SEQ ID NO: 19931 - DNA, 720 bp, Zea Mays
catcgctaagcaggtagtagtgcataagcaacagatgctaccacagaatattcaaatctcacaacaccagcaacttgcaggttactgtccgtttggcgcaatcatctcatattccaccccaattaaggaagcagtattaatcacaaacataagcgctagatgtaggattacggaaagcaacaagagcatggctacatcaatcagaagattggtagtttcagatttcctagcgacaacgctaaacaagctagtaacagatttctcaggcgcatccgtgtctccaggtcaattttacccaacaaactagaacaggcaacccgctgagaacctacgggctaaatagcaccatgttattcgcacacaatcacacgtcccacccgccgcaaccagaagagcaccaaaaaaacaatcacaccgcgtccctaagatcgcatcgagctgtacctcatgcttccgcctcgtgaacggaggtgcgcgtcgtgtggtctgcgtcggggatttagggattggggtttagacgtcttgggggaagactgccgatggggagaggatgcggccgcggcctgggtgcgaagtcagcagtcccgtcagcaggaggtataaaaagacgaagcggcggagcgggagagaatggagggcgacgggggcaaactcgtcaaactgcgggattgcgcgagtgctgctggtgcttccaaaagtctctagatggttctatttcct

SEQ ID NO: 19932 - DNA, 140 bp, Zea Mays
atgtagaaagtgggaatcaagatgccgaagatcggccctagagaccaagccatgttgtcttcgggaaatcaactattaagcaagggcagattgatgcaatgagggggaggtactttcgtgatatctcaattgtgagggct

SEQ ID NO: 19933 - DNA, 2508 bp, Zea Mays
ctctagcagtctcttgcacaagcaccccaaccagccagccagccagccattactcggaagcttgcttgctgctgctggctgctgaaggcgcagcagagctagcaaaggctttcccatccaaaggcggggcgggggagcgactctctcaggcaaaaataaaagcttggtaagcaatgtgaagccgcttgctctgcgattgctggttgcggcgggctgcagcgttgtctgaggtgcgtggtcaagtcgaggcgaagatgagcaaggaggacgtgctcaaggtgcagacttgcgtgctgaaagtgaatatccactgcgatgggtgcgagaagaaggtcaagaagatcctccacaagatcgatggcgtgtaccagagcagcatagatgcggagcaggggaaggtgacggtgtccggcctcatggatccggccaccgtcatcaagaagctcaacaaggcgggcaagccggcgcagctgtggggcgccaagcctggcgtggtgagccagctccagaagctgcagcttggcggcggcggcggtggcggcggtggcaaggacaagcagcccaagggtggcgacggcgggggcaagggtcagcagcctaagggtggcgacggcggcgggaagggccagcagaccaagggcggcggcggcggaggaggaggaggaggcaagggcgggaaagatgcgaacatggtgctgccgcagccgacaccacagcagatgcagcagctgatgcagatgaagggcatgaagctgcctcctgagctcctcatgggcatgggcggcagcaagatgccgccgttcccgtcgcccgcgcctgcacccggcccgccgccgccggcggccaaggaccccaagcccgccaagttcagctaccccgaggacgacgagttcggggacgaaggcagcgagttcgacgacgagttcgatgacttcgacgatgaggacgacttcgaggacgacggcttcgacgatgacgacctgtacggtgaccccaagatgatggcgaagcccgtggccatgccgccggccgccggcaagaaaggcgggaacggtggcaagaagggcggtggcggtgggaacgagatccccgtgcaggtgaaggggaacgcgcacaacggcggcggcaagaaggactcgggcgcgaagcagaaccagggaggcgggaagaacggcggcggcggcggcggctcgcaggcgccgcagaacggcaagggcggcgggaacgggaaccagcagggcaagaagggcggcggcggcggcggtggtgggccgcctgccggttctggcgccccgatgatgggcagcatggcaatgccagcgccgcggccgccgctgccgcagcagcaacagccgggcccgggcatgatgatgaggccgccgaacatgatgggcggcgccggtttccccggtggtggcatggggccgggcatgggccagatgggcggcgcgccgatgggccaccctcaccacccgcacccgcacccgcaccagcacatgggtgcgggtggcaatggcatgcagatgcagcctggcggtggcggtggcggtgccgtgcatggcatgccagccggcgccatgccgggacatgctgctgggttctaccaaggcggcggtggtgcagccggcggcggcatgccgtccgggccagagatgctgcaggcggccgggaaccccatggccatggcggcgcagcagcagcagtacatggcgatgatgcagcaacagcagatgatgaatggtcacggcgccggcggcgccggcgggtacccggcgatggggtacgggtacggccggccggcgatgcagtacccaccgccgccgccgtactactaccacccgatgccgcagcggcacccgcacgacaacatgttcagcgacgagaaccccaacagctgcacggtgatgtgatcatgtccctgtcatgcatgcgaggaggcaaaggtcgctgcggcctgtcgaagctttttctcctgctgcctgctattcttccggaggagggagagaccgatcatgggtcagcgtcaccatggttggaacaaagtccccggattggattggattggatctcagtatacatgagacatgcatgagaagcccccccctaccccttttttcttctttttttttctttttcactactactactagtatttctcttttttttctagcttgtttttcacctttactttctttggacaaagagggggaaaaagaagcaacttccttgaaggcgaaggtaggtatagtagtaattatcaatagtggtgggcataagacatgatggtggtggtggttcatggggtttatagtaaggagtagctcaagaagggtggctctcatggctccccccttcttgttgctccacaatgtgatgatggtatggaggtggcatggtagaaaagcttggtgaatctcaatgtgctttcgagtgccgtgtctgtccctagtggaatggaatgtctctggtgtccccccgttcattttttttaatctttatggctttctg

SEQ ID NO: 19934 - DNA, 530 bp, Zea Mays
catttttgtccctttcaaactgaccattacgtgattcgaggtctgtctgcaaacaggggtttctttggatgcaggcacttctccaaaacaaacgagatcttagagaagctggggctgtctgccatcgattggcagctctagaaaaatcccaagacgacatgtgatttctctgtttgagcttgacaaccaccgttgctgtatggagtggagcagaagcacatgcctcaagggctatcatattcggtcaagattatgtggcgactaaagttgttattcatacatggccaatatggatgtgagtgcttaacgcttcttttgtgccgtgtcttatcctgctttatttactttggcactgtaccagcttgttgcggccattgtggttgtcgtgcgtacgtgcaactactttgcttggcgctaggacacgcccatttgggctgccttgctagatctaagcatctgacgtactagagcttaaccaaccaccctatatatatgcataaagggcctgcctctacggctctaccttccgc

SEQ ID NO: 19935 - DNA, 1685 bp, Zea Mays
ggccatttgctccgctcgcgtccccgcctcctgcgcacgagacgctctccgctttttttttatcgacgagtttgagacagaccaaagaggcggaagaagcggggaagccgacgggcaacgaccggggcgtgaggcgatgtcgtggctccgcagcgcggtgcaccgcgccgtggaggcgagcgggggtcacagctccctccttacccgcaccgtccgcacctcccttgacaccgtcgtccaccatgccggccaggctgtcgcgggcggcgccaggctcatcaccgggagccggagttacaagagcgcgaaggtggcagcgaagaggctggaagaggaggcgctctcctgcaaaggggacgaacgggtgcagctgctgcgccggtggctcgtcgcgctcaaggagacccagcgcgcgaccacggcggtccgggagccgcaatttggggacaatccggaccagactgcgcccctgctggatttgtacatcgattacgacagcggtgcggagccgatgaactttttccatgtcttcctctacagtcaagccctcgagtgtgttgttctctccttgattagggaagccccaactgaggaagaagttccactggtctcagaagtttttggaatgtgcctttcgggagggaaggatgtgcacaatgcactcttaagtagtgtaaaggacctggcaaggttattctcaagttatagtgacgaagtgttggcaaaacgtgacgagctgcttcagtttgctcagggtgcgatctcagggctaaagataaatgctgacattgcaagattagataatgaaattactcagttgcaacagcagataaattcaatggatgcgctccatgctacatcaatcgtcaatcagaataaaaaagctcaaacagccactgagggtttcagaaaggcagtttctgaagttcggctttgctctagaatggaagaacttctattgaagaagaaatcaatacaccccggtgattcattggagactcattttgagaaggtagataaactgaaggttttgtctgaatcccttgcaaattcatctgcaaaagcagaaaagcgtatcatggaaaataggctacaaaaggaagaatctcttatcttccgggtcaccaaaacaaatgaagttagtggtatagaaaagttgctgagatctctggacttgaggagcaaaggaatcaactcgaggcagaactgaaaaaggtgaatactaaattgaaagttgctacagtgaagcttaaaaaaactagagaggaacgggaccaatttgatgaagcaagcaatcagattgtgttgcacctaaaaacaaaggaagacgaactttcaagatccatagcttcatgcaaagtagaagcaagtactgtcagtgcatggatcaactttttgaaagatacgtggaaattgcagtccttgtttgaagagctaagagaaaaacaggccaacgaagaattggatagatgtggactctgctttgcgaaattgatgaagtatcatgtttctgcatccatggaagagctaagcacttctattgaccgtatcaaaacctttgttgataacttgaaaatatttggtaacagatccgtgtcagcagaggatggagctaatggtccgtctaagcaatcaaaccctcgtagatatcttgaggaagaatatctccaaactgagaaaaaggt

SEQ ID NO: 19936 - DNA, 1040 bp, Zea Mays
atatcatctccttgctgtgtatcatcactagttactccctccttttatatactgctagctggttccgagtgattacccacagcaacagaagcagttctccaggcaatagactagctagatgcgcatcaccaaagagtagctttcgtctagaacgaagaaacaccccccactacatggccgcgctcagttcttgtgttgcttctggaggcctggcacttcaggccacccttgtggtttctcctcctcgccgccgcgggactccagtcgtcatctccgtatcatctcatggtcgccgcccaagtcttatcggctccaccatgaatccttcaggcatggctccgatcaaaagaactacacgaattcgtgcggttcatccatgccctgcaaattcgttaggaggaagcctcaccatcatcccaatacctgacctgctttcatcatgataacgtagagaagacggcggaggcggcgatcgaggtgatcgactcggtggcggaggcgaccgagaaggtcgccgacgaggttgcgcaagcgttccccggcagtgaaactctcaagcaggcagcctccaagattaagacgatcgcggatgagatcgaggaagatgccgacaaagctgaggccctgattgagaaggttgacgagataaagaaagaggtggattcaatcgtcgatcctatactcgacaaggtcgccaaagacaagtcctagagaaagagcccaactggaggagacaaataaaacatccagtaaattagtttaagaagcattagttgagcagtaaccggaagacactacgtacgggggcaacatgacacgtcgggtgtcatcacctatttctctcatcgattcattgctttcagtttcagtcacgtgtttgttcagttttagtgacttcctccctacgaaattctatgagagaacaaatttccttggatgttttattgtcaagtgcttgtgcagttgtgcttgtacatacagtcgctgacatcttaacaagaaccacggtagggcaaatttgctcgatcgccacttacgaa

SEQ ID NO: 19937 - DNA, 898 bp, Zea Mays
gctcaaagcaagccatcgctctggatacattagcatgggataacatcataggattccggtcctattgtgttggccttcgggatcggagtaatgattaatagggacagtcgggggcattcgtatttcatagtcagaggtgaaaatcttggatttatgaaagacgaacaactacgaaagcttttgccaaggatgttttcattaatcaagaacgaaagttgggggctcgaagacgatcaaataccgtcctagtctcaaccataaacgatgccgaccagggatcagcgggtgttactaataggaccccgctggcaccttatgagaaatcaaagtctttgggttctggggggagtatggtcgcaaggctgaaacttaaaggaattgacggaagggcaccaccaggcgtggagcctgcggcttaatttgactcaacacggggaaagttaccaggtccagacatagcaaggattgacagactgagagctctttcttgattctatgggtggtggtgcgtggccgttcttagttggtggagcgatttgtctggttaattccgttaacgaacgagacctcagcctgctaactagctatgcggagccatccctccatagttagcttcttagagggactatggccgtttaggccacagaagtttgaggcaataacaggtctgtgatgcccttagatgttctgggccgcacgcgcgctacactgatatatccaacgagtatatagccttggccgacaggcccgggtaatcttgggaaatttcatcgtgatggggatagatcattgcaattgttggtcttcaacgaggaatgcctagtaagcgcgagtcatcagctcgcgttgactacgaccctgccctttgtacacaccgcccgtcgctcctaccgattga

SEQ ID NO: 19938 - DNA, 75 bp, Zea Mays
ataaataccaatgggtttcagggttcaaatcataaaaacacaagacctatctatggtgtttctactctaggcgtg

SEQ ID NO: 19939 - DNA, 3458 bp, Zea Mays
caatcccaacacggcgacgacgccagcggaaatcgcatcgccctcttcctctttccctcgctgtgcaatctcccccaaactcccctctcgaaccctcgctctcgtcgccagagcaagcaaagcgcagaataatgaacttgaagatcagcttcgcaagtccgcacaatccaaagtcccatcagatcccagcatatggcttcagatgcgtgacaactttgagaagattattctcatagatcatgacctatctgaacagaaagaggtagagtatctcctatggaagttgcattacaaaagaattgaggacttcaggaggagcattagtgctgcaagctcagctgcatctcagagtgggaagagcaacgctaatccagatcgagtcaagagaattaaattaaccttcaaaagcttcctttcagaagcaactggcttctatcacgacttgatgttaaagatcaaatcaaatttgggccttccactcagttactttccagagggcatcgacaatgcaaacaactctgcgcgagatgacaagacaacagtgcagttgaagaaaggtttgatttcatgccatcgctgcctgatatatttgggagatcttgctcgttacaagagctcgcaaggtgatggtgattctgctagccgtgaatacgcagcggcatctagttactacatggaggctgcttctatctatccttccagtggcaaccctcatcatcagcttgctatactagcatcttactcaggcaacgaggtggtagctgtttataggtacttccgaagcttagctgcagatactccttttaccactgcacgtgacaacttgattattctttttgaaaagaatcgccaaagctatagacagctgccagacaacaacaaagttcccagcgctaaggcattacccccacggctatctgggaggggacaaggacggggagaagtaaagtttcagccaaaagatgttaacgcagaagcagctgaaagggaacaggagtgcaatgttcgtgatacattgaaggccttctatatacgatttgtcaggctcactggaattcttttcacgaggaccagtttggaaacatttggggagctgttttcttcagttagcaatgatttgcagattcttctttcttccggtcttgaggaggaccttaatttcggttctgatgctgcagaaaatgcattagctgctgttaggcttactatcatccttatattcacagtgcacaatgtaaataaagaacctgatagccagtcatattctgaacttgtgcaacgcagagtactgctccaaagtgcgtttacggctgcttttgattttgttggacgaattctcagaaggtgttcagaacttggtgatatcacatcaagcttctatctgccagccattctggtctacatcgaatggctggcgtcccatccagagttggctattgactcagagatggaggaacagcatgcaaatgccagatctttcttctggaaccaatgtatctcatttatgaataagttgatccttaccaaccttgcttctatggaggacaatgacgatgaggcttgcttttctaatatgagcatttatgaggagggtgaaactgggaacaggcttgccatttgggaagatcttgaattgagaggttttttgcccttggttcctgcacataccattttggatttctcaagcaaacacacatttggaaatgttggaagcaccaaggagaagaaagcacgggttcaacgaatttttgctgcaggaaagtcactgctgaactttgttcagattgatcagttgaggatatattttgatccatctttgaaaaagtttgtcttggccaagaactctcctgtttctagaactaacacccctcttcatgaatctcctgatgcacttaaaacaaatgggactgaaatggatcacaaggctgctagaagatttgattcagtttcttctaatgtgggctcactgcagtctaaagtgcagttttgtcctgatggtgatgatgaagaagaaattgttttcaagccaacagcttatgagaagttttcaaaagtttcttcagatctgtcagttaatggatacgtccatcctgtaccagtgtctgctgctggtgggccaaccaatgctagtttagtgcctgttcagaacactgcatcaatgtctgcaactcgtttaccatccaatccacatgcaactggtttgccatccaatggtgggtcacttccaagtactgcatctctatcagctgctggtaattacaacactgatcagtcgcttcccaggtcgtctgttggttggactgattgggctgtcaatagtgagcaaaatgttactcctagcattgctccaagatttgaactcatgcagtctgttgaggagcctgtttccagctggacaagcagtggggcacagcatgttggtcctcagcacaagcacacaggtttaactttcccagatgttgtctctgaaccatgtgtatctgcatcaatggttcaatgttttagtagctccgattattcgaaatttctcagagaacaagaaatattcttaatgaatggactgaagactgtcaacataactggaaatggctatctagagcagagattgcagcctggattgagtggtttacagtctatgggttattcatctcagatacctattcaacctggtggtaccactgcaaacctgatgcataatcatgtcaaaattactggagagactgtcccctctacacttgattcagttgtaccttcaatagcaccatcaggtggcatgccaatcaaacttacagaagcaccactaactgcttcgaagaagaaccctgttagtcgtccatcaaagcctgttggaccacctccaggatttaatcatgtaaccccaaagcgtcaagatgattctattccggttgaaaaactgcagaacccacaggtcgatgattacagctggctagatagctatcagcaatcgattgatcatgttcacagcttaagaactatttatcctggtgtcagtgatactagcactgcatttgccactccattctctttccctgggaggatacacacacaagggaccaatgaaaagacttggcaagatttccacctttttgagccttcaaaacagaacatgttccaaacttaccaccaaagaaatctgcaaagtggtcaaatggatgaacaagagccagcaaattctatctggtctagcagttaccatgtgtgatttggtaacttttaccaggatgattgctggagtttctggggacagactattggattaagtggcacgacctgatctattgagcttagcccatacctgcagcacttagtgttaaatttcttttgagaatggtagtctttcaagcatgacaatggctgctgttaagtttgagcccgttcaaaagattgaagaatgaaatggcctcatttcgctgcagctgcaactgatcaatagtatt

SEQ ID NO: 19940 - DNA, 3311 bp, Zea Mays
taggaaggagacgtcctactctgatgggtcgggatgaggacttgcccgattgatctgaaggaggcagtagccagtgttatatttgcatcaatgcggtgttcagatgtcacagaactagcagatgttcggaagcatttcaaaagcaagtacggaaaagagtttgaagcagcagcccttgaagtgcgacctgacagtggtgtaaatcgtctgataattgagaagctgtcagcaggagcacctgatgtgcagactaaaatcaaaacattgagctcgatagcagaggagcacaacatcaaatgggagccaaaagcgtttgaggagaaactgcaacaaccaactgaaggtcatctgtatggttctgcaacatattctggaggaaatacttcaactatgggatcatctacttctagcatatcaacaccacagcctacatattcaggtgttagtgcggcacctgtggactcagccactatccatgtgccagcaaataaaactgcatatggcagtgccaattctaatactttttcgaaagaaagcattcataatagttccagtgcatcagtacctcctatctcccaacatgggccgtctgcttactcttcagcacaggttcctggttctaacaatatctcacatggaaatccaggaggtccaccttaccctcaatacagcgcaacagtcccagacgcagtatccaggaatgaagatagcaatcagaatagggaaagaaaacctttggtgactggtgccaattggaatgtggaattcaaggatgcaacatctgctgctcaggcagcagcagagtctgcagagatggctagcattgctgctagagctgctgctgaacttgctagtcgtggaaactattctggagataaaggcactggagcctatgattcagccgcatacagtagcaaaaacacagtgaggaagcaacgggcggaacatgtagtgaaggatgagagtttccatgaccagagttcaggtgttaatgatccaagcgagatgccaagtaactcaagaaatttttttggaggaacagaaacatcccatgttgatagtgagaatatatcgacagccccatatcaacagttccatgcctacaatccagacagccatccatatgtttatgaaatgccaactgaaccacctcgtgctcattcacctgacccacgttttgatgatttatatgagagggaaagtgacattggaagatctgaagttgatccgtttgattttcctagagaaaacttccaagatactgcatctgttgggcacaatttcaaggatgtggaaatcaggacacctagctacgatcaagaaagcacagatgactactatggtaattttaattcttcacatgatacattggcccatggcagcagcaccactgcttgggataagcaaaacgacaaagctcaagacaactcttcacctgttgtttttgatcaatatgattctgatgttgaacaagagaatttgttggacacattctcctcaaagcatactgaacaactacctgctcccggagatcatatgagattctcaactgcagattggagtgaacagcataccagtgaatctccatccaagcagagaacgtcagccctattttccagaacagaaacacaactatctgataatttaggaacaaacaaaagtgatattccttcacctcattcttatcataacatgcgtcctgcttttgattcagatggtggtagctctgatgaggaaatagccacaaccacgcatgcagtgcctttaaggtcacattcaggaggatctgcttcgtctgtcctgaacaaaggtggtggacctgatgcttcacccatatttgattattcaggagcacatgcagtgaggaacttgaaccgtgtgcaaagcagagattctgatctttcggaagaagagacagatttagataaatttaaaggttcatccttcgccagagcaaatgagcagcagctgttgccttctgccatacgtacttcagcaacttctgatgataaggaagatgacatcagcctgaactttggtaagttaacgcctggactaagaaacaaacccaggcaacccccaccatacaccaaagtttccagggagagcattctgcctaagcagtccttgcctaaggtttctgctggcactgaagagtcagtcgattctgaagagaatactacattcaaacaggatagaagtagtccccaaagctcattttcagccaggacttcttcaggtaaagactacgacagtggactttatgaaaggaaccgaagtgttggaacacactgggaagcaaaatcaaccatagcaagaaattcctctggtttagatgatgctgagaagttatctgatctacctactaatataagtcttccaacaactaagagttctgaacgctggaattcgagtaaagtgccttatcatgaaaaaccaggtattggaacacgccgagaagtgagatcaacactggctagaaattattttgattcagatgacagtgaagaagaactagagcaacagcagattcctcagtcgaagcaatctggagtgctgatacagtcacgcaggacacgggaggtgacatcagacacaaagagagatggtcgtttccaaaccggagctcagtatggtgatgaaactgagagtgtgacaagtaagacacaagtccatcaaggattcaacagctcaagtactgaacggagtgaaaggagggatccaagtgtgtaccccagggttgcagtacagcgctcttcgtctaaagctgagcagattgaatctccgatggagagagggaagccacaaggagctgaaatgagaagcaccttatttcgaggaaatgaagaggacacagaaacctcatctggaactccaaaagaaagcacccccaaaacaccccctgcacatgttcatcccaagcttccaacagactatgattctttcgccgcacattttaggtctcttcgaacaaaccggccttaggtttacacgacatatagagtttggagtttcagttgaattaagtcatatatacgatactatgatacgttttatggaggttgagttgagatttgtacattatagcaacactgttttctggacactatcgtgctgtgctagtttgggcgtacaattcttttgttctcttgtatcctcatatactcaatagaatcatattgtaaagactttaatttcctgttagtgattattaataagcacggcatgttggcatatgtatagaacatgcggggttctttcattccattgtaacgggatctgctacactcatgctatgagattgtttcatg

SEQ ID NO: 19941 - DNA, 2303 bp, Zea Mays
ctttgtgaggagaccgttaagcagggacttggtggcgaacaattttgcgacgaatagcggaccttgggggctgccgtgtcttcagagagacacaccctgtttccttggctctccacaatctgcctctcttgctgtggactgtgggagcagtagatctatatctggctctgataagtccatgtatcaacgtgatgatgccaatcttggagctgcatcctattatgttacaggagcacagacatggggtgttagcaatgtgggcaagttcacggaggcagtatacgaaagttacataatctccagctcacgccaattctacaatactctagatccagaactattccagacagcaaggatgtcggcatcatctttgagatactatggtattggactccagaacggaaattataccgtcgcacttcaatttgcagattttgactttgaagattcacagacttggcagagtgttgggagaaggatttttgatatctatctccagggtgagcgtaaggagaagaactttgacataatgaaggcagcagggggaaaatcttacactgctgttgagaagcagtatattgttcctgtcactagaaacttccttgagattcatcttttctgggccggcaagggcacttgttgcattccctttcgaggctactatgggcctgcaatctcagctttcagtgtaacgccaaattttaaccctacagtgcagaccagtaggaaaacaggtataattgttggagtcgtggttggtgcagcagttttgggagtactagcacttgctggactctgtatgaggaggcagaaaaggagaaaattattattggagcaacaggaactttacagtattgttggaagacctaatgtattcacttatggtgaactaaggacgtctactgaaaattttagttccaataaccttctgggtgaaggaggatatgggtcagtttataagggtaaattagctgaaggaagggtggtggctgtaaaacagttatctgaaacatctcatcaaggaaaacaacaatttgctgccgaaataggaactatttctcgagtgcaacaccgtaatcttgtgaagttgtacggttgctgccttgagggaaataaaccactgttggtttatgagtatctggagaatggaagccttgataaagcattatttggaagtgggagactgaacctagactggccaacacgctttgagatatgtttgggcattgcaagaggcatcgcttatctccatgaagagtctagcatccgtattgtgcatagggacataaaggctagcaatatcttgcttgacgcaaatttcaaccctaagatctcagattttgggctcgccaaactttatgacgacaagaagactcatgtcagcacaaaagttgcgggtacatttggttatcttgcacctgagtacgccatgagaggtcatatgaccgagaaagttgatgtgtttgcatttggcatggtcatattggagaccttagccggaagaccaaattttgacaatatgctagatgaaattaaggtttatatattagaatgggtctggcaactgtacgaagataagcaccctctggacatggtcgaccccaagctcgaagaattcaacagtggcgaggtgatccgtgccatccacgtggccctcctctgcacccagggctcgccacaccagcgtccttccatgtcacgagcggtgtcgatgctggcgggagacgtggaggtgggcgaggtggtgaacaaacccagttacatcacggagtggcagatcaagggtggcaacaccagcagcttcatgagcaacaatgtcagtggacagtcgagcatggcaccaaggtcgtcagcctcgcacacctcgtcgccgttcttgaactctgtcatcgaagaaggctggtgattattaccaagttctgtcaagcgaacggactgctgcttataaatgcacgctacagaatgctctctggtctctgcctctgcacatatgctgtgtaggttctatgttccattttttatacaaatgatagatatattgattgctaggtccatttgcaagaactaaggtggtgtttgtttaaggttataatttgtcaatattatataatccaacaacttttaaactaaagattagttcaaaagttgttgaattatataatctagacagattataatctaaaacaaacacccctaagtcacgttagatatataattttccgctatatcaaacagatccttacgttgtctccattggctttctattttctattccatcttctaattcaaacttcactttatgc

SEQ ID NO: 19942 - DNA, 160 bp, Zea Mays
cgcacatgtcctctctctctcccccgcgcatctcgtccctctcctccacctcgcccgcgtcgcttggaaaccgccgaccgcctgtgccgccctcgcccccccaccccgcgcgtgataatggtttggttgaggagtctgaataactcacaggagaagaccc

SEQ ID NO: 19943 - DNA, 1663 bp, Zea Mays
ttatcctcctggttggcctcatcttcaagctgccactctaagccgatctctatcttctaacgctctctctctctctctcccttctgatattttgcaccgccgtgcacaggtttctggtgttttctccaatgcgttcatctccctctgcgctcctccctgtcgcgccctccctggtgcacgcgcgcagctccctctgccttccatggccgcgccggtttggagctatcttcacgcgccctggttcctgcacccagtcatcttctcctaccgcaactctctcctccctccatctctcctgcgcgcgcccagccccagtgcccggccgagatccctggccgccgcgccctgctctcggttgctgctcgccggtgctccagcttgtcgggcgcgcccctgctcctcgcccctccccagccgaggcccctccttcccgtttcccatggccaagcgtccggccggagcttcttttgctcagctctctgctgttgagctcctccggctgtgcttccctgctcagcgcgtttctccctactctctccctcctctggacatggatgcttaggagaagtggtagccccagctcggcaacaccaataggctccctggaaccagcctccctttcgagtccctccgcgtgccactggtctctgcttctcccacggccgccgtcgagtcgtcggactcgtccattccccgctcgcccctgcgctcgcccagctccctgtgcctgccattccagcaactctggcgtcaacgctccctgttcttgttgcttagagtgctccagcatctcgccctcgtggccttcgagttagattaagttattggtgagcgccgtgctgtcggactccatcatgcagccggtgttcgacaaagaaaaatctagtctaggattctgactcggcctcgaccctgtcgtccttgaaggtcctactatccctatgttgttcgtcgttatcttggtcatgtggtggccgcaacttcctatgttagtccctagtccacatcgtcgtccagctcagtagccgtataccatcgacagaggagagaaatcactggattgcgtgacaaagaagcgtagtccaatatgacacctgccagccaagcactcgacaaattccctgaatcggagaaccattaccgatctcgtgtattcgagtcagctattggaatggtcgcaagcgctcaatgtggaagaatggaattagatgaagaagaaagagaggttcagcgcgatgctcactaggtgctcaataaattgcgagtcacggaactctcgtcgacttcgaggttacgagtcactttgattgtgattgatgttaagtgccggtgggctcggccttcttataagtctaagtacttcttctatacttcttattgaggattgtcattgagctagcatgtatttcaaacttataaataatttataacatttcaaagtttattctttgaaccactattgtaaccactccgataaatataatgtaaatttgttgttacatgtaaaatttggtaataagatttccgctgcaaattgttggtgtgtgatttgtgtttacttaatcctgcggtcctagttgtttgtggtttatccggggtccttgggacaatcagacggatcctgttaagttatctggtgcacatgcatagccgtctgaggtct

SEQ ID NO: 19944 - DNA, 3364 bp, Zea Mays
atcacgaggttccattccatgtcagtgtcaagttgtcaacggaggtgctggcatctgccatgtggcggaaatgattcttcctgcccagcatctacttcgggtgccagctcatcaattcatcagccgtccacaaacccgcgggcgcaacttctcggcacgtacgcagctgtgcgcgcgcgcgggaggagtggcgccgcacgcaaggtgtttggcggattgcctcttccagatcatctccgccgtgctgcctcctgccttagacagtcgcatgccattgttgaatgaagcccggcgcggctcaacggcaaccgttgcttccacttctgattcctcgttcgcctgctgcacgctcaccactgtacgtccccgatggctgaagccatcagcgcgaccagctcgtgcctggaacccctgtgcggttgtctggaaagcacaggcgtgttcgaggcagtgggccgggaggtggccgcgttccttcgcatcaagtcgaattgtggcgacctcgagaaggcccgggacagcctgcgcgccgtcgagacgacagtcagggcgcgggtcacggcggaggaggacaagctgaacgtctgtgatcctcaggtgcaggcgtggctcaagcgcgtcgacgagcttcgcctggacaccatcgacgaggattacagcagtctgtcggggttctcttgcctctgccagtgcaccgtgcacgctcgtcgccgcgcctcgatcggcaagcgtgttgtggacgcgctggaggaggtgaacaaactgaccgaggaaggaaggcggttcaggacatttgggttcaagccaccgccgagggccgtcagtcagttaccccaaactgagaccgttgggttggagcccatgttggctcgggtccatgatttgcttgagaagggcgagtcgagcataattggtgtgtggggtcaaggaggcatcggcaagacgactctcctgcacgccttcaacaatgatctcgaaatgaaagaccaccactaccaggttgttatttttattgaagtatccaattcagagacactgaacacagtggagatgcagcagactatctccgataggcttaatttgccatggaatgaatcagagacagttgagaaacgggccagattcctattgaaggcactggccaggaaaagatttctattgttacttgatgacgtaaggaagagattccgactggaggatgtcggtatcccaactccggacacaaagagcaaaagcaagctgatcctgacatcacgtttccaagaagtatgcttccagatgggtgcacagaggagccgcattgaaatgaaggttttggatgataatgctgcctggaacctgttcttgagcaagctgagcaacgaggcttttgcagcagttgagtcaccgaatttcaacaaggttgttcgggaccaggccaggaaaatattctccagttgtggaggtctaccacttgcactcaatgtcattgggactgctgtggcagggttggaaggaccaagagaatggatttcagctgctaatgacatcaatatgttcagcaatgaagatgtggatgaaatgttttatcggctgaaatacagctatgacaggctgaaacccactcaacaacagtgctttttgtactgcactcttttcccagaatatggatctattagtaaggaaccattagttgattattggctggctgaaggtttgcttctcaatgatcgtcaaaagggtgatcagataattcagagccttatttcagcatgcttgttgcagaccggtagctcattgtcatcaaaagtaaaaatgcaccatgtaatcaggcatatggggatttggttggttaacaagacagatcaaaagtttctcgttcaagcagggatggctttggatagtgctccaccagcagaagagtggaaggaatcgacaaggatctccatcatgtctaatgatatcaaagagcttcctttctcaccggaatgtgaaaacctcactacgttgttgatccaaaataacccaaatttgaacaagctgagttcagggtttttcaagtttatgccctccttgaaagtgctggatctttctcacactgcaataacaacactcccagaatgtgagacattggttgcattacagcatctcaatttgtcacacacacgtattaggttattacctgagcggctgtggttattgaaagagttgaggcatctggatctcagcgtgactgctgaactcgaagataccttgaacaactgctcaaggttactcaatttaagagttcttaatctctttcgcagtcactatggtattagtgacgtcaacgacctgaatctggattccctgaaggcactgatgttccttggaatcactatttatacagagaaggtgttaaagaaactgaacaagactagtcctttggcaaagtcaacatatcgtctgcatcttaagtactgtagagaaatgcagtcgatcaaaatctccgatctcgaccacttggtgcaactcgaggagctgtatgtcgaatcatgctataatctaaacactcttgttgctgataccgagctgactgcatcagattcaggcctgcagctcctcaccctctcagttcttcctgtgctggagaacgtcattgttgcaccaacgccccaccattttcagcacatccgcaaattgaccatttcgagttgccccaagttgaagaacatcacatgggtcctaaaacttgaaatgctcgagaggctcgtcataacccattgtgatgggttgctgaagattgttgaagaagacagcggtgatgaggcagagacaacaatgctgggtcagggtcatccttctgaagaacaggaagataaacggattgatggtggtcaaagtgtgtgcaagagcgatgacaatgcgcatgctgagctcctgaacctgagatcaatcgtgctgactgatgtcaagagcctgagaagtatctgcaagccaagaaattttcccagcctcgagaccatccgggtggaggattgcccgaatctgagaagcatcccactgagcagcacgtacaactgtgggaaactgaagcaggtgtgcggttcagttgaatggtgggagaaactggagtgggaggacaaggagggcaaggagagcaagttcttcattccaatctgacaggcccctccgttcagctgttctcggcggttgctgtgtcagttggcaggaagcttcgttcaatgctgccacgaataagcggttcggaatctgtatatgcgacgagttgtttcttttacaggtagtctgtgtatattgcttgtgttcacaaacctgtacatgatatgattcattcatgtattgctgtaaatgcgatcaataaaattccatttgtctaaaaaat

SEQ ID NO: 19945 - DNA, 2971 bp, Zea Mays
tagattggttagagtttgtttgcattatttctgcagctatgatggcatacttgtcaattctattgaggcaagaccagtattctcaagtcttctgcatgagcctttcaaatctatacctatcatttggactgtgcatgaatattctcttgcacatcgtgctaaagaatataatgtgagtggaatgattcagctcataaatgcttggaaagatgtattcagcaggacaaatgttatagttttcccaaactatatattaccggtgatgtatgctgcatttgattctggtaactatttcgtgattccaggccccccatcagaagcatttcaggttgacagctttattgctaaaagttaccacgaagacgtgaagatcagcttgggcttgaatcctaaagattttttaattgctattgttggtaattcattttcatacggtgataatttgatggaagaggcacttgtcttgcaagcattgagtcctctgttacagagatatcgctctgagaatagcgcacaatctgaactgaaagtaaagatcttcactgggaacataactgagaagcataggatggcccttgagtctgttgctctaagtgttggcttcccaagaggtgcagtggagcatgttgctgctgaagataaggacaacctccttggtacagctgaccttgttatatattattcttgtctcgaggagcaattattccccagtgtgctagtccaagccatgagtcttgagaagctggttatagccccagaccttgcaattattagaaaacatatcaatgatggagtaaacggacttctgtttccaagaaagaatattggcatgttagctcaagttcttcttcgagcagtgtcaaatagtaaagtgtctctttcagggcaaaaaattgcttcagctgggaaggctcatgccaagaatcttatggcttctgagaccattgaaggctatgctatgctattgaaaaatgttgtcaagctccccactgatgcactaagccctttaactgctgatgagatacctttagctctgaaacaagagtggaaatggcacctatttgacgacgtgaagcatttacaccgtgtgaatacgagtttgtctggctacaagatactccagaaactagagcaggagtggcatagcaaccaaatggaaaactcttctttgagtacaaaaaatatcaatgacgcattctctgcaattgcctgggaggaacagagagtaaatgaggttatggacatcaaaagaaaaatggaggaagacgagttgaaggacaggaatgaccaacctcatggaacatgggaggaggtgtacagaaatgtgaaaagggtagagaggttaaaaaatgaattgcatgaaagagatgacaaggagcttgagcggacaggtcagccactttgtatatacgaacctttctttggggaggggacctggccctttctgcaccagagctctctttatcgtggagttggtctgtcttcaaaaggtcgaagaccaggagcggacgatattgatgcttcttctcgtcttccacttctcaataatgtttactacagagatattcttggtgaatttggagctttctttgctcttgccaacagaattgacagaatacataaaaattcttggatagggtttcagtcctggagagctacagcaagaaaggcaaacttgtcaaccaatgccgaatctgcaatcttagaagccattcaatctcaaaagcatagagattccttttatttttgggttcggatggatcaagatccaagaaaccacgctaataaagatttttggtccttctgtgacgtgatcaatgctgggaactgcaggttagctgttctggaggcctttcaaaggatgtatggtgtacatcttgatcgtgacctggatactctgttacatatgcctaatgatggagacacgtggtctgtgatgcaaagttgggttttgcctacacggtcattcctagaatttgttatgttctcaagaatgtttgttgatgcactggatgcacaaatgtatgacaagcaccatcaaactgggcattgcatcttgagtctccacaaggaccagcactgctactcccgtcttctggagttgattgtgaatgtttgggcattccacagtgcacgacggatggtctatgttaatcctgcaactggtcaaatgcaggagcagcaccatctcagcggcaggagaggtcaaatgtctgtgcagtttttctcctacgccactctgaagagcatggacgaggagcttgcagaagagtttgacttggatcacccagacaggaggtggctctggccacaaactggagaggtcttctggcagggtctctatgagagggagcgtagcatgcggcagcatgagaaggagcggcggaagcagcagagcagagagaagatccagagaatcaagagtagagctcggcaaaagacgttggggaagtatataaagccaccacctgatgatacagttgtctcgaacgatacaacgactgtagatttatagcattttgaccatactttagggtgataattcttaccgtggaaaattttggttcattctttcattgttacggctaatgtcctcggtcctcactgagtacccccggcaggtgtgaatatttttggtcagttttatcgtgccctctggtgttcagggtgctttacaggcgattttgtaacatatctaggccattaagtttaaatttgggttcccgtagcgtagatgcttttgttcttttcgcttacgagcttctcaataacaggcaacagctgctccgcgtttgcagtctccttggtacaaattgagttgacttgattgtgtcagtctgtcagatatttggttgaacctgcgctattatctacgtttcggtgttgagaattttgttcaacatcctgtaacatgaaaaaccacattatatcttcgattgttttggtgtcttacacaaaatctgtcattatg

SEQ ID NO: 19946 - DNA, 1617 bp, Zea Mays
ctggactacagctggagttccatttttttacgcagatttcttaaatgagatgtcacagaaggacaagaaagttgattccttagttaaaatggggtttcctgaagacgaggctgcactggctattactagatgcggatgcatctatttctgttctggtggattccatatatgcttcacagaccgcaggagatggttactgtggcaatttgtctgactacgagggtaattccaatggagggagaaacaaaggaaggttcatggacgggaacaaaaaaaagagaaaaagatatggaggtcaagcacagggaaatagaggcccattagatggtagctgtgaagaacccatgcctctcccaaatccaatggttggatttaatttgccggaccattggacaagaccagtagacagatcgctgcctacacaagctattggaccaccatacttctactacgagaatgttgctcttgctccaaagggtgtctggactaccatatctagattcttgtacgatattcagccggagtttgtggactccaagtacttctgcgctgctgccaggaaaagaggctacatacacaatctaccacttgagagaaggtcgcctctcctccccttacctccgaagacaatatttgaagcatttcctcgtaccaagaggtggtggccttcatgggacccaaggcggcagttcaattgcctccagacttgtacgtctagcgcaaaactgttagagaggattcgtgtaacccttgcaaacagttcggatccaccacctccattagttcagaagtttgtgctggaggagtgtaggaaatggaatctggcttgggttggcctaaacaaggttgctcccctagagcctgatgagatggagttcctgcttggctttcccaaggatcacaccagaggtatcagcaggacagagaggtaccgatctcttggaaactcgtttcaggttgacactgttgcttaccatctctcagtcctcaaggataggtacccacaaggcatgaacgtgttgtctctattcactggcatcggaggagccgaggtggctctccataggctcggtatacgcatgaacacagtcgtttcagtagagaagtctgaggtgaacaggactattctgaagagctggtgggatcagacacagactggtaccttgattgagatcaatgatgtgcagacgctgacagctgataggatcgaggcatatattagacgaattggcggctttgatctcgtgataggtggaagcccatgcaacaatctcgctgggagcaaccgccaccacagagatggcttggagggcgaacattcttcattgttttaccattattttaggatcttggactccgtcaagtccatcatggagcgcctgtagtttttagaaacttttgatgttctggttcgtagaattgtagccgtctttccctgtgatcaaacttgtgaatgatttgaaggtcgactggtgtaatattcatgtcactctaatttaggctactttcgttaattacctcttgtgatcaatgcaaattgaaaggcaggtttcatttcttaagtttgtatttctcaatgcgagatctagtatctttgtcgaaaaaaaaaacctaaaa

SEQ ID NO: 19947 - DNA, 2644 bp, Zea Mays
tctcgcagtctcgtccgtttctcttctcctgtgtctatctccacctctcctccacccgggcgatctgctctttggacttcagcgaccccatcgttctatctctccgtcgtcatctatctgtgctccccacctcccgctcccttttcgttgcgcctcggggccgctgcgctggtgatttgcgtcgcctccccccctggggttaatgtgacggccctgccgacgatcttgcctgacgactagtttcttctctagctgggctactctccattcagtggttatggagcctcccaggaagaataagtccagtggcatgcaagtcaaggaggaagtgaagttagaagatggaaatgatttgttagtcaagcgcaggaggactgaacttccaggttccattgttcaactacaacagaaaattgaagtatttgacatggagaacaaagtgccagatggtctttcagttgaagattctactggcaaggatcccatggatgtgctcactagatatgcagcacagaactctggtcaagggaatagttgcagtaacgaacctgcaatctcgagactgacaaaaatatgcaaggcaattggctggaaagaaccatcatatgactttgaagaacaaggacctccgcataacagaatgacaacacagttccacttgttggaccctcactatgacgagcaccataggggacgactcatcgcagaagggcaggtgttgcccgttctgcggtccaggacccatgacaggtttctagacatgcggtacgacgacaggtacactcctctccttgagagggctggcttggacgtcgtatcgttccaggttcgccgcgggttgcccacaatcaacattgcggcgatcacagctttggtcgataggtggcggccggagactcacactttccatcttccttgcggcgagatgaccgtgacactgcgagacagccagaagcaacttggtctcagtattcgtgggcgtccagtgaccggtcaggcagcgcccggtggctggagacagagagtcgaggcctttcttggaagggaggttcccacagacacaccaggtagccacacatctggggtttctctcgcctggcttaggcagtcgttcggggagtgtccagctgcagcagatgaccagacggaggctacagctgggcttctgcagtgctatccttcctgtacagacaactttgtgaggcttgtcgtcggacggcaaagaacgcaagtttaggcggttgcgtgtacctactccagttgtggatgtggtcgcacctaccggttggtcgccctattgagtttgctcctcgaccttggttcgacgtcgtcggcttgcgactacgaccgacggcggcttaccgttgggaccaggtccaggctccgttcgcacgtcaccagcgcgcctacgtcgagtactcaaacgagctggacgcacttacaccgtcgatggttagctggcaaccatatgatgagccaccgttgccacacattcagttgagctccgcgtgcacgacagatgaagacatttatttattaaggtgtccactgatttgtttctatgccgttgagtaccacttgcctcatagagtagcacgccagttcggtctacgtcaggagttccctgtggagcccttctcgacatcggtagaactccacaagttcgaccgccaaaagcagaagaagatcactgactttgaggcgcaccaccaagtgtacattgacgaatgggaccaaatgcatgacctcctctaccagagcgatcagtcccacaccaactacaactttcgcgagtacatctcttggtatgtcggtgtaactcggtgcaagttgaagggccagtggacatcagcggactacgccgaactagagtcttcagatgacgaagacacatcctatgacctagttactcggcatgggacacacgtggaggctgcaccaatcctagatagagtgggcaactccatgatgcagtctgtggtcgacatcgagcatttctctaagaccacttctgacgacaggacacttgcctttctctcaaggctatcacgtcgcctacgttgtgctgctgctcgttgtggttgcaggattagcgccgtagttaacatacaacatactctgcagcaccatggtgacacctcgctaggacttggagctatcaccgttgcacagggctcgtcacgtacgacacgagatgcgtttgcgagccacaaggaggacgaggatgacattaagattcctctcgacaagattggaccataggatgctcctaagacaaccttcacagcctataccacgcagacgatggcgacgatcgcgcaaccctaacaccccaggcatcaacgctcttggggccaagggcaacggtaactagaaggatgcgagggaaacatgatggtgcatgtcttctgctttggcttttttgtgctatggactatggatgacgatatagactttctgcgttgtacactttggttgatgatatagattatctgtggtatgcactttgtttgatctagttgtgtgatgcgctatttagagatatatatgctcatatcatattagttttttttataattgtggatgttactaaaaccatgtccagtagtctatccatactttagctgttgttctgcactgtaga

SEQ ID NO: 19948 - DNA, 317 bp, Zea Mays
ctaaggaggaactcatgcgggtgcgctaggagatcgtcgagttccacaacgagagggtgctacttgagaactacaacgccctcaactacacagggaggatctgcttggtcagagtaaaaaggcagatgacatgagcagagttgctgggttagataaccaaggaattgttggccttcagaggcaaattatgaaagatattggtttattgtggtttgctcagtagtgtttgctcgatggaccttactaaaatggtgcgattaactgtttgcatggggtcatgtagcactatttcttcacatcatttccatttgcatttc

SEQ ID NO: 19949 - DNA, 1524 bp, Zea Mays
gtcattgtgatgttattttagaaaacggacagagtggagccatggtcccggcttctaattcatctgaccggtctgacagatctgacaaacctatggaccagaaggttttacgacggcttgcccaaaatcgtgaggcagcaagaaaaagccggctgaggaaaaaggcatatgtgcaacagctagagagcagtaagctaaaacttgcaagcctggagcaagaactccagaaagctcgacagcagggaatcttcatttctagttctggagatcaaactcatactatgagtggaaatggagctatgaccttcgatttagaatattctcgatggcaagaggaacaaaataagcagataaatgagctgaggactgcagtaaatgctcatgcaagtgatagtgacctccgtcttatagtcgatgggataatggcacattatgacgagatattcaggctgaagggcattgctgcaaaggctgatgtgttccatatactttcaggcatgtggaaaacatctgctgaaaggtgcttcttgtggcttgggggtttccgttcgtctgagcttctaaagctccttgtgaatcagcttgagcctctaactgagcagcaattgatggggctgtccaatctgcagcaatcttctcagcaggctgaggatgcattgtcacaaggaatggaagcattgcagcagtccttggcagaaacgctggctgggtcccttggtccatcaggatcttctggaaacgtggcaaactatatgggtcaaatggctatggccatgggaaaacttggcacactcgagaatttccttcgccaggctgacaatctacgacagcagaccttacatcagatgcaacgtatcctgacaatccgacaagctgctcgtgcgcttcttgcaatccatgactacttttcacgtttgcgcgcactgagttctctttggcttgctaggccacgagagtaacatcacccccgttggggtcactcgatgaactgatctgtgaatgtgggactgctggctgcaaactcgcaaagcatttgcagatgactggaggatcagtcctctctgtacaagttgtattaacatcttctggtctcatattgtgctccagtgttgtacaatttagggaaaagcttggattaacttgtaagttatcatgaatttgttattggcatattgtacaattgtattagcaataaaaatagaagtacataagtgctggaagcctggaaggatatccagaatctatattggttggaaacgagcagcagaagattgttatagattgttatgttgctttgaatattcggttgtaagtgccttttttggggtatatagaacaaagaaagattcaggagagatgtagggattcaccagaggctatcggggattgtgcttctaggagctccctggactatctctagcaagtctcatattaagctctactctgtaaacagtgatacattgaattgaacgtgctacggttatgatggtaacatttgctatgcattttttaggatgaattctg

SEQ ID NO: 19950 - DNA, 1551 bp, Zea Mays
gttttctggatcggttcgcggggtggtttcggtgatttgcgcgaattgcttgtgcaatggggaaagaagttgttgatatgtctactgatgaagaatcagattgcgtagttatgtgtccacctaacagaaatgctgatcatgaggaagctgtgagtggcagccatgatgaagattcttcaggaaggcaagagaacccttatgctgtgaactcacatatgaacacccgtggccaggaagatgtgtctgtaaacccagacctgctcaagctgattcatcagcaggagtcttctgtcagcaattcaccatcaaaacctgcaggagctagacagcaagggtctagccatactgtccctgagtcatgcactattgcacctgaaagaaggtcatctggagcaggaacttgtgctccaatttcttatcccaccagcagcggggaaaaactttcagatataagtagctcctcaccaagaagcatgacaaagagtccatcagtcacatgcaggaagcctctccaatctgacaatacttctcacagtcaagaagaggactcatattctgtcacttcttcaactgtaacttcagcgagagctggaaaaactaagaagacaacggttgctgttgcacctacatttgtctgtgataatcgtgctgagaagagaggagagttttacacaaaattagaagaaaagcgcaaggctttggaagaggagaaactccaagcagaggccagaaagcaggaagaggaagaagaagctctaagacaactgaggaagaacttggtcgtccgagcgaaacccgtgccgagcttctaccaagaacccccaccaaaggttgaacttaagaaggtgcctccaactcgtgccaagtcaccaaagctgacgcggaggaagagctgcagcgacacgcctcacacaccagagggaggaaacggcggcggcggcgcagtgtgctgccggctgcaccgccacagcatcgggaactccaaagacatcggcagcaaggcacaatgctctccaaagactggaccagctgctaagtccagggcgcccccaaatccagggaagacccgagggcttccatgaagaaagcgggacagcagacaagcgccgccgctgtacaaacctgacccgtgaagcatccattgccatgccgtttttcatcttaatccatataccctcacatcacccggaaagatggcctcatgccccggcaacagacagcgtgcctggtgctggattgtttttttttgggcgttgcccttgtaagaacctggctgcctgccagagaccgtgcgctgtgtccgtgtctgtaaatttgctgcaagttttgtatggggtgaccgagtcggtcctgtgtgagaaccaaacggccgggcatattgtcattgcgtggggggcagcattcgctgatactatgtaatgtacctgagtgagctgtaacctgttgtgggcatattggcaaagcgattctgattgatgtcgaaaaaaattgaccaggtcatgcatgattcttttcttttcttcctgtgaacataccagttaatcaatcaag

SEQ ID NO: 19951 - DNA, 1173 bp, Zea Mays
cgagaggtcaaggtggtaaccatgctagttgttctcgttcccttgttagttgagctctttcccttcctcgcttggaaccaaatcaattcggagcggcggagcaaaacgatcccttgcctcgcttccattcgaatcatctcgaatggggcactaatcgagaagctaatgacgcacaaatcgcgagatctgtagcgccactcggcttcaccggcggcgcggcgggcatggaagcgcagaacggctccggcgtaggggcgcccgtggtgctcaacgtgtacgaccttacgcccatgaacaactacctctactggttcggcctcggtattttccactccggaatcgaagtccacggcatggagtacggatatggagcacacgagtttccaacaagtggggtatttgaggtggaaccaaagagttgtcctggtttcacctacagaagatctgtgtggatgggcacaactgacttgtctagagcagagttccgctcgttcattgaaaatcttgcaggaaagtacaatggcaacacataccatttgatttcaaagaactgcaaccattttacagatgatgtctgtaaaaacttgaccaggaaatcaatctctgggtgggtgaatcggctagcaagagtgggttcatttttcaactgtcttctaccagaaagcatccaagtttccacagtaagacacgtccctactcatcctgcattttctgatgatgatatggattcggtatcttcatcggttattggagacagtgatctggaagagctggaccaacaccttctgccatcaactgctgacgtccattctatagacgtgccgccaaagctagcgaaagatcttctctgagttattcagcactttgggttttcacatagcaaggataacttggactgctgcagttgatgtccactgagtgcttctctgggtggcgcagccgcgcaggactccaggaatgtcgaatgctgctaattgtatcgattcttttgccactgaggtccttacatgcacacagagctctcgacagaaatgacacgctttctaatcctttgcctgttgttatgacttttatgttgtgacttcatcctaagtatcttgtgttcgagcgatactgtacgcattcagaatgccgtcaatggcgtgtctggttcgaggcatacaaaaaaaaacc

SEQ ID NO: 19952 - DNA, 729 bp, Zea Mays
cgcgagcgcaggttgccacgaagggataagctggagcttaaagccgtgaaagacggttctgcaagctatgctgctctagaaaagaaagcagagttgtatgaaaaattatacagaggcgagctacctgacgaagaagacaaagagaaatactgtgtggatttcttccaaaaaagttccgatcgtatctatgagcctcagatgccagagattagccacagagccactgatgctgcagagccggtaaatgatcatgaagattctatgcctaatgcgaaaccgttggggcttggccgagcaggcactacaatcgacagagatgagcacaagcgctttgtgagggaagttcatgaggaagtaactgaggcaaggcagaaggcctcaacagtaagatctcgacgacaagagcaggatgctgctcgtagagagaaactcaggcaagcttacctgaagaaacggttggaaaagttgattgctgaaaaacaggcctcttcagccagtgatgacctacccagctagctagtatatgtgcttgcatgtccttcccaagtagcagtctagcagctgtaatggtctgttttcatgcattctcatggaacgcttactgtaaagtctcttttgacccagtacagtcatattcaagatatagcgtttgcaagtactgccggtgttgcagaatattgttgtacacaaatctagataatgccacaatgattttacactagaacatca

SEQ ID NO: 19953 - DNA, 5171 bp, Zea Mays
gttcgttttggtaacagtcgctagcgaaaaagcatccgcccacctcccctcgtctctctcgcgctccgccgccgcgcaaaactgtctggtgatgacgaacgccgccggtacggcccctcacccgactccgccgacgccgctccaacaacaacagcatcagccacccaaggaccagcagcagaaggcgctggccttgaacgcattccgcctgaaggggatcggcgaccgcatcaggttccacctgaagggcatgagcgtgcccccagtcgccgagttggcccacctcatctacgcgttcgccagagggattgacttcgcggtctcagctggtgatattcctctgacagccggtgacatacccgagattctgagaaaggtatatgagctgaggaaagaaacaattatacaatcttcgcttatgatactagcgatctcttgcaagaatgcttgctccaataaatggtttcaacctgcagattccagagacattcttagaatggtcaatgagctctctggcaacttctgcacgtccacaggccaggcagctagtgacagcactgtgcttgaaattatatcacaaataatgccaaggtattaccctcggttgaagtttgagcgcctaatcacttctattgaagcaaaggttggctatgatatattaatggctgacttctttattgagaggagcctatctcgagatgaaaagattagactaattgtcgtacaaaaggaaaatttagatgcctcatcatgtgtctcaagtccaccacatgtgagctttttggtcaatgggaagggtgtggacaagaggactaatgtttcaatggaacaaggaccccagttacctactgatatcaccaaaatgctcaaatatggggctaacattatccaaggtgttggatattttaatgctaattatatcatagctgtagcagttgtgaacgatttgacatccttcagtgctccaaaactggatgactatgcacaacctatcactgtttatcctgcagagaggctgcgttgaacccaggacctttggctttggctcagtgggaaggcttctcaccactgaaagttcagtatattttatgctatgcgtccagtttgttgttgttgttgttgttgtcgtcgagtttcttgactgggactgaagtgtgttttaaatgacattttgtaatctctcgattgaaatatccatgtaggttcatttaaatttgtgtctgattcttcatacccactgacattatagttttttatgttattttttgtttttttagaaatggactatcagttttactcgtaattattcaattcaattcttgctacaccttttgagttttttcaccatcgtcaatctgctcttgtctctgtttggccttatgttggaaaatggaaataactgattgctacctccatccccaaaaactttatgttcgtaaatcaaactatcttaagtttgactaaatttatagataaagttgtcaacttatgatacaaatagttatgctatgaaaacatgttcagatctaatgatacttatatttggtaatatatacattaatattctattgtataaaattggtcaaactttagatagtttgacttagaataaaatagaaagagtaaaatgcatcaacggtcctcgaacttggcatactgtgtcaattgggtccccctgggtccccgtacactcttgaaactaggaaaacaggtgttataactttgccagcccattcaaaatcaggtttgctcaaaccgtttgccgacgtggagtgccacgttagagtcacttggatccccgaactttcattagtgcgctccaacgtggctcgctatgtcagcatccggtttgaacaaacccggttttgaatggtgcagacaagttatagcacctgtttttctggttctgagagttcggagacccaattgacacaatatatcaagttcgaggactgctgatgcattttaatcaaacggaaacatcaagcttttggggatagaagtagtaccgaagattgattgtggtgttatgcatgatcatggacatggagcatgtaaagtgaacctgttgtctggaactggattcagtttctctgtaaagtgataggagctgggactcagtatgtaggtggacagttacttgtatagtttccctcttttaaactgactatatatatttttggctgtaaacatgaattcctgtctgtttgtgataacatgcagctttttaaagacttggtttttttttgctctgcacaaaatagacttgtgttttcccctagttcttcccatgggcaaatgaaacctgtaagttcagttttattgatccataaaagtgaaatacctagctgtacttgaacaatcagtttatattggaagagaccatacttgtaagcaaatgaacctatgaacaacatagaaaggtgacacaaatgccggatcatctgctagcagcccatgcggggcttatttgcatagttattgaagctggatgggcaattgacctgctcaggcaggttcaacagttttcctctccaacaactagtcctcttagtagcaactaccgagtatatttgccttggtgatgtgatcagcgtggttgtatctaagtacctaaaccccaattgtatgctgatcgtttcagttggttcgtgcaaagtcagatggctcagtgataatttgcatctatctgatgacttgaatcatgctgaaccaggctttagttctgctagcagtctgtccagtttcaataactacgtttatttgttgatagcatttccattcatttttcggtatcatgccttggtttcttgttcaaaataatatggtttgcttgcatgaagtacatgtagtgacagtaactagtaagagttaaaccatgtgagtatttttttattgtagttctaattgccagattagcaaaagttgattgccctctttggttcccctgcattcattgtctttatgtagtgtggccataatttgagttttaaggctgtccgcagcagatcgtgtaaaataggggatttacactgtagattacattgtttacagagtgaagtttgaaataggggatgcaatagaatagttgctggagacagcctaagtaatacagtatatgcattttcttagtgatggcttattttttaataatttcttccattacagttaacgatgtgtactggtctcttgtagattctgatgtacttgagggaccatcaagagtttccctaaattgtcctataagttttaggcgcataaaaactcctatcaaaggccgtctttgcaaacactatcagtgttttgattatgataattacatggagatgaactcaagaaaaccaaactggcgctgtccatattgtaacacctcctcaagcttcactgacctacgtattgaccaaaagatgatgaagatactagaagagactggagatgatgtcactgatgtccttgtatttgctgatggatcttggaaagttgttccagctcaggatgaaaaatctgatagacatagaggtgacacaattcagcaggctggagatgctgtagaaactggttcaccttctcgagatgtcatagatctgataaatggcaatgatgatggtgatatgcaaatggattgggcatcggctccagaagattcaaagcctgtgttgaatagtcaagatttgtctgtatcagactatcttacagatttccctatgacagctcagacagaagatctgaatcgaggggatggaaataatgggggaagcaacatggcttccacttcacgtcaaaatttgttactacctcctactagtgggctgggctcaagttcattagggaccttggaatctattctacctcaaaatgttctgcaccctgttatcacagatgcagtctctccttctcttgaaacctcttcagcatctggcatgcaacatgtttcacaggaaacacattgtggaactgtacagctgcagccacaaataggtccagtacatgggtccgaagtgagaaggcttcctatacctagaaatcccaggagagagccaataggagtacaggggttgacggttccaccacagaatcctgggtcatcaacaaggttgcagccaaatattctcaattgtccacctcctatcccgctatctagtccatcctcttcaacttaccaagcacatcaagtgaagaatccagacagtgtcattgcttcaaggaacagtggtagtgggccattaccaaggactcctagcgtcgctgctgcatcattgcacctacagtcgacagcacgggatattcgcaacacatcgagccatctacccagtcgagttgttggtctgcctgcgccacacctcatgggtgcacgaccaccaccaggaatttcagtgcaggctggaggagcgaacgcctacagaactatgcaacagactccaactatggatccactgaggcacacacggatgagcatgaaccaaacagcactggctgctgccggccaaaccaccgctgccgcgtatgtccgaccaacccaagcagacatccaaaaccatctctttcctgtgcagcaaagccaggcaccacgatcgcaacaagtgccacgaacaacaaccccgcctctacagcgggcgccaccgcacctgcaacctcccagtgtaccaccgactgttccaagcacacctcaggctggaccttcgcatggtcttccaccggagctccctgtggatgatagctggcgccccacgggacagatgagagggagtctgacaggcaatgcttacagttctgcaattaggcactatcggggccattctgagcagcagcagggcgagcctcggcctcccaacacttcaggtgcgcgaaggcctcagtaactgccagacattgcggcgttgccctgattatcaagcagggcttgggcagctaatttaccaagagattttaatttattatcatagctaatttggcgctatgatgatctatgttagtgtaggtaggggagcctagtgagtagtgatagtgctctgcttgtctacaacgcactctgatgttaaattagtagtatcaggtgaaccatttgtgtacccaatatggaacgtggattttttatgctaatgttttgcctgtgtaattggaccgattttcatgtgaaattcctgaacgattcccatgaaaatgaacaggta

SEQ ID NO: 19954 - DNA, 2117 bp, Zea Mays
cagtgactcacgaactcacgactccagatctcccaccgctcgccatggacctcctcgacgcgaggcaccgccacacgccggattcgagctcctccccacatgccgcctccgacatgggtctcccgctcgccggggctgcctaccagccctacgtctctgagctcctctccttctccatcgagcgcctccacaaggagccggagcttctgagggtcgacgcggagcgagtgcgacggcagatgcaggaggtggcggtggagaactacggcgccttcatcgccgcctccgaggcgctctccttcgtccgcgcgcagctcgagagcttcgatggccacctcgaggccatgatagaggagataccaaacttaacatctggctgcactgagtttgttgagtctgcacaacaaattctggaggagaggaagcttaaccaaacattactagccaaccacactacattgcttgacttgcttgaaatcccaccattgatggacacgtgtatacggaatgggaactatgatgaagcacttgatctagaagcttttgtgagcaaaatatcgaagttgcacccagatttacctgttgtccaaggattagctgctgaagtaaagaagacagtacaatcattaatttcccagcttctccagaaactccgatcaaatattcagttacctgagtgcctccgtattgtagcacatctgcgtcgaattggagttttcagtgagtcagaattgcgcttacagttcctgaggtgcagggaagcttggctttctggaattcttgaagatctggaccaaaggaatgtttatgattacctcaaaggcatggtgacttgccacagggtacatctattcgatgttgttaatcaatatcgagcaatattcaacaatgataaatctggaaatgatgagaactccgaaggtgggctgcttttcagctgggcaatgcaacaagttagtaatcacctcgctactcttcaagttatgttaccaagcataacagaaggtgggtctctgtccaacattcttgaacaatgcatgtattgtgcaatgggccttggcttagttggattggatttccgtggcctccttccgccaatctttgaggacgcggttctaaatttattctcaaagaatatgagtatggcggttgaaaattttcaggttgttttggattcgcaccgctgggttccgatgccatctgttggctttgtagcaaatggtgttgtcgatgacacttctgatgatgtgactccaccttctgttttaatggagcatccacctcttgcagtgtttgttaacggtgtttcagcagcaatgaatgagctaagaccgtgcacaccattgagcttgaaagtcatccttgctcaggaggtggtcaagggactacatgcagtctctgactccctagtaagatacaaagctatgcggatgcttcgtggaaatgagtccgctcttttcctgtcactctgccaggcatttatcgaggttgtacatccttattgtgccgcatgttttggtcgatgctacccgaatggggcaacattgatctcagagtgtcaaggcacactggacgctgtccgtcagctattgaccatacctgcaagatctaacagttccagtatcgaaagaaagcagtcaggagccattgaaagaaagcaatctgttgagagccctgggacagcagtcacgaataacgagctgtcagccgatggacctgggctagagatcaacgatgctgctacaaccaccaccccaccggtagaggacgacgtgagtacccatccaccagcaagtaagtagcttggacctccgtttgaatttgttaaagctctttatcaaggcctggtttagtcaaccagagaagaaattgctgcaaacattatattcatcgataataattcatagttttgctccagttctacagtgtacacaatacctcactggatatttgtatcttattttttttatcactcattaaatttttagctgttcattgttatagtcaatacctagatgttgtagagtgtgtccaacctgaacattcagtaatatgatgagtacaaacggtgttcatcgtgttgactgcacacttctgaaataaaagatctgattcat

SEQ ID NO: 19955 - DNA, 3331 bp, Zea Mays
atggcgggtgccggtgcgatgggcttcccacgggagctgatggttcagcgtatacagagcttagtggaggaggggttctgggacgcgctccgccgccacaagctcgacgtcctcggcaccgacgactcccccatcccaatcaccggaacaattgcccagttccagggaccctcataaacactaataacatgaggggatttgaaaacctagatagagaacaacttctgaaagcagaagcaaagaagatcttgcatgacattgtgtctggtaaagtagaagaggatccttctgttctacttagattccttgtgacatcatttgctgatttgaagaattggaaggtctattacaatgttgcattcccctcattggttttcaactcaagaatcaccttgctcagcctgcaacctgcctcaaaagtgctcaccaaagaagaggcagcatccatgtatacatcattgcaaaagtggcgtacttctagtgaaacaacagttattccattctttctggttagtatatcctcagattcctctgcctctataagacaacttaaggaatggaaagcttgccaggggaactatcaaaagctgctatttggattttatgaccatggatgccgctcagattgccctggctgggttcttagaaactatgttgcctttctgagcatccgatggaagattgagaaagcccagattttctgctaccgtgaatataaagggaaccctgatctagaacagtccctcattggtgaagcatcatttccatcaccttatggttgggataaccctgaatttctacctgatgctattggatgggaaggagtaaagccagggaagggaacaaaagaaatgaaaccaaaagaaatagatcttcaatcaatgaatccagcaagtcaggatgaagaaaaacaattgatgcacttaaagcttatggggtggcgccactttcctgtgaatatagacaggttatcacatgttcgagttcttctcttgggtgctggaactcttggatgcgaagttgctcgccttcttatgacctggggtgtacggaaactaacggttgttgatagtggtagtgttgttatgtctgaccttgccaagcaatcactctacatagataaggattgtggagttccaagagtatctgcaatagctccacatctgaaagaaagatgtcctgcagtggaggttgaaagcatccaactggaaataccgatgcctgggcatcctgtttcttccagcaaaatggcaagtgtgcttgatgactgcaagcatctgcaaaccttagtggctgccaatgatgcaatcttcttgttaactgacacatgggagagcaggtggcttccaactcttctctgttcaagtgaaaacaagattgctattagtgcattattaggacatgacagttaccttgtcatgcgacatggtgctggaccaggaacaagtgggggtacagatgaagtgactactcagaaattgtccacagaaaatgctcttggtcatcaaagattgggctgttgtttctgcaatgataccgcttcccttattaatccaatttcttatgaaacactacctggacttacctcagttgcatctggcaaagcagtggagctctttgctaggatgttacatcatcctgacgagatacgggccccaggcgatactgctggtacagaaacagaacatcaacttggtctattgccacatcagctacgaggatcactccccaagtgtgatttatttgtggagctcaacaattcctcagtcaactgtactgcatgttctgttgctgtattgtcggagtatagaagaagaggattggattttgtcatgcaggctatcaactatccagcatatctgaaagattttacaggcatttctgattcgaaaagaccagatacttgtcctaaaataccgcccaacatctctgtaaattcagacaagatttctgatgtccgatgtctactattgggtgctggaactcttggatgtgatgtcgctcgcattcttatggactgtggtgtacggaagataacagtagttgatagtggtcatgtagttgtgtcaaatttagcgagacaatcactctatacttctgatgaccgtggtgctccaaaagcaactgcaatacttaggcatctagtggagagatgtccttcagtggatgcacaaggcattaaaatggaaatacctatgcctgggcatcctgtgtctcctggtgaagcagcgggtgtgctccaagattgcgagcgccttaaggaattggtgttgtcccacgatgctatcttcttgttgaccgacacaagagaaagcaggtggcttccaactctcctatgcactaacgaaaacaagattgctatcactgcagcattagggtatgatagttaccttgtcatgcgacatggggctggccctggcataagctgtgaagcttccagtgtggtcactgccatagacaagatgtccacggaggatgcccttgggcgtcaaaggctggggtgttatttctgcaatgacgtcattgctcctgtcgactcagtttccaatcggacactggatcaacaatgtacagtgacacgaccggggttggcctctattgcatcaggacgcgctgcagacctcttcagaagaatgttacaccatcctgatgggatacatgctccaggagagattgctggtacaggcagtggtcatgagcacggccttttacctcaccagatgcgtggatcactatcgcagtacaacatattaaccctgttgggctattcctcgagtaattgcacggcatgctcccatgcggtattgtatcaatatcggaggagagggatggatttcgtgatgcaagtaatcaatgaaccaacctatttggaagacctgaccggcctcacggagttgatgaaatccgcgtcttgctcacaggtcgagtgggtagatgaaattgatgaagacgatttcgtcgaggtctgatatgttacatggttttgacgactggtagatagtatcattctttacaacatggtaaagagatgacgaagcaatcaaagcaaccaccctatatatttgtaactcgctgctagctttttactctgtccgtcttaaaatgtaattcgttttaggctaaacctacattcattaatctgctccgtctcaaaatgtaattcattttaggctaaacctacattcattaatcaggtactcgtgaatgtagcttgaatgtatgtctacatttataatcattcaaataatttgaatgtggacttaaaaaaaagagggatatatattttgatacggggtgattatatatttgtaacgtacaaaaacaagtctag

SEQ ID NO: 19956 - DNA, 2979 bp, Zea Mays
taaccatcgtgtgcttatattctcacagatggttaagatgttggacatccttgcagaatatctctcccttcggggatttcagtttcagaggcttgatggtagtacaagagcagatcttcgtcatcaagccatggaacattttaatgctcctggaagtgatgacttctgttttcttttatccacacgtgccggaggacttggtattaatcttgcaactgcagatacagtgataatttttgattcagattggaatccacaaaatgatctgcaggttcttcctctcattctcttcctcctgcaagttcttgatcacttggttattcagaagctaaatgctgagggcaggcttgagaagaaagaatccaaaaagggtggctccatatttgacaagaatgaactttcggctatcttgaggtttggagcagaggaattgttcaaagaagacaagactgatgaagaggccaagagaaaccttgaaagtttggacattgatgaaattcttgagagagcagagaaagtcgagacaaagggtggtgaaggggaggaaggaaatgagcttcttagtgctttcaaggtcgcaaacttttccagtggcgaggatgatgcaacattctggagtaggctaatacagccagatcctgcagatattattcaggaaactttggcgcctcgtgctgcacgtaataaaaagagttatgttgaagatccccagtttgacaaaaataataacaggaaaagacgtgcagttgaagcacaagaaaagccaaggaggcgttctggcagaacagtggaaacagttaattcagtaccattggttgatggagcagtagctcaagtacgagagtggtcttttggtaatattccaaagaaggatgcttctcgttttgtacgagcgggcacagttttggattttttcggtgtagctgtgaaggcctatgaattgctagctcgtgttgaagagcttcagttgttgtcaaagcgcattgcacgatacaaagatccaatcaagcaataccgcatccaactaccttataaaaagcctcagtggtcagcaagctgtggatggactgaaactgatgatgctagattgatggttggaattcattggtatggctacgggaattgggagaaaatacgtttggatccaaagcttggcctgacaacaaaaattgcaccagcaacacttggtgagagagagacatttttaccacgtgctccaaacttggataaccgtgctagcgctctcctgcaaaaggaatatgctaagtttagcggtaatagctcaaaagtcaaaggaaatgcccgccagacagtcaataacgacagtaatagtggagctcgatcaatgagaggccgacaaaaggatgcaccagataaagaggataataagccgaacaaagatgacattcagaagcgcaaggtaatgatggaagctgaagcaagagaagaaggtgaaatttctgaatcagaggcagagacaaagtatcgtctggacaaagaggagaagtggctcgaatggtgctctgaagttttaaatgaggaacaggaaactttgaagcgcctggacaggctgcagaatacaagtgtaaacctcccaaaggaaaaggttctttcaagaatccgcaagtatctcctgataattggggacaaaattggtgaagttgtccggcaacacagtgaatcttataggcaatcccgcatgaccatgaggttatggaattatgttgccaccttttcaaacatgtctggggagcaattgcatgatctctatttgaaacttagtcaagaccaactggaaggtggagttggcccatctcatggtgccaatttcacatccattccttccagcaagggaggtaactcaaatcaacttcatcctacaagaaaccataggccaaccaggtctctccagtacaattctgagtctttgcacaataatgagagctctggaagttctgaagcctggaagcgtcgacggagagcagaccctgataatcagtttgacacccagcctttgtatcaacctccaattatgacaaatggaaataggttgcaggaatctagtagttctgcaggaattcttggttggggtccagttgaaatgagacggtatggtaatgaaaggccaaagcgtggtgttcatcctagtcattttcctactgggcatggacctttgttgtagctgaaggaattagatgactcgaacaaccttgtccactttggcataactgttcccagtgaatttcagcttccatatagttacaaatggtggaactctgtcggaattgaaattcttttttccataacaagaaggaataaaaagcaagacctgacctggagcgcagtttgaatactgtccctcaaaggtaatgccaggactccagaggcgacgcagggatttgttaacagctacactgaatatccttctgacaacatcacagtaaaacgaatacatggtggcttgtcaactgccaagaggattaatcgaggaaattttgtcgattcagttttgtgatccaatagaaaagttgggggtcattaggaaaaagttcatctcaacaatgatctatagttcactctatacatgtattatgttttacattgcaatataatgaaatatggttcagttattcccactcagtgtgttttgtgcccttctgtattgatgtaatagatcaaagaaatgcatgttctcgttttttttttttttttttagaaaaccgcaggagaactgcgcatcttatatattagagaggaaaaaagacattacaaaagaggagaagttgcagagcaactctcccacctaataaagaagttgcagctgggggggcatagtatgtgttagtttcaatttctctaaatagaggaaatatatattttgttcacgcgatggaatcggtagatacttgaattgattccatagtatttttttcctgaggtgatgtgagaatgaggtgtgtggttatatgtatttcaaat

SEQ ID NO: 19957 - DNA, 1153 bp, Zea Mays
tgagaccagaggagcacgagcgcaacctccgtcacccctaagatctcctcaccattgtggccatcctgcaagatcagtactcattatctattaagaaggttacggttagcttgaggataggcactggagagtttgacttgcgatatttgagtacatcccattgctggcgctccgagtatctggccatactattgattcacataccagctaaatttaggaccatcccgattgaaggctcttcccacttaaggcatctggcttggtgtttcttgtttggtgatacctgtacaagcaaatttggtgacctgctacttaaaaactgtttctgcaaagaggtcgtcttgactgatcgcaatgatgaagttctggaggcaagtgttgttgttatgatgaaggcagacccaagtattgaaagggatgatctgattttgctctaggagattgccatgtacatgcttcttgcatgtggagctgtctatgtgatcttgataagaaagatttgtggatgttgacccaacaggaaattgctactgaggtgcaaagtgaatccaagtgaaagtaattaggggagttagctatgtcaaatggaaagagagtggttgctaaaggataggaagctgaagctggatgaaggaagcaactacatgcaaccgatggcaataatgcattgcagggttgaggctcgttagaaatgtcaagttggtcccggacgtgggtatggtgcccgcaaggccgacagagctgagatcaagcactgagatcgtgccctcgtgcctacggctgcatgtcacacctggccagaggcataggctaccactactgttctaagaggacaacctgctcgatagctagcctaggatggccttcagttccagcaaggcttgtcggctcgtctcactgcagaacgctattgttggcgcctaattgaacgaagttgataccggtaggatcccatgaagcaacataagcagcagaagtctgacgaggaatgacatagatgcagtgctttcgtttgttgctactgaaaaaagatctgaaccaagtatttctgtaagtataccaacaagttagttgctactactttgtatattgatcttcgttggccgaatgtttgagtttttttcaaggcacaaacactttattttgagatcta

SEQ ID NO: 19958 - DNA, 812 bp, Zea Mays
cctgaatggtgtatgatcctatgagatgggttcattggttgactccttttgccatgggatgacttgatagcttttttttccgttgcggctgtaggcatgacctgtaaactactggagactcagaatttggtatggttagattttttcctatctatggcttcgttaacagccaatgcacagaatgttaatgtgacaatagtgcataactgtaaaatttttctgtaattcagtgattggaagttagtaatcggcacaacattcactattgtcatattgtgcttttgcccctgtcattttgtccttccatagttgcacagtgctgctttttcattacagccgtagtgtgatctatacttaagcttcatgtttagggtttctgcagcacagttgttgtcaggacagcggtttatggagccatggtctcactggacatgggaaacaatatatttcaatagtcctgctttcttcctcgttaatatcttgtgcaggatacataccagttctctatgttggttggtagctttggaagggaccgtgcaagatgaccaagagtgctggccactatttatgcctaagtattgaaagggactagatactgtcattaccttattgccaatttttttagtattttcctttgtaagttgagagcattgtttgtgactattattcttggttgcttgtatagttccatcttgctgatatgtttatactccaaaatgtgggtcagaatgtcttatcagactttattctttattctggttggtatatgctccggcaaactattcaatggaacaatttgggaatattttttc

SEQ ID NO: 19959 - DNA, 835 bp, Zea Mays
taaaccatgaaatgtgggatctgatttattgcctctacaggcgggatcctctttaaggtgtatatcattggtgaaacaatacaggttgtccgcaggttctctcttcctgatgttaacacatatgacttactaaacaacgttggcatctatcgattgccaagagtttcatgtgctgcagctagtgcggatgatgcagatcttgaccctcttattgcagagcttcctccaaggccacttctagagaaactgggcagggagcttcgtggccggcttggtttgagattgttcaatatagatatgattagagaacttggaaccaaagatcggtactacataattgatatcaactacttcccaggttacggcaaaatgccaggatatgagcgcatgttcacagacttcttactaagtctcgcacaaagcaagtacaaaaggtatgcttccccaccgcgccaatgtacatttgctggagacataagcataagcgggaggcttgaggaagttggcaagtctcagtgtgtgtgttcaaaatcggtggcacatgctggactggagtaggaaataaccaaggaaacgcttggatgcgctgtactcatgttgtaaaatgtttaactgaatgaacaccttcctcgtgatggctccctccatcgtaatttggcaaccatgagaattaattctgcagcttggtagtgaacggtgttttgttgtgtgtatttggtaggtttgaggtctacgcaagtcaggagaccaccaaatagctgttgatgatcggatcatattaatctacatacaatctttctagcagtcatactaatacaaccatcatgggtttgtg

SEQ ID NO: 19960 - DNA, 1173 bp, Zea Mays
gaacagcctactccagcctccagcgcctgctacgccgtcgcccacctccctcctctcctccagcgtcgcccgctcccgatcgtccaccgccacgcacctccctcctctgtcctctcctccaccccctcctccatctctagggcccgcctccctcttccagcgcccgagcaccccctcccctctcccacgtccagagtcggtctgacgttggcccatcgcccgataggtcctctagcagccaacgttgcctgcagctgcattccagagttccagagtttcagctacaaccacgaagttccaacgtctcctgcagctgctctatttgatcctgggcgtgcctgccaatgagcaagaagaggaagcatctggatccagcgaactcgttgaaagacagcgaacaagtagtcgcctcagatttcataagaggagacgatcttgatgacctattatcgaagcttatcaggagtgtggagattgccaaggcttcaaggggacgcttaccagaaaagatatggatgaagcaacaatttgctatcggcgtcaatgatgtcacaagggttcttgagcgaatgccgcattctgtcactgctcatcctgctcaaatgtctagtgaagcaccaactgtctcaggccaacgtcaagctcctttggtaccattgcaggctgtccttgtagctgccgactgcaatcccaaatggttaacaaaacacataccaacactagcgtttacaaggcaggtaccggtattgtgcatgaaggacaacaagggaggctcagtaaggttaggccatgtggtgaatgtcagaacagcgcttgccattggtgtaaaggccaaagatagcgttgtcaacaagactattgatgagttcctgaaagacagtaaactggttgccaatgaaccataaagtaacccaagtctagtgacacgtttgtactaaaaagcctgtacttctgggcatgcaacatcccaggatcatctcataaatgggtttaagtttgagaaggggatcaagtatcttgagcagattgtggcaatatcaatttggtgggacttcttcagagaacggtcatgggaaataggacagactatttgtttgggggtattgccacatactggaggatcacataaagcaggattcagagtggcttactcaaactcgaaaggagattttc

SEQ ID NO: 19961 - DNA, 1236 bp, Zea Mays
ctagctatcaggacgttttgcattgcgttggtaacatgaccctaaacagggggcacataatcacttagatctggcatgacaacatgccttatggtaagattgctgaaagaaaaggtcatcaagggtggatgaagcatgaaggttcgtacttcatttttcctggcggtgggactatgttccctgatggagctgaacaatatattgaaaagcttagccagtatgttccaatgaaaactggtgtcatcaggactggtcttgatatgggatgcggggttgctagctttggtggatttttgcttaaggagaatatcatgacactttcatttgcaccaagagattcacataagtctcaaatacaatttgctttggagagaggagttccagcatttcttttgatgttgggcactcgccgtcttccttttccagcacagtcctttgattttgtccattgttcccggtgtttgataccttttactgcctataatggatcttactttattgaagctgaccgtctgctaaggcatgggggctatctaatcatatcaggcccccctgtgagatggaagaatcaggagaaggaatgggatgaacttcaagcaatggcaggagctttgtgttacaaattgatcactgtagatggtaatactgccatttggaagaaacctgctgaggcttcatgtcttcctaaccaaaatggatttggccttgatctttgtagcaccgactatgatccagatgaagcatgtggcggaagagacagctataggttccattctcaagtggccagataggctgtctaaaccttctgctagggcatcagttatcaacaatggagcaaacttgtttgaagtagatagtcagaagtgggttaggagagtgtcatattataagaaatcgcttggtgtgaagcttgggagcacaaacatacgcaatgtcatggacatgaatgcattctttggaggattcgcagccgctataatatctgatcctgtatgggttatgaatgttgttcctggtcagaagccattgacacttggagttatttatgataggggccttataggggtttatcatgactggtgtgaaccattctcaacgtatcctcgtacctatgatcttattcatgctgatgcaattgactccttgataagtggcccgatttcaggcactagcagaagcttgagtttgggttgcagcctaaacgtgatttaacttgaattgcttcctttgatcgga

SEQ ID NO: 19962 - DNA, 2315 bp, Zea Mays
gaaccgaacaaacctttccccaaaatttcccctcccccgcaccgaacgaactctcgatccgatcccgatccctgcagggagccgcctcggctcaccgatccggccccggatccgctcgttgctcgacgggatctctcgatcgcagtctggacaagcatgctgcatcaggagaacagtgaggctttcgggaggcaccactctgagcagcttgcatgtgtcaacatgaggggagcagataatggtcatccgaatttccttcctgagaaatgccagattgcagttcaccaaaggggtgaaaaagttggactatttgatgaagagctggtacatggtattcatctaaccagtccttgtgttcagtcaccatttttgccaagtggtgtcaaagaaacacctatagtggatcataacaagagacctgcatccagtgacatactggacatagttgaatgcaaacggctgaagcaggaagatcaaatcgttactaaggaagacaaccatacatctgctgaggaggaatttcatgactaccccacatacacgacttgcgaaagaagctttgactcaccactatatgagagtgaggaaagtgaagatgagggcgtagattcacctctccattgttcacatgctcgcacctatgttgaagatggtctatggcctgccagctttcatcaatctgttggccctttttccttgaggaaacctgttcctatcgggtcaaatcatcaggctgaattacctgagtgcaggccatttggtggaagaactgaagaagacgaaagtgtcaagtggatcagaaacagtgttgtgccaatgcctggtactgatgcatcgtctttggtgttggagcctgttcactgcaaagcaggttgtgattgtcttgacgaaggttcaatcaattgtgtgaaaaagcatgtgatggaagcaagagaaaatttgaaggattctgttggtgcagacgccttcagggagttgggtttctatgacatgggggaagaggttgcctcaaggtggtcagaagaggaggaacgtttgttccagcaagtggtctcgtcaaaccgtgcttctctgcgcaggaacttttgggatgaacttcctcttgccttcccttccaagtccagcaaagagctagtgagctactacttcaatgtcttcatgttgaggaagagggctgagcagaacaggttcgacccagcgaacattgacagtgacgacgatgagtggcaggcaggtggtgattttgagtttccaataacaggaagaactgatgaatacatgccaatcgagtcccttactgatcaagatgatgttgcttgcaatccatttcccttggagggggatttatatggagattctgatgatgaggacgagcttgacaattccagtggagacaggcataatggtgtgcagagggctggtatgttgtcagagggtcatcccgaaatgtcatttatagatcatgatcaacagacgttgaagctagatgcagatgcacaagatgactcttgcacatcatttgaggctcatcaggttggttgcgatggtggggcacatactgatattggcaatcactacaggagtgacgacggcctttgtggtggtgcagaacatgggttctttggtgaccattgtgacacaaaagagtggggcttcggtttcagtactggttgggagaggcatgattttttgtcaacgaacaatgtcatagaagaggtgttcgggaagggctccagtgaagatggaagtgacactgctactggccaggaccttatctgagccagaggcggaggcttcttttcagctgcgaaacctttagcagcccccccttgttctctgaatctgtacagcagtagtagttggctattttgatttgatgcctcacttgttcgtataggaatctctcatccctgtccttgaacatcatctgcttgcgatattggtcgcatggctaatgtaaatccgacgatgatatcatctgtcgatgatctgttgttaggctgtagcatgtacgtatcatctttgtagtgacggtgtgttttgacctgagcatttttcccatgtgccaacgagggtcatgtaataaaaggctgctgttgttccttgcccaatatatctcaccagctcgtcatgtactcccaaacgtcatttttatatgaaatttgttgtcgttctcgcggctcgttttaaacccgccttgaatcgtaatgattgcaacggaaattccagcctagcagtgatgttgggttcgcgttctatttttcttgcatcgtagtcacgttacacacgccgaggccgaggcttgtttttttttt

SEQ ID NO: 19963 - DNA, 1039 bp, Zea Mays
aaaccgaaccgaagtgcaaccatccgtcacatcacaaaccgaaaaaggccgcgacgagccgaccagctctactgcccccttccggccttcggcgaccgtgacgagcaacgacgaccacggcgacgatggccgcttcctccctctgccacgggcacttgctcctgtttctcctcgtgtccgtcacatcggcctgcctcggtaccgcggcagcgcatcaagccgggtctggagagggttacacgatcgccggccgcgtcaagatcgatggcatgagtgagaagggctatggtcttccagccaagacatcaaacacaaaagtgatacttaatggcggccaaagggttacatttgccaggccagacggctactttgcattccacaacgtgccagctggaactcatctgattgaggtctcctcaattggttacttcttttcccctgtccgagttgatataagtgcaaggaatcctggatatattcaagcagcattgactgaaaccagaagggttctgaatgagcttgttctggaacctctgaaagaagagcagtactatgaggttagggagccgttctccatcatgtcacttttgaagagccccatggggttaatggttggttttatggtcttaatggtctttgtgatgcccaagatgatggagaacatagatcccgaggagatgaagcaagctcaagaacaaatgaggaacaaccctgtatcattctctggcttgctcgccagagcgcagggctagagaagtagactgtagacatgaggatactgcaaaggtcaaacattctagaatgtgaatctttgacaccttgcttagtcatcatcagaccacggcggactgtggacatttttagacttgtgtagtgatgcgtcagagacctcgccaggatggacagagggatacccatgcaaatttgtgcacttatgcatccagctaggggtgtaatcggatcgaatacagagtatccagccatccgattcgtatccaacacatgtcagcgaatatgagtaatttttttaaaaaataaa

SEQ ID NO: 19964 - DNA, 4528 bp, Zea Mays
  misc_feature (4527)..(4528): n is a, c, g, or t
cgcggggccacacgagacggagcaatcgaatcacgggcgagctcgacggtcggtgcaggcagctgcacccagtccggctccggcccgtgcccgtcacgactcacgcgagacagcgaaacttttcccagcggcgaagcggagatcggagaaggaaccccaccctgcccagtgagatcttctcctagcagccgcaatctctcctccctcggcgcggaggacgagcagcgctgtagattcgatcgtgtgtgctcccgagatggcgatcgggtcggactaagccgaagcgaaagcgagagccgctgcccccgtcgtcactcgatgaccaggcggacgggtgggtgcgccggcggcttcctgctgccgttgctgctcctggcagcttctttacttgattggagcttggtttctcttattaatatggtcatcttctttgctattcgatttgctgttccaagaagaggtctttacacctggaggctgcacattgtattgtggtgtacaattatttactcagtccttgctattttagcacaagttgcgtttcatataatctggtacattgagggcaagggatggtctgtggctcattcttggtgggcgaagctggtgggtttagcaagggaccagccatgggaatcaccatcagttatctattttcttgcattacagctatctgctgcaggccttgctttggtcgaagtccttggaggaaggcttcaagattcttgctggttgaacttctcttttgaggttgagcaaataggttaccatttgcgggtagcatgctgcttattactgcctgctgctcagttagttgtcggtattagccatccttcatggatttcattaccgttctttgtatttagctgcattggccttgtggattggtccttaacaagtaactttcttggccttttccgatggtggaggttacttgagatatactcggtgttcagtattcttctgctttatctctaccagttacctatgaaatttccctatattgcgttagcatttgctgacttcattggtcttttcaaaatttcctcgaaatcagaatggcctgagctgtcttctggaatttctcttctggtatattatttcatgttgtcatcagcgaaacgagacatacaggaaatgggttcacttatatctctagaaaatgatagcttaacagaggaccttctgccttctagaaatgcgtttttggtccgccaatctcgatctggcagaaggcatggaaacatattactgagaggatcagttttccgaactttcagcattaatttcttcacttatggattcccggtcttgctgcttgccctttccttctggagtttcaacttcactagtatttgtgcttttggtctcctagcatacgttgggtacattttatatgcttttccttctttgttccaaatgcatcggctgaattggtcacttctagtgttcattctgctttgggcagccagcacatatgtcttcaatgtggcattcacattcttcaacaaaagatttcaaaaggatatgatgatttgggagactgttgggctttggcactattctattcctggattatttttacttgcccaattctgccttggagtttttgtggcactgtgtaatcttgttaacaattctgtttttctttacttgacttctgaagggggtccttcaacaagtgatgatcacctcattgatgagaaggaagatacaatggttctgattgtagcaacaatagcatggggtctacgcaaactttcacgtgcaattactttaacattactctttctacttgtgatgaaacgaggatttattcatgctgtttacatgtgctttttcttggtgtttctggtgaatcattcaatcgacaagagactgcgccagatcttagtattgttttgtgaggttcatttttcgatactgtacattctccagcttgatctagtgtccagtgctctggagcgcagtggttcattaacaatggaggtactctcacagttaggtctctcaaataatgctacagcaaaggatttcatggagataggctcaatagtttgcttctgtgctgtgcatagccatggttttaagatgcttttttcattatcggcggttcttcggcatacaccttgtccacctgttggattcactattctaaaggctggtttgaacaagtcagttctactgtcagtttatagctcgcaaaattcacgagacggtgaagaccaccgtaatttacatgagaaaaaaatcgcatcatatctgagtaaaattggtcagaaatttctcttagtgtaccgctcatatggaacttatgtggcttttctcacaatacttttgactctatacttggtgacccctaattatatatcatttggttacctatttttccttctattttggattattggaaggcagcttgtggagaaaacaaaaaggcgactgtggtttcctctaaaagtatatgctacggttgtttttatttttacctacagcctgagtgtttcaccgatctttgcagaatcagtctcaaagttccttaaactataccctgatctgggatttgaccctgaagcttctttgctggaaaatgtttggcaatcattggccattctagtcgtaatgcaactttacagttatgaacgaagacaaaacagtgacaagaactttggtgtatctgatgcttcagaatctggacttctggggttcctaagaaggtttctaatttggcacagcgacaagatattatcagtttgtgtgttttatgcttgcttatcatcaatcagtttatctggcctaatttacctgttagggcttattgtgttttctacgttaccaaaagtttctcgaattccttccaaggtttaccttgtctacactggtttgcttgctgcatctgaatatctatttcaaatggtgtgcaaacctgcacagatgtgtcctcatcagcacttctatggtttgtctgtgtttcttggtctgaaatactatgattctgggttttggggtatcgaatacaggcttaggggaaaagttttagtgattgtggcctgtaccattcagtataatgttttccattggctagatttgatgccaacatctctagtacataagggtaaatgggaagagccctgtcaactttttatctcttccaacccaccttatagtcctgtcagaagcaacgaagaaagtcattcatctaataggtttacttcattgttttctaaagttcaaggtcttataggtagtagttcaagttcaagctcatcagtgggtccaggcagcattcaccagaaattagagtatgttgataatgccatcgaaggctcagatgaggacaaaagacactcatttgcaaagatttggggattgtcaaaagaaagccacaagtgggacaagaaaagggttatttttctgagaagagaaagattcgaaacccagaagacaacattcaaatgttacatgaaattctggatagaaaatcttttcaaactgcgaggtctggaaattaacatgattgtgttactattagcaagctttacactgttgaatgttgtatcgatcttctatatcatgtgccttgtcctttgcattcttatgaacagagatctaatccagaaattgtggcccctttttgtgtttctgtttgcttctgtcttaatacttgaatatgttgctctttggaatgatgagataacctggtatcatggtaccaatgacattgaagtccattgccgtgagtgctggaagaattcaaggattttttttgactactgctcaaaatgctggcttgggataattgctgatgatcctcgaatgctgattagctactatgttgtgtttatattttcctcttttaagcttcggtctgatcacttttcgagcttctcagactcggacacatatcggcagatgatgtcccaaaggaaaaatgcagtagtatggagggacctctcactggaaacaaaaagcttttggacattccttgactatgtgcggctttatgcctattgccatttattggacatagttttggcactaattgcaattaccggtactctagagtatgatgttctgcaccttggttatctcggatttgctctggttttctttagaatgagacttgaaatcttgaagaagaagaataggattttcaagtttctacggatgtataattttggtctcattgttttgtcacttgcttatcaatctccttatgttgggcaatttagctctggcaagtgcgatcaaattgactacctatatgagataattggattatacaaatatgactatgggtttaagataacatcacggtcagcttttgttgagatagtaatcttcctattggtatctgttcaatcatacatctttagctctagtgagttcgattatgtgtcaagatatcttgaagcagagcaaattggtgccatggtccgtgagcaggaaaaaaaagctttaaagaaaactgagcagctgcatcatcttcgcaggtctgaggagcataaacgtcagcggaatatgcann

SEQ ID NO: 19965 - DNA, 3472 bp, Zea Mays
ccaaaattgaacgaaacctttggagggaaagctcccgccaacataaataccattccacccaaacccacttctttcgtccttccagaatccagacccgaaatcagatcaccataattcttcgaagccgcaagcccgaaaggaaccccaagaatcgccgagagatccgaagcgaggtggagagatcgagatggcggacgtggggagcctcgagaggatgggccgggagctcaagtgccccatctgcttgagcctgctcacttcggcggtgtccatcacctgcaatcacatcttctgcaacgcctgcctgacggagtctaagaaatctgcctcctgctgccccgtgtgcaaggttccattccaccggagagaaatacggccagcgcctcacatggataatttggtggccgttttcaaaagtatggaagctgcagcaggtattagtgtcgtgtcaacacagctgactcctgcacccaaagctgcagagtgtagtgagtacactgctggaaagcctagaaggtcgaataaaaagaagctagcatccaagaaagaaaagaatacagtcaaagctactgcaaattctgcatcttgttctactgcaaagccttcaatctccaagaacaaaagaatacacgtgacaccattccctgaatctgagacgccgataaggcccaagaagattatgaagtctgacgagcaaaaacgtaaagaggataaagataacacactgaattctgatataccagataacccttcattgtcaccttttttctggctgaaggaacaagaagaaaacgtaggtggcactgctgaaactttgagtgaaccactatcattggacacagccttgtgtcacaatgtgcctaccttcagtgatatcaaagattctgatgatgaaatgcctaatgatatgactcctaatagcaaagttgaggtttcagaattattcgacagtgaaatctttgaatggagccaaagaccttgctcccccgagctgcgttctaccccactgaaaaaacagggtcaatcgaagaatactctagatcaaatcacagaggtggatgatggaggatatatgaatcttggtgatttatttgataagttagaccatgaaagtaatgtaactcaacctgccaatgctgaagaagctaagaagagaaagttggcaagagctaggaacagaaaaaactcaaaactgcccagtcgtgttaaactatgtacaaaaggatctgatgctgagcaccaagttaaaaatatccctgtaagtattgctgcaaagccaaaccagaaggacatcaataaaaaaaagagatgtactttgaatggaggaaacaaggtctctggcaacaacactaaagttgtcttctctagtgataaatatatgtatacattttcccctcaatcaggcgggttggacattgaagcacctgagaaccagccttcagaaaggatcctcaaaaagcctaaaaacagtcgaagcaaacttcacatagcaggggatagtgcagtgaagaccgcaaagaataaatctgaacaaagagtaaagcaaaccataagatgttctgggggtgttgtagatgaaaatctaagagttctttctgaggctgaaaatgaaatagaatcgtttcagcttcacagactcgcaaaaggttgcacccaacataaacccttcgatgatagaagtaaacaaaacatggaatcaaacattggtccaaatacaccaagcattttacctgggaggtgccaatttgatgaggccatacacacaattcctacagtgaagaatgtctctgttaagaacggtagggcaaaatcaattgaacaaccagattacccaggatctatcagattatgcactgcacacaatactgccctgaagaaatgtgagggtaaagcttctaagctttcctgtgctttctgccagtctgatgataccacacaggaatctggagagatggttcactaccataatggaaagcaagtgccagcagcatttgatgcaggggctggtgtagtacattgccacaaaaactgcctggagtgggctcctgatgtctactttgaagatgactctgtctttaatcttgcaaatgagttggctagaagtaaaagaatcaaatgtgcttgctgtggaattaaaggtgctgcacttggatgctttgagacgagttgccgaaaaagcttccatctcacctgtgctagattaatcccagagtgcagatgggataatgaaaactttgtgatgctatgccctttgcaccaatcttcaaagttgcccagagaaacttctgggtttaaaaataagtcgcacaggaaactagcacgaaaaagttcatctgaagtaaacactagtcaaagccatgataataagtggacatggccatctggatcaccaccgaaatgggttctatgctgttcagccctttctgccgcagaaaagggtatcgtatcagaactcgcaaaaatagctggtgtgccaatctcaacaagttggagtcctaatgttacccatgttattgcatcaaccaacatgtctggttcttgcaagcgcacactgaagtttctgatggcaatcttgaatggcaaatgggttatctccatggactgggttaaaacttgcatggaacttatggaacctgctgatgaaatgaaatttgaagtttccactgatgtacatgggactgctgacggtcccaggttaggtagacaacgagttatcaacaagcaacctaaattattcgatggcattcaattctatctccatggagactataccaagtcgtacagaggctacctgcaagaccttgtggttgcagccggtggaactgtcttgcagaggaagcccgtgtcaagaaaccatcagaagttgcttgacgagagctccctcatcctcatcgtatacagcatcgagaatcaggacaaggcaaaaccaggatcaagcgatggcatggatactggtcgtagccaagctgatgctcaggctctggcctgtgcctctggtggcaaagctgtgagcagcgcatggatcatcgactctatagcggcttgcaaccttcgaccttccatgctaccctagatgtgtacttgcattgcatgcacggtaggtttgactaatggacagaaaaatagtgtaaggccctgtttcaaatctctagagctagtttttagctaataagttatcaattgtgttaagacaactaacaactatctgagaggtatcccgttctaaaactctcaagtaactttagcgacttactatcagttttagagcttttgaacatagactaagtagtagaacgagacttaagtttcttgatgtataaacactatattttaccatgcaatagttaatgctatgtttttaattaaagcaccggcaccgctggaatgtcggagtttgtaacaggtttttatacataaagtggctgccgacgaattcaaccgcttatccgttggttcctgcagtaagtgtttg

SEQ ID NO: 19966 - DNA, 1788 bp, Zea Mays
cgatacaagcttgccatccaaaggttttccacagaccatttgtgtgtcttagattgtcataaatactttatcgaaatatgatatcatgaccagtcagttatgtacagagtattgagtgaagttattgtgacataaatggtcgacacaaatagcaaaagaagagttaaaccataaccaaactgaaataccaaaagagagaatgaaagcaatgaaaatttatggtgatttcaagtagccccttctatgtagaaagctcaaagactaaacccttaataatactctttttttgcaaagagcactaagatgctagctgcacaagccatagaaatttggcaaactaacttgaactgggacctgtagtcaagaattgtacagaaactggatggccacactgatattgtcactatagtttcatgccaccccaagcaaaacatgatcacattatgcgcttgacaacaataagacaatgaaagtttgggtgcaaatggaagaaaatggatgagttgtctggttacactcttaactaccaaaagaagatgcaagtacaaaatatgttgcaagcactccaacacaaagatgagagaataaatatgttacaaacacggttaatcgactatacaatgttgctctgcaattaagttaatgtcatccattttgagcacttacaaatcatttaataatcaactaaattccatcaaccttattctttgttcatatttatagaaagatacaacacatgaagcctgccaagaattaggatattaagttaagacttaagaacacacagaggtacgtatttactatttgcaggctacaattgtagaataggtttgatagattcatcaatccacagctccacattccaattcattttatcaattctagaaagaactcttctcaaggattcatatatttttgtaatactacaaagcaaacctaatttctctattcgttaccaatccatatttacagcaagaaacaactcatacattcagcctatccgagtcttttagataaactctaggtcagctaaaacaattagtatatttgtgtatgcacatttaaatatgacgtctgacatgtggcaacaaataaaaaggatggtttcatagaatgtaaaagaaccactccaaagatattcttttagataaaaccacctcttgtaaaggaaaacaagctttagcttaaaatagccatttaactcatcgatccatggaattaatatcatacctttgcatgatgtaaatgaatggtttgaatatattttaaggttcagcgtcattttttaaaattaatacctctgcatgatgttagtcatcaaacaataagaaatgtacatttgatacttggtaaaatctaaaatgggagctacacataccagagccaaaaaaagtatgcttcttccctttctccttaggtgcataagtaccatattcttttgcaatacagttacctggcatgtatgttgactttcagttcagtttgttgtctttcaattcagtttgatgaggctaataactgaaaaaatagatgtctttcagttcagtttgtatattatgatgtccactcaaaaccttcaaacatttccctatgtgacagtcaattaatttcacaagtcttgttccatctggactgaaagcaatagcaatagttgacttaggaggtggcaaaagagagaaaaacatggcaagccagcgatgcaaggactatgattctgccctgtacacagaatattggagatgtgccttcaacactctacactcgatcgtctccagatcaccaactcag

SEQ ID NO: 19967 - DNA, 1522 bp, Zea Mays
atcctcctccctcagattcgaatccggcccgtgtctctcctcctcttctcttcttctgcgacccgcacgaggcaggcctcttcctctctctttggctctttgctttgctttccccaaaccgtcctctgctctgctcctcccgctcccttcccgaagtcgccgggagccacaagcccacacgcattcccctccctcgcgctctctccccgctccgctgtcaccaaccccgcctgcctatttaccggccgcgtcgcccaccgccgcacgccttcccacccacccccgcgcctgcctgctccccgacaccgggggcgccccccacgacgccccggccccgccacggcggcgacagcaagccgggacatggcgcgcggcggcctcgcccgcctgctcgccacgctcatcctcttcctcctgctcgccacgcccctcgccgccggaccttcactcgccgagtcagaggcggacctcgcgcggggcacgtccgaggcagcgccggacgcgcagcagcacctcctggccgcgcccgctccgccggacgcgcagcagcacctcctgccgcgcccgctcgtcatcgagctcccgtcggcgcgggccggggccgagctcgacgccgacgccgacgccgacgccgtggtaacggtcgacgtgcgctgcgccagctggcggctcgcggccgaggccaacaacctcgcgccgtgggcggcggtgccgcccgaatgcgcgccgcacgtgcgggactacgtcaccggctccgcctaccgctccgacctcgacctcgtggcgcgggagtcggccgcctacgcgcgcgccgccgcgccggccggcgccgccgacggacgcgacgcctgggtgttcgacgtcgacgagacgctgctctccaatctcccatactacgccgagcacggctacggggccgagttgttcgaccaccacaagttcgacgagtgggtggaaaggggcgaggcggccgccatcccttccagcttgaagctctacaacgaggtccgcgggctgggattcaagaccttcctgctcacgggcagaagcgaggcgcaccgaggagtcacggtggagaacctcaacaagcaggggttccatgactgggagaagctcatactcagcaggtgaccgcgagaaaacagcgacagtctacaaatcagagaagagggacgaaatggaacaggagggttacaggatcctaggcaactccggcgaccaatggagcgacctgctgggatcttccatgagcgctcgctctttcaagctccctaacccaatgtactatatcccgtgacagaaagaaactggagaacagggcgggtgaaaggtgctctgcgtttactggatgcacattctaccaggccctcggctgatgatggaaaatgaaaaataattttgcaatggaattaaactgtacaaaatgcttttctccaacttcgtgtagtacacattgcctgtaatgttcgacggtaacgacaacatgcgaataattgaccaggccaccagggatatgccttga

SEQ ID NO: 19968 - DNA, 1755 bp, Zea Mays
gacatgagcatctgaagacacgcagtgtggcagtgtgctgtgcacaccacacgatgcacaagcgctgaagataaagcaagcaccagatcgtcccgacgacagtactagccactagctagctagcgtcgcgatggttgacctgcgcctccaggtcgtcgccaccgtcctgggcgtggccctggcggccgctgccgccggcagctccagcggcaagcagttcgagttccaggaggccaccgtggacgccatccaccagggattcaggaacggcagcctcacgtcgacggcgctcgcccggttctacctggagcagatcgcccgcctcaacccgctgctccgcgccgtcatcgaggtgaacccggacgcgctcgcgcaggcggcgcgcgccgacgcggagcgcgccgcctcgcgcgggcgctgcgccgtcgggctgcacggcatccccgtcctgctcaaggacaacatcgacacgcgcgaccggctcaacaccacggccggctcgctcgcgctgctcggctccgtcgtcaggcgcgacgccggcgtggtggcgcgcctccgccgcgccggcgccgtcatcctcggcaaggccaacccctccgagtggtctaacttccgccccgtcgcctccggctggagcgcccgcggcggccagacgctgaatccatatgttctctcggtaaccccatgcgggtcaagcgctgggcctggcgttgcggcggcagccaacatggcggcggtgacacttggatcggagaccgacggctccatcctctgcccgtcgtcgctcaactcggtggtcgggatcaaacccactgttgggttgacgagccgatccggtgtcatccccatcacgcctcttcaagacactattggaccaatgtgtcgcacagtttcggacgccgtccgtgtgttggacgtcattgtcggctacgacgagcttgacgctgaagccaccggagcagcgtccaagtacatcccacacgggggttacacgcagttcctgaggaccaacggactgaggggcaagaggatcggtgtccccgacgtattttttcaaggatacgacgatatgcaactggcggtctatgagaagcatctcgatacaatgaggcaacaaggcgccgtcgtgatcatggatcttgacatcgcaacaaatttcaccgatctgggtaaccaggagattctgctcatggctgcagagttcaagataagcatcaacgcttacttgtcgggcctactgtactctccagtccgctctctcgcacaagtcatagcgttcaacgaagcgcatcctgtagaggagaggctcaaagattttgggcagccggatctgatcgccgcggagaagaccaacggcatcggcacaagggagagagctgccatccggcggctgagggagatctccaccaatgggctggagaagctgatgaaggaacgccgcctggatgcgatcgtggcgcccaacagcgacgcctcctctgttctcgccgtcgggggctatccgggcatcgccgtgccggcggggtacgatgagcaaggagtccccttcgcgatctgcttcggtgggctccagggctacgagccgaggttgattgagatcgcttatgcgttcgagcaagctacaaaagtcagaagaccgcctactttcaagagataaagatagctaactagcatgatgacacgcagtagcacatgcaggatccaagcgaggcagcgcagtccgaaaacgccgtagacgagcggtatcatgattgc

SEQ ID NO: 19969 - DNA, 150 bp, Zea Mays
ctggcaggatcaaccaggtagcacgtcctcgcagacggggcagcgccggcctccgcgcggaggcgtcgtcccgggctggccgtcgttcattcgggcggaccgattcttgggcgcgtgacgccaacgcgtctccggccttcagcgtgagcc

SEQ ID NO: 19970 - DNA, 263 bp, Zea Mays
aatagtttaagaataagatggtaaaatcatgtgcaggactgtgatgtggggcccacttatttagcgtgattattgttcttatgttgccacttgtgtgcactctacagtacttatttagattgttatctgattcaatagttggcccgagccaaattagttttttgttttgccacatttgacagaggaaacacatacgttaatatggtacctgctgctaatgcaaccacagggataacttcccagtgtgtgttctattcttagtt

SEQ ID NO: 19971 - DNA, 317 bp, Zea Mays
taccgccaagatcgcaagattaagtaaacacaaatcacacaccaacatttgcagcggaaataaattctttattgcaaaatgattacatgttacaataagtttacattatacaattatcggagtgattacaaaagaaaatgattaaatagaattacaatttaaaatgtataaaatatttataagttttaaaatacatgttaacttaagtgacaatcctcaatagagaaactaaagacgggatatacttatagaagaaggccgagcccaccggcacttagcaccatccacaacagaacaaaattacaacctgaaaaaca

SEQ ID NO: 19972 - DNA, 4942 bp, Zea Mays
gaagctggccaatctcttgctcgttcacgtgcagcactgaagtatgttgtattggcaatttctgggcatatggatgatgtgctcacagaatataaagaagccatgcataagttacttttcgttctggagatgctagatccttttattgatccatctacaagtgccatggaagacacagtaatatttgatggtatctctgctatatatttggaaaagcaatcaagtgtatatgatattgccttaaatattatccatacagcagtaaagagagctgctgttctcccttctttagaacttgaatggcgacgaggagccattgccccaagtgtaattctctctatcttggatccgcacatgcctcttcctcctgacatagacctctgcaaaagttcagtgcatgagattgataaagtgcctttggctgttttggataatcatgcaccacagccatgcaacccagaaaatattgctgggcgagatgcatctgaaacaactattcgtcctgaaaattttgaacagtgcagctttctgtttgctcctgaagaattaaaccaatctgagttgactagtctttataccttgaaaggaaaaggccatgatgtaataactcaaacaagtctgaaccatgacattcctgaaggcagaagtaaagagaaactatcatctgaccctttcctgctagataatgttgttgcagctgattattttgattcacaggctgattatcaacagctggaaaactaccaggactgtgagttaagagctcaagaatttcatcgcatagcactcaacctatgcatgcaacaagaaccaacattagaagggcataatgctggaattgatgctttgctattagccgcagaatgttatgttaatccattttttctattgggattccagtctaatttagagcctctggacaagattgaacgtattcattcagagttgatgcaagggaatgcttcctctgtatcaaaaaatttgcacttgaaagatttcaacaaaaaaacaatctacaatttggagaacaagcgtgatagatctgttatagatttactcctacaagccgccagatttgactttgaatatcatggaaagatacctgaaggggaactatatccaaatattgctgaagatggcaagcgatctgtagaaatctcacctgaagctcttcagtttgctgatgctgtaactttggtccgaaagaaccaggctatgctgtgccactttattatgaagcaattccaaaggaaaggacacttgggtagtgaaattcttctccagagcttgttgttcctgttgcactcagcaactgatctattttgtccaccagagaatgtagttgatataattttgaagtctgctgaaagcctcaatgatcagcttacatgtctttacagtttttttagtgcagggaataagaaattggataggataaaaatacatggtctaagaagacgttggatgcttctccagaaactggttctggcttcatcaggcagtgatagtactagagaacttgccagaaataaaagagatggtttccattttagaagtttagtccctccatcaacatggatacaaaagatatctgatttctccatgttttctagcccactccctcgatttttcggatggatggcagtgtcttgctatgccaaggaatatttaaatgagaagctgtttcttgcttctgatttctcacagcttacatctttgctatcaatttacatggatgaactttgtttgatggatggagttgcaatcccgaaagtcaggtctgcaaaaggtgaacaatttagttgtacggacttgtttcttaaaaaggaaactactctgtcagaccaaccaagcatgaccgaacagtttaaaatcttacttccggagctacatttcttctttccaagcatgggtaaattgtttaatgcatttggggagagcatcttggaggctgttgggctacagttaaaatgtctgcccaatagtgcaataccagacgtcctttgttggttttctgagttgtgcttatggccttatctcgaacacattaaggagcatcttgtagttgcaaacggagttagttatataagaggaagtattgctgctaatgcaaaatcagttgtcttctacctacttgagtctattgttactgagcacttggaggctgttattcctgaaatgcccaggatagtgcacattcttgtgtctctctgtagagcttcttatactgatgtggccttcctaaaatctgtgctatgtctaatcaagccactcatctcctacttcttaaggaagggaactaatgaaacaaaagtactgggccatataaaggagggcagcaattttgagttgctttgttttgaagaattgtttgaaattgttcgctgtggtaaagattcggtggatacaactgaagataatattcaggcaccgttggtcatcttcattctgggatctatgtttcttgatttctcatttgagagaaggattgaaatgttaggctccttgttagtatggattgattgcatcagttccgatccaccatcgttattatgcaactatcttcaaggtttccagacacttctagatggttttgaagctgtgctaattcaaaatattgaactacttggtgtcggcatcctttctgcgacaaactcgtctatagaatcttctgattccttgggcattgatggcactatgctactagagaagaaggcacaagataatgaagaacaaacactaatgaaatccgtaacatactgtgagaacgatggaaatcataagggtcttcgtaatctgcatcctaatagtatcatagagttttgtggcaccctggagaagtttattttgcaccttacttcatatattgaggatagttggaaatggcaccatcagttggcctctaggatctctttgtctatggcaaagtgtttgttgtttgcaaaatttttgaagtccatagcgcaagaagacacaatatctagtagcagtgagcaagatgtcgctgtgaaaatttcctgtgagcttgcacaaaagcattggcaaagtgctcttgaaggtctaggagataccattttgataaatcaggaaacacagttctggcaggtggcatcagctatgcttgattatataatggggataccaaacgtccttgcttggggtaatgttcttaatactacatgctctgcggtcaagcacttctgctcccatgcacctaggctatcttggaggctgcagacagataagtggttgtcattattagtttcaggtggaattgagggcttcaaaaacagtgagatctgtttgattgatcttttctgtacaatgttgaatcattctgaaccagagcagcgttttgttgctgtacaacagcttgggaggattattaactcaacaagttctactgaagctgatttgaaatatccaaactatgaccaaaatttcctcatatctgtttcgacagtaacatcccttttgcacctgcagtccttcctttcatccagtaacggtatcctgactggtttgggacaactttctggtgtaattgaagagggctattttacacgaatgtctttgctgttgttttctaaggaggttttggatatatggagaaagatctctgcctagctctgtgccaactaaaaagtgaatcagatgctacaactgttgcaaaagttctttctggatgtaatagtcaaccagtcagccctgatttcaagagcatccgtgaatcaatccttcaggtgatgtcctctttgagttctattgaagcatactttgagttcttcgcagccagatctgcacaagaacatgaggaacttgaagaagctgagattgaattggagcttattgaaaaagagaagtcagttcctaactttgttgagcataccaatgatacgatggtgcttgccatgccatcatatgaccgtgatggtagtgaggttaataaacggctccagcaaatccgggaaaatattcggtccctggaaaggtctaggctgaaagaggaaattacagcgcgcagacaaaagaagctgcttctaagacatgcccgtgaaaagtacctagaagagacacgctccagggaaacggagcttatgcaagagctcgacagggaaagagctctcgagatggaacgtgaagtagaaaggcagcgtcaactggatattgagcgtgcaaagtctagggaactgcaattcaacattgatttggaaaaagagaaacaaactcagagagagcttcaacgcgaactggagcaagtcgagttggggcggtcatcaaggcccgctccagggagaggtaccgcgaaagggatggtggaggcagagcacagcaggaggcggggagcctgaggtcttcgagcagccgaggccaggaggggggctctgcccaggcgcccgcaccggccgggccgggccctaccgtcatgctcgccgggtcaaggacgttctcgggggccaaccttccaacgattctgcagcctcgcgagcgcgctgccgacgaggacagcgcttgggccgaggacgctagcagcaacggagatcctgaactggacggcgtgaggccgcatgggccgcgaggcagcaggtcatcctcctctaggcaggttgcggagaggagggagcgggatggcactgctgccggcacgggcaggagagaagggaaatgggagaggaagcagcacccgtgactattccctgcttgtgttgtgcctaagcctaacggaggcttcctcaatcgcgttgtaattgtactcgtatgggcattggatcaggtggctgcttagtcaacggtaccgtgcattgataaaaaggttggatcatcgtatgggaacactaccaatcagctgcctgctcagtcaacagcaccattaccatcacactccgacttttgtcagatcccctaagggtgtgttcggttacaccaatccagaggggaggat

SEQ ID NO: 19973 - DNA, 3867 bp, Zea Mays
ccgcgtcgcgaataaccgtgggggcgtgcgcgcgtgcgtgcctctctccgtctctccctccccgcccgccccacctccaccccccaccccggcgtgcgtcgcgtctctcccggccggaggcggaggagcggagctgcggaggacgaccaccggcgcggacgcaggcgtcccgcattccccgacccggccccgcctgacccccgttgccacggcagctcggtccgacccgaccaactcgtaggccagcaggcgccacgtagaaatacacgttcttcaattgttaacgtacaagtattacgatggtatcactctgctatttctgccccgggctcacaacgcggtcccggatgcccgtgaagcggtacaagaagatccttgctgaaatctttcccaaaacacaggatgaagagcctaacgagagaaggattgggaagctgtgcgagtacgcttcgaaaaaccctcttcgagtgccaaagatcacagtttacttggagcaacatatttatcgggacttaagaagtgagcaatacggctttgcaaaagttgtgatgttgatataccgcagactgtcagtttcctgtaaagaacagatgcctctgtttgcaagtagcctattaagcattgtccacacccttttagaccaaaagaggcaggatgatttatgtatcgttggatgcgaaaccttgtttgattttgctgtcaatcaggtggacggtacatatcagttcaatttggaagggctggtcccaagactgtgtgaaatagcacaagaagtaggagaagatgagcgagcaagtgccctacgagcggcagccctgcaatctctttcagctatggtctggtttatgggggagctttctcatatctcgtcagagtttgacaatgttgttcaagttgtactggaaaactacaaacctcagaagatgcaaaatgatgatcaaggtaccaatgatgccgacaaccagttggtgcaggaagaccagaaggctgagcaccccccttcccctttcattatcactccggccccctcttgggagagcatagttaatgttaagggaggagtcaacctaccagaggaagatgctagagatcccaaattttggtccagaatctgtgtgcacaatatggccaagctttctagggaggcaaccacattccgccgcatcttggaatgtttgtttcggtactttggtaacaatagttcatggttatcagaaaatggacttgctttgtgtgtcttgttggacatgcaacttttagtagaaagctcaggacaaaatatgcacttaatgctttcactgctgataaagcatattgagcacaaaacaatgttgaagcagccggacatgcagcttagcatcgtggaggtggcagctacccttgcagaacaatccagtgctatcgcttcaccaacaactatgggtgccataagtgatcttgtgaggcatttgaaaaggacattccatattactcttggcagcaaagatacggaattagtaaaatggaatgagaaattccggaagggcatagatgaatgcttagttcagctgtcaaagaaggtgtctgatgctgggccagttcttgacatgatggctgttatgctagaaaacattgcgagcactcctgttgtagctagatcaactgcagctgctgtttatcgcacagctcaaataattgcttcggtgccaaatttgcaataccagaataaggtgtttcctgaagctctgtttcatcagttgctgttaacaatgatacaccctgaccatgaagctcgtgttgctgcacaccgcatttttgccattgtcttagtcccatcttctgtttccccttcgattcaagccagtccatctagccgaccaaagaaacatgacatgcagaggacactctctagggctgtctctgtattttcttcttcagctgctatctttgacaagatgaaaaaggacaagaactcagaaaattcacaaggagaaagcaaggacaatagtatgcatagcgttggtgaagggaccggacaatcaaagagtcaaaaccttcacgtgtctcaaagccgccgtagcatgaaagctccgaatttttccatgaaaagaggtccttcaatggccatgagagctccttcagtagcgatcagagctccctcaatatctctgagaggtccttcaatgtctttgagagcatcttctatgtctgtaaaggaagaccaaagttcctcaaacaagtcagatgaggaaacggaatctgtgttggtgaagctgagcgcacgtcagatcacacttttgctgtcatccatttgggctcaatcaacatcccctgaaaatactcctgtgaactatgaagccattgctcatacttacagtttgcttctgttgttctctggatctaaggcatcaacttttgaggctcttactcagagttttcaggttgcattttctttgaggagctattcactcactgaagcagattcattacaaccgtctcggcgccggtcattgtttactctgtccacagccatgattattttctcgtcaagagcttacaatgtcttgccactcatcccgatctgtaaacaaatgatcaatgatcgtgcggccgatccgttccttcatttggtggatgagagcagacttacagctgttaaggattcttcaaatgatccttcaaaaatatatggatcaccagaggacaacaataatgcactgaagtccctttcagaaatagaactatcagaaagtcaatctcgagaatgcatagtctccacaatcatgaacaacatcgcaaatatgctggatgcggaattgcataatgtgagaagccaattgctaagtgatttcactcccgatgacatgtgtcctacaagcactcagttctttgaagtgcatgctgataacccttcatcagggtcttatgagactggtcaccatcaagagggcttgctgattgacctagggaatgaccatgatgcttttggggaagcttcagaaagcgcagaagcttccgcatcttctatacctgcatcagatcttctgagtatcgatcagcttcttgaaacggttggtgcagaaccagcacctcaggctggagtagtgtcagcagacattgggttcaaggatatgactagccactgcgaagccctgacgattgggaaacagcagaaaatgtccgccttcatgagcttccagcaaagcgtgcaagcggcagggctgccgagcagccagcccaaccagatggagctggacctttcccaagacccgcagttgcctcagaccggggcacatagcacgaacccattcactgatgacagccttcagggatatccacagtacacgaaggggcccaacggcgacaacgcacagccaggccaggacttccaacaacagtccctgaagttaccggcggcgagcccatatgacaatttcctcagagctgctggctatagccacgaactttccattccgcaggaaatcaaggaagagagcctactcgctgtcatgggacaccatgaagacgtgatcgcaaagcttgctgcaaaacttacaggtgactcgaacgattgttccggctttgtcgtctttccaccctctgttttgggcttttggcatgagaggaggcttctgcaggaatacgccacttctcctccgtactagaaaacgtgcctctgcctgacgacgtacaatgttcatgggatgactgggaacagaactgcaccagttagcacatcgtcatgtgagctgggcaccaatccagatgatgggcgttgtgtcgtaccaggacagtaggagtattactactgtattggagtagttcgcagttggagatagagtcatgtacacacacagcacagcagcaagtgccaagagagagagagag

SEQ ID NO: 19974 - DNA, 1064 bp, Zea Mays
gagttagggtttcccacatttagattttagagatacatggcataatgttgccaatagtcagtttagagtcaaggaagatttcgtcctaagattttgcattattgttagcacaatgttcgcaactttggagaaaattgcacagagtgatcctaaaactgctgatattgtgttgattgagaattatgctgctttccagaacagtctttatgacttggctaatgttgtgccaacgcttgcaaagttctaccatcaagccagtgaatcatatgaactagcttgcactcgccatatcagctcactcatttatctgcaatttgagaggttatttcaattcaaccggaaagttgacgaattgacttacactattgctgctgaggagataccgtttcagctgggattatcaaaaactgacctaaggagggtactgaaatccagcttatctggggaggttgcaaaagacactgacctccgacgagttgtttccttcgctgtgggacaagtgcaagaaggagtttttggacaaatacgagagctttgttcagatggtaacacggatatatgggaatgagccgatcatgtcagtcaacgaaatgaaagacgtccttgctggtttttagatacaagtacacagcaccatgtatgatttcagagaaatagctatgtattccattcattccattgaattctgcacccacttgcgttactgtgttaggcgccctttttgggttatgtgtgtgtatgtggatgtcctctgtatagaagtgaacgcggcatgcttcccctaatgatgttcctgtgtcgcatcgagccgtcagtgacaatgcaaactgcaaacccggagtaccggaaggaacatgttcatgtttatgacgtcatttgtccaattgccgttccattcacggtcaagaaggtcatgtcttgccaagttcgctttgtttcctggtctgaggtctcattgctactttcggttgttcagctgaagactgaagtgcaagctatcacgtgtcgggctccagttcgttagtgtggccccatatgttgcgggcttcccagcttagaaacat

SEQ ID NO: 19975 - DNA, 2698 bp, Zea Mays
ttttgctcaattctagctatagctttaccccaaaccgaaagtggcatccgaaagatcaatttattttgcactccgctgttatatcgacgtgcaccaccgtcttgccgtcgctcatttcctcctcgctcggctgcttgcctagggtttcacctgctaccgccccacctccagccgtcgcttcagatcccgccgctgccggcgctcgatcctacttcgttgctcctagctgatcccgctgagctcggatttgggcccttcctccccgccggaacagcgtccggacgcgcgggggcagatctgggttttggtggcccgcttggtgtatgagaaggcctccagagcttggaagtaatggaggtggagccggcgaggagggacgcggcagcgctggacccggagctgctgcagctggcggagctcgcgccgggcgcgcttcgtgagaactccatagctgatgcgctgtattcgcagtggctcgtgctacccgagacgaccaagctggtgaagtctttgattgatgatgcaaagactggtgctgtgcttaatgttgctggaagctctgctagcacaaatgctgcttcaagtagttctctaccttcgatgtttcctgctggtagtgctccaccactttctcctaggagcacgtctggttcccctcgtgttatgagacgaggatctggagctggaccatcatccttgggctctccattaaaattagttagtgaaccagtaagagaagttatacctcagttttacttcaagaatgggcgtcctcccacaaaagatttgaaggagcagtgcttatcaagaacagatcacctattttttggtggtgggggacttcaagttcaagaattcagatcggtcacgaaggacatatgtaaacttccttcattcttgtctagtgtccttttcaagaaaatcgatgttgaatgcactagaactgtctcaagggatgcatttgttgagtactggattaacgacaataaggttacaatggatatggctagtcaaatatttgaaatattaagaaagccaggttacacatatctcacccaggatgacttcaagcctgtcctgaaagaactactggcaacacaccctggcttagagtttttacaagggacccccgagtttcaggagagatatgcggagactgtaatatacagaatcttttactccataaatagatctgggaatggtcatctgactctgagagagctcaaacgtggaaatttaattgctgcacttcagcagttagatgaggaagaagatatcaacaaagtgttgagatatttctcatatgaacacttttatgtgatctactgcaaattctgggagctggatgcagaccacgattttttgattgataaggaaaatctcatcaaatatgggaaccattcgttgacctatagaatagttgatagaattttcgcacagatcccaaggaaattcacaagcatgacagaaggaaagatgggttatgaagactttgtttactttatattatcagaggaagacaaatcatctgagcctagtcttgaatattggtttaagtgcatcgatcttgatggtaatggtattttaactttcaatgaaatgcaatttttctacgaggagcaattgcaccgaatggagtgcatggcacaagagcctgtgctttttctggacatattatgccagatgattgatatgattggaccagagaatgagagctatttaactctacgggacttaaaacggtgtaaactctcaggaaacatattcaatattcttttcaatctcaacaagttcatggcatttgaaactcgtgatccattcctcattcgccaggaacgtgaaaatccaactctaactgagtgggaccggtttgcacatagagaatatattagattgtccatggaagaagatggtgaggatgcttcaaatggaagtggtgatgtgtgggacgaatcacttgaggctccattctgaatggcgtcttgctgcatgaatttggttggacatggatgattatggttgtgaagcggaaggattgtaaatttggtggctaccctgttgaggccattgtaggctcacagcagattcagtaacatcaaaggctacttaaaagttttactgtgcagatctgattcaatatttgtcagttatcttgttgggcaaacatttttgctttgctggaaaattggggagggaggttggtgggggcgccctgcagtttcaaggcaacaacctcagcagtcatcaacggtcgactccatttgtgttctgattgatccttaggttctgctttctcatcagcatggtgttctgtagttgtgttgccattcttggtgcatcttgggaggaatgatccgtgaccttgaagaatggatacttagtcattttgtaacattaccgagaagcagtggattgggtgcatagtaacacaggttgtaacgttaccgagaagctgtggattgggtccaatttttgttaaggtgtaaatttggagaatattttaggttatcttacttgaaagtgctttgcgctttgcgtattgagctacttatgtcgtgatgcgctgaaactccatgtgtgtattcttgttgtattttccattttgtcaaggatcatgttttcttgcctatatttttcattttgttggctcggttctcgcaacatttgcacctgcaagaaacggcacctagtattgttt

SEQ ID NO: 19976 - DNA, 2691 bp, Zea Mays
tgccggttttttccttttctccgtcgtgcaagatcagtcctttctttttttctccgtccacggttcgatcaggttttaccttctcttcgtcgtgcaagatcaatccttcattttctccgtcgtgcaagggggtcagttgaatcagatgctccacgttacgtccacccttgagctcgatggcagaaggaagcagtagccataggaggagtgcattctcccctgggctggctgtgttattatctggcgatgaagctaagattagctcccagaagtcgcacctggtgtcctatcatgacgaaattgggcaccaggctgttgagaggacgatagagcacatctttgatctccctcacaagtcagtggtccggcctcctggaccagttgacacaggcttcgtgcactcagtggtgaggaatcaagctagaaaatttgatcttgactgggaaaactgcattcggggataccatcgcagcgtcttcattgtggacaaaggtgctgggcagaggaaggtggttcttgatgattcgagcatttgtggtagcttcaggaatgtccggggaccttcacttgttgagagttccgcccctttcagcagtgccagggctaatgcttgtgtgtggaaaggcaaatggatgtatgaggtgacccttgagacgtctggagttcagcagcttggatgggctactctctcttgtcctttcactgatcagaaaggtgttggtgatgctgatgattcatattcctttgatggccggagggtgactaagtggaacaatgacccaaagccatatggccagccatgggcagtaggtgatgtcatcggttgctgcatcaacttggatgcaggagaaatttccttttacaggaacgggacttctcttggtgttgcatttgatggaattcgcagcgtggaacctaagaagggatattatgctgcagtatccctctcggaaggagagcgttgtcatcttaatttcggctcacatccattcaggtatcctgttgatgggtttgatccattagaggcgccaccacgctcttggtcgtttgtcacataccttcttagatgcctgttccggttgctagaagttcacaacctggagaaatctgaatcagcatacttcgagaaactgaggagggtgaaaaaatttgcaccactacaagaactctttggacccatttcagaagggatctgtgcagaaattttcagtgctattgaagcaagccaggggtgccttgagtatattgcctggggctcgttgatcactctactcttagatgttttcagaactcgtgagccgcatgatttctcatgccttgatcaggttcttgaccttttcctccggttcccaggttgcacttcattatttcaggagctcattgtggccctttcttgcatgtgcaaagttgcaccacttgtgttgacagaatgcccatattctgggtcatatccatttttagcgctggtttgccaccttcttaggcataaggatgtaatgtgtttatggtggaaagcagaagatttcgttttctcgtttgaaggcttccttacaaggaagattccaaataagcaggatctacagtgccttgtgccatctgtttggtggcctggttcttctgaggatgaagttagcatgacactgacgatgacaacactctcagatgcaataaaaaagattgaggagatgcatcgtgaactttgcagcttggtaatatgctttattccaccaatgtctacgcctcagcctccaggctctgtatttaggtcctttgtacaaagtttggtgctcaaagctagaggtggagatcataggatggttgtcaatgggactttcaacaacactgtgcttgtttcattgtacacagtaatcctgcatttgttgtctgaaggattttctatggattctgctggatctgcatcatcctctaaagcgaactttgggaatggtgttggatttcttcacaaaggtggaaaacgcaagtttccgacacaattatttttcaggaatgatgcctatcacagtgtaattcctagaatcggtggaccaccaagtattttgatgcatcaccaatttgatgctgtggaaaatgaagtgcagtgggatgaaggctgcatgaatgatgaagagacacgtgttacacacactacagcacagaagccttgttgctgctcagtgacagatgttgctgttggcctaagatacaaagaaactgctaagtatgtgccatcaacttcaaaaggctcatgtaagcctatgcctgaaagatctcctcatgttgctgctgagtgcaatggtagaggtctgagtgatgagatcgaagacaaacctagcacaagtgctcaatcagaaattgaatatggataccaatcactgcatagtcttgaaaacatgccaatggcaactcaatcttcgtcggaaacacttaaagaagaagagctgcttgatgttatgttgttgttatatcatctcggcatctcaccaaattttaggcaggcattttatttcatgtctcagcagtcgcagtccatttctttactagaagaaactgacaggcagatacgagaaaaatcatgctcagagcaagtaaggcgtttgaaagaagcccggaatagctatcacgaggatttggtagattgtgtacggcattgtgtttgcgccaggagaatttctgctatgatagttttttttg

SEQ ID NO: 19977 - DNA, 716 bp, Zea Mays
gtttcttcctgtgaacttgccctatgatatttcgaggactcgggcttgaatatgacatgtcaggattgacagggaacacgatggatagtcataggctcataacacatgctggacaccaaggctatgacaagcaaaatgctcttgttgaagaattgttcctcaattaccattgccaaggaaagtacattggtgacaagcaggttttgctggatgctgcaagaaaggtgggcatagaaggggccgaggaactgcttgaagatcctaccaaaggagtccatgaggttcaggaagagctcaagaagtactcatcggacatctccggggtcccacattttgtgatcaataataaatatcaactcagtgggggccagccaccaaatgaattcatgagggcgtttgagatggctgcaaaagatggagcttaatggcgcttatttgcgagaaaaaactgtggaaccagttgtgtttcgtagttttgatgtggtgatattagtgacgaagatggtgtggatgttcacttttgaatagagttctaggtgattggatatggaacatgggttatgtcctgtaaatagaggccagtctgtatatttgatttgatttcaaccgaaagctgtggttttcagaacctgagatttcagcatgaaaacctattgtaagcacccctgcggacattaacatcaagaaaaaatctataaaaataaattttcgcaatg

SEQ ID NO: 19978 - DNA, 1143 bp, Zea Mays
ctcagactgtccagttgcacaccagacaggcacagttaatatacacccaagtttgttgcctctatatcgtggtgcagctcctgtgcagagggcactgcaggatggtgttgcagaaacaggtgtttcccttgcatatactgtccgtgcattggatgcaggtccagtgattgcgtgtgaaaggttttctgttgatgaatgtattaaggcaccagagctactttctatgctgtttcatttaggatccaagctattgattaatgaacttccatccattcttgatggttcggctaaagataaggcacaaccacaggatgactccaaagctacactggcaccaaagttaaattctgaggagtcatggctatcgtttgacgaagaagctaaagtgctgcataacaaggtgagtatctgattctcaatgtgtccaacaaagcttttgccaaccaactctggtaggtgcgggcatttgcaggatggcctgggacgcgcgcaaagctgcaactcataaaccaaaacagtgtacccgatgtactagagattaaggttatcagcacgaaggtttcaacatcatgtgtcaaagttggagatgaaaacgagatactattctctgggagctcgttgctgattccttgcagtggttcgacctggctcgaggtgttggagcttcaactccctggaaagaaagtaacaaaggcacaagatttttggaatggtttgcgtggtcagaagctgatgaaattgccatagggggatatctgcattcgcagcacaggagtgtgcctatatgcatagcaagggttattgaggtcagtcattgcgcgaacataagcagggtagtgctagaagcctatatgcggagatctcggttttatgactaccttttccttctggtaaacttggtgctataaactcgtaactcagttacattaggcatgccatttgtattgcttcctcaatttcagaaaacacactgctgtaactatttcagttattcaatttttcactgtcataactgagctacaaacatttgagaaataatacagttatgtggtgagtaataaggcaataatttgccgtaccttcttgaggacgtcgtgtctctttctgcacaactgcccctgaacattctatgaatgtcttgct

SEQ ID NO: 19979 - DNA, 1532 bp, Zea Mays
attgaactgatgtgctgacttgtcaactttctcaaaatccatgttgaaaattaagataccagaaaacaaattgtcttggatggcccacggagttgtggtaaaagcattgcacttgcgatgcttgtccattgggcgcgtactgaaggatggctggtattttatgttccacaagggaaggattggactcatggaggattcttttatagaaacacatacagtgattttttcgatacaccagtacaggctgccaatatcttgcagaattttttgaagtacaatgaaacacgtttacaacagttaccatgccaaatttttgagcgtattcccctgggagaaggtgctggtgttggaatgatgaaaggggttgacacaatggaaatgcctgaagggtccacattatatgatctcattcaaactgggataactcaaacacatgcttcagttggtgttatggttcgcttaaggaaggagctgtcccttgttaaagacgtgcctgtactatttgccattgatcagtacaatagctggttcacattcagtgacttccaggaacctgtaactgtccgatcctgtcgatcgatccatgcaaaagagcttacaatggtcaatgcttatagatcaatgctgcacaatgatatgatggtgggggctttttcacactcaacagcagttggcaaactacggcaggagctgccagatgttccttctgatgctcgtttgatctttccacgttacaccttagatgaagctgagactgcatgtcactattatatgaggcaaaagatcattcggcgcgagaatttttcagaagagaaatggaaaaagatatactacttatcaaatggaaatggtgcagagatgagatggcttgctgccttcgtttgagtttctgatacctggattgtactcagttttggtggtggtgtagaaaggttgccacctctgtttcagcattccgttacacaccacagttcattgttgtgtacttgtagtccgtctcttgacatctctagaagaaagtttggcgtcaacatcatttgtgctgagtagaacttgaggagataaggcataagtatgtggctcagttacatgattatatccttaggcttctttcagttctcgctcagatgctagatacaaaataatgtagcattgttattggagaagttttcacatgttttggctccgccgagcacgatgagtatgatgagttgatgccaatctactcagcatgcttgctactatgttgctgaattgagctccgttgagtattttttttaaattactgtacgaatcgaacaattatttgagttgggaacaatattcttctttgcggaactcaaaggttacgaggcatatcctcagtttgaatagtttagcttacccttgtttcctcagtttgaatagtttagcttacccttgtttctcggagagatgcaacatattgatttagctacattgtctattccggtgtactcctatgccgtttatcgattttccttctggaaacgaataactctttaactttttct

SEQ ID NO: 19980 - DNA, 1105 bp, Zea Mays
atcaatttctcctccaccaagttcctcctcccttcgacttcctctcccccgtctggccgtgcagccccggaggcgtcactgggcaaggaggctggggtggggacctcaaacgccatggatgtgcagccctaggcaccagatattaggatggatggagtcacacaagctgttgaaaatcttaagaaagaatggggccaagcagtttcacagcttgacgagaacattactgcaatcaaatcatgtggaaaaacagggaaagggacagaggaagcaaattctcttccaaggttgaatggttctgcacaggatgctctgcagttgctgaagtcactgcagttccagcttgatcttctagcacagcagcttcccacttttgatgaggtgcagtctggtcaagcaaccttgaagtcatgggatgaacaatacaagaagcttcgtattagcttgaggaatgctaacttagaagcaaaagacaacattagacaagctgctgaagaggagagggcacttcttctaggcggtggtgaagagtctaccatccgtaggcgtaatctccagacaaaggctggaatgacatctgctgctgaaagtatcactgagagcctccgacggtctcgccagatgatggttcaggaagtggaaagaagtgctagtaccttggcaacatttgacgaatcaacaagtgttctccagaaggctgaaggtgaatatcaaggacatcgctctttgctgatgcgtacccgtggtttgctctccacaatgcaacgacaagatgtttttgataggatcatcctgactattggtttcaccattttctccttggcggttctttacgttgtctcgagacgtattggtctgttggctctgcaaaggaaactggccgatgccatcagatcaggttctttatcagctgaggacattgtcgcgaaagcccaacatggacctgccccggcaaatgttcctgctcctgctcctcgcgtttacaatgaattatgaatcgcttttattttccgttttatgaaatgtttgaccaggagagattgttaagaagtcgtgaagggacgtaggctatggccatggaatggactcaccgtctcgactctcg

SEQ ID NO: 19981 - DNA, 187 bp, Zea Mays
accggggcttgcctgagtaacactaggttagtgttgttagacgatgtccgtttgacgagtatccctcaaccgagtacttgtttgatttaaccatcttcaggttggtccatcagcttcatcctgcggattagcccgcgcttggtgtcgacttggcttgtcttccgcatcacgtgattatttatcgtcc

SEQ ID NO: 19982 - DNA, 159 bp, Zea Mays
cggctatggcgccgccgcggtttagagtgcaccgccgtagggtggccgtcgacggaggggtttgagctcgtggccgttgatcttctgcgcaacggtcgagatcatacagtcgcgcacccgttcgtgcaattgaatcgtgaccatagatctacgatccct

SEQ ID NO: 19983 - DNA, 3792 bp, Zea Mays
tcccctcgcgatttccacctcctcccccacccccacctccgtaacccacttccaggtgggccccccacatcgccgccggtgacacgcacctccctccctgcctcccccgctaccgaccaccacgtccacgcccccggtcatgacgacctcgccgccgcccgccgagcaggaacagcaggaggaagaggaggtgctggtgccgcatggcccgcaccaggagctgcccaatggagcgcagccaatggaagttgtgcctgctgagccagctgctaccgtggagaaccaacagatagaggatccaccaatctcgagatttacttggaccattgagaatttatcaagagttagcacaaagaagctctactctgaaatttttgttgttggaggctacaagtggcgaattttgattttccctcgggggaataatgttgaattcttatctatgtatttggatgtagctgattctggagtcttgccctatggatggactagatacgcacaattcagcctctctgtggttaatcagattcacaacaagttcacaataagaaaagaaacacaacatcagttctctgctcgagaaagtgattggggtttcacttcatttatgccgctgggtgaactctacaacccaagtaggggttatcttgtaaatgatacttgtatagtggaagctgaagttgctgtgtgtaaagttgttgagtattggagttatgactctaaaaaggaaactggctatgttggtcttaaaaatcagggtgctacctgctatatgaattctcttcttcagacactctaccacattccgtatttcagaaagatacagctaactacagatatctcttgccaggctgtttatcacatgcccaccaccgagaacgatatgccctcaggaagcatcccactagctctacagtcactcttttataagttgcagtataatgacagcagtgtctctacaaaggagctcacaaaatcgtttgggtgggatatgcatgattcatttatgcaacatgatgtacaagaattgaacagagttctttccgagaagttggaagataagatgaagggaactgttgtggagggaacgatacaacaattgtttgaagggcaccacatgaactacattgagtatctccagcttgatgtcaaaggttgtcaggatgtctatgcttcatttgataagtacgtagaagtggagcgtctggaaggtgacaacaagtatcatgccgacaaacatggcctgcagataaacgatcgttatgaatttccactccaattggatcttgatagagataatggaaaatatttatctcctgatgctgacaggaatgtgcgtaatctttatacccttcacagtgttcttgtccatagtggtggtgttcatggtggacattactatgctttcatacgacctacactttctgatcaatggttcaagtttgatgatgagcgtgtgacaaaagaagatgcaaagagggcactagaagagcaatatggtggtgaggaggagctacctcagacaaatcctggcttaaacaacaccccattcaagtttactaaatattcaaatgcatacatgcttgtgtacattcgtgaaagtgacaaggacaaaattatatgtaatgtggatgagaaagatatagcggagcatcttcggattagattagaaaatgaccgtgaagagaaggaacgtcggaagaaggaaaaagcggaggcacacctctatactataatcaaggttgcaagggatgatgacttaaaagctcagatagggaaagacatatattttgatcttgttgatcatgataaagtcccaagcttccgtatccagaaacagatgacctttgctcaattcaaggaggaggtagcaaaagagtttggtattcctacacagtttcaacgattttggctgtgggccaagcgacaaaaccatacctaccgacctaacaggccattgtgtcctcaagacgaagcacatactgttgggcagctaaaggaactggtgaacaaggcccacaacgcagaactgaaactgttcttggaagttgaacttggactggaccttaaacctcttcctcttcccgacaagactagagaagatatatttcttttcttcaaactctatgaacctgaaaaggaacagctgcggtatgttggtaggctttttgtaaaggcttcaggaagaccacaggacattctgctgaagttaaggatgttggcaggtttttcacaggatgatgatattgaactttatgaggaaattaagttcgagcccaatgtgatgtgtgaatacattgacaacaggcttctgtttcgatcttgccagcttgaagacggggatataatttgttttcaaaagccttcaaaaccagatagtgcagaccgatatcgatttcctgacgtcccatcctttttgacgtatatacgtaaccggcaggtggtgcacttccgttcattggagaagcccaaggacgacgaattttgccttgagatgtcaaagattttcacatatgatcaagtcgtggaaaaagtagctgaaaaacttggcgtggatgacccatcgaaaattcgtcttacatcacataattgttattcgcaacagcctaagcctcaaccaataaagtacagaggcgttgaacgtctactggatatgctgattcattataaccagacttctgatattctgtactatgaagtattggacataccacttccagaattacaagcgctgaagacattaaaagttacctaccatcatgccacaaaagatgaggtgtcagttcacagtataagattaccaaaaaacagcactgttggcgatgtgctgaatgatatcaaaacgaaggttgagttgtctcataccaatgctgagctaagattacttgaggtcttttatcacaagatatacaaggtatttgcaccaaatgaaaagattgaaaacatcaatgatcagtactggacactgcgtgcagaggaggttccagaggaggagaaaaatcttggccccttcgatcgtttgattcatgtatatcattttacaaaagacactcaaaaccaaacgcaagttcagaactttggagaacctttttttatggttattcgtgaggatgagaccctatcttctatcaaagaacgtatacagaaaaagcttaaggttccagatgaggatttctcaaagtggaagtttgcatacatttcactcggtcgtcctgactattttgaagattcagatactgtagccctaaaattccagagaaacatgtatggagcttgggagcagtatcttggactggaacatccggacacggctcctaggaaggcacacacggctaatcagaaccggcattcattcgagagacctgtaaaaatttataactaggcatgttagaaattgagcgatgagctgccgctcaataccaagccaggctgaagttgctggcttgaaatagagagcatgttgctcaggtttttcgatggagctgtggaactagttcagaggagactgatcgggcgacttgtcatctttcctgtttgttttgctgccccggatatataaagttgtacagagatgaccccaccagacaattgtctttagtagataagataactttttacagtcgagtggccgatgttttagtcgatcactctgttctgcagttggtggtggtgctaggtggccttgagctgttgagggtacttgtctttcgactctttctgtatattattgacgcggcggatgtttgtaattccaatgatacatttcttacttgctggtttccggtgctttcc

SEQ ID NO: 19984 - DNA, 1296 bp, Zea Mays
gcgagacaggcctatcaaattccagcggcccagcaattattgacagaagatcctcatcaacgactaggagcaaatggtgcctcagaggttaaacaacatccatttttcaaagacattagctgggatacccttgctaggcagaaggctgcctttgttccttcctccgatagtgcatttgatactagctacttcaccagtcgctattcttggaatcaatcagatgaaaacatatatgaagcatatgagttagaggactccagtgataatggaagccttagtggaagcagtagttgtgtgagtaaccaagatgacatgggggaggacagcactggcctcaatgagtttgaatctagtgcaaatgtcaattattctttcagcaacttctcgttcaagaatctatcacaacttgcttccatcaactacgatctgctcaccaaaggattgaaggatgatccaccgccaagaacagaaatgtagcagttaatctaaatttggatggactcatttgagtactcagacagtctacaaggtgctcgtgggatgtaggtcttgtacatatcaaagtgtgaggcatggtctgttcctattgaggctgttcctacatctcgcggatccgagtacagttttggtgttgccttgttttcatgactattgccatgccatcatcagtgaaatcacccttgaccaaatttggcattcgacctaggagcgctgtctttttggttcgtctttcctttttttttagtcctattatgagccttgggtttacggagattggtcaaggttactgtattcagaatacagctcctgaagacgtaggcgggtttcagagaattgccattctggcatacagttgactctggttcgttaagctggtagcccgctggacttcctgcggccagaactgtccacaacattttgatggccgtggaatataacattttgcttaatgtgtccagtgtccaacagaatcagggacattttaagaagaatattaaccgattgacattataaggatatcaaatggaagcggcgttttatgcaattcaaaattcgatgggcatcgcccagtagtcatattgtgagtatctgtaggctagtcggaatcgtaacggtttgtccgatgtcatgtcgcttgcaaaatgctgtagtagcactacctgctgtttattaaactcagaactcgaactcttttaatagccctcgtagactatttttaacatcgccaagagcactgccatgtcacggatgagatatttaatccagctacctttggcttggatattttagaaattg

SEQ ID NO: 19985 - DNA, 213 bp, Zea Mays
agcccttccatgcaaacgccaagtttcagcttccgttcgtgtcaccgtgttcgtcggaaagagagaggtgcagggaggcatcgtgcgaacatccgcgtcgctctcgagcgcggagaaggtcctgggccccggtcaaacctgttgtagtgagccagcaccgtagcgcgtgggcagtcctgccacatgctgagtccagcagtgaggtcacgagga

SEQ ID NO: 19986 - DNA, 478 bp, Zea Mays
tacctgcagcttttcactacctcgctcgcttgttgttgatcttgttgccggaagcaaaccggatggagcagtaggacccaacgccggggctacagggggtgcacgcggcgacaactacacgaggtgcgtgcggtggagagagaccgcgagtttcactggtgggggaggggcgacgccggcaacaggggaggcacggcttggtcggcgggggagaagcgatcccagtcttaaacagatagggcaagaaaccctagcaggcagttagggtttgaatgctcagtttcacagcagcagggagaaaggggtgggcatacctgctgggtgatgcttgtgcccggtgaacgatccgatgaagacctaggcaccaagcgtagggcggcggcaggggtgaagcagttgtccccgagagagagaggcgcaagcgatgtgacgaaccctgtttgtttcctcgtatttttttaatcacctagccaccaaa

SEQ ID NO: 19987 - DNA, 2770 bp, Zea Mays
atcaaaggctcaagcaactcagagcaagaaatctggcgttgccctgtggccttcaccaggatggatggctgctgacagtatattgtgcctgccaagtctgcagtcaaaaacgtgtcaccagctggagagggctcagtaaatatttaccccataatgctaagagtttcagccagcagagatacatatacactaaccgtgaagatcggcaaaaaggacaactcaactgagaactttaagagagcatgcaagatcctgactgcagactctgagccggttcacatatgggatttctctgggcgaacaacatacatagttatgactgaactgaaccggtcgccccatgactcaaaatctgcagatcaggagatgcctctacaaatacacatttatgatctgtcggaacctatggttaatggttctgatgggaaaagggatgagttagcattaacattgggtggctcaagttctagcaatggtggtagtatgaacatggatctggattcatcaagtggaagctctaagcaagttggatccggtttaacaggattagacaatttgggaaacacatgtttcatgaacagtgcagtccagtgcttggctcatacttcaaagctggttgactatttccttggtgatttccacaaagaagtaaacccacataacccactggggatgaagggggaacttgcatatgcatttggcgacttgttgagaaagctatgggctattgataggacccctgttgcacctcgccaattcaaggccagacttggacggtttgctccccaattcagtggctttaaccaacatgattcacaggagcttcttgctttcctattggatggactccatgaagacttgaaccgtgttaaatgtaaaccatattctgaagctaaggattcagatggccgtccggatgaagaggttgcagatgagtattggggcaaccatttagctcgaaatgactctatcatagttgatatctgccagggtcagtacaagtcaacattagtttgccccatctgcaagaaagtttctgtaacatttgacccgtttatgtatttgtctttgcccctgccttcaacaacaatgagaacaatgaccataacagtcttcagtactgatgggaccagtgggccatctccttacactattagtgtaccaaaatcgggagatacgaggacccttattaatgcgttaagcagtgcttgttcgttgagagatgatgagcgccttctagttgctgaggtctacaacaattcccttattcggtacttggatgaaccttctgaagttatctccttaatcagagatggagatcgtttggttgcatatcggcttcctaaagacaatgaagatgccccaattgtggtgttcagaaaccagcgtatggagtcatccctttccagttttgggcgtaagtcatggaagacttttggcactccactggtgtcaagccttcctgatacagtaactggaagtaatatttacaatcttttcctaaaggttatgactccattcagagtatcaagaggtgatgctgctgttgctgatcaaacacttggtgaaagcagtctggttgatgaaactgaagatatcaatatgagctctgatgcctcagagcacaccagcataaacaacaattctgtcgaggatgaaacagggactgaagatgtgatgcaatttttcctgactaatgagagaatcccagaccaacgcatgaagatagaaatggatctatccattacggtgaatgatccgcataagcgtctgcatgtggctgtgtgttgggaggacagtggactggaccaatacaactttagttctttgaattctcttccagaagtttacaaagcggtgctgttttctaggaggccacaggacacatgttctctatatgcatgtctggaagcttttattaaggaagaaccattaggcccagaagacatgtggtactgcccaggttgtaaagagcatcggcaagctagtaagaagttagacctctggagattacctgaaatccttattatacacctgaaaagattttcatacagtcggtataccaaaaacaagctggagacatttgtggacttcccgattcatgatcttgacctgtcgaagtatattggtcacagatgccaagacgttcctcacaattatcgactgtatgctactagcaaccactatggaagcttgggaggtggtcactatacggcttatgtttatcatgaagggaaaaagggttggtatgatttcgatgaccgtcatgtgggccccataaccgaggacagtataaagacatcggcagcttatgttcttttttaccggcggatacaggaggatagcttagatacagttacagacatagattctgatattccaacctgaggaggcggtggaggcaatttttgagcccaagtcccggacagtgtatagtttcattggtttagggggacagttgtgcggcaatgccgcaacggaagtgagaaatagaacaggtggggaagagtttgtgcggcaatgtggttcagaggggggagataatttgtcgcggttccttccgttgcaaattcctttgttttttttccgttcccttttagcacctgtaactgatagcggtaaaattttggctaatggcatgtggggaagatatttcgtcccagattctcaacacagttagggttagttttggaaccctatttttaaggaatttctatttttctaagagaaactagtttattttttcttggaaaaataggaaacctttcag

SEQ ID NO: 19988 - DNA, 794 bp, Zea Mays
gcctcaagatgtagcaaagaatgttttctcaggttgagcatttttctgaagatcatgttcttcataatgatcaggaaaaggagctaataaagatatcagaagctaaaattcgcgaatggtctaggggaaaagaaggaaatattaggtcattgctttcaacactgcaatatgtcttatggcctgagagtggatggaaaccagttccacttgttgatataattgaaggagcagcagttaagaaggcttaccagaaagcattattgtgccttcatccagataagttgcagcaacgaggtgctgccatgcatcagaagtgtatagcagagaaggtttttgacattttacaggaagcatggaaggaattcaattcggtcacttttggatagtactaggagtttatttcactactgtattggtccaatgatctatcgcacaggcatattgcttcccggtgtctgcaacagttagttggttgaaacaacctagaacagtacagcaaatgggcaaccgagagttcggtttgtgaatttcggtgcacagtcaatgccgacctccgccatttcttcaaaattccgactgtaacaagtgtaatatgtaatattggttaatcaggtttaatggatccagacgatgactgaaatgtcatttaaggaatgctttgtgcacagccatttgatgtgtgcctagtagctgttggtgcataaattttgtctaagcttcggatgaaaaaggttatcaatcttttatctgactgttaattttgtccaatatacgttagcagcagtaaatatttg

SEQ ID NO: 19989 - DNA, 1147 bp, Zea Mays
ccgacctccatgcatggcatatgccgtgagatattccattccggcgtactaaacccaccttgcagttgcactcattaattctccattcattcagtctcgactgcatcttccccccactgcccattcgcctcgctcttgcataagatatcttctgtccagctagaacatcctagagctagctgttgcatgcgttgatcgagccaccaccagctagcattgtgatcgagggaacaagaagagatgaagtttggcaagaggctcaagaagcaggtggaggagagcctcccggactggagagacaagttcctagcgtacaagcgcctcaagaggctcgtccgcctcgtcccggcctcctcgcccagcaggaggggcggccgcgcagccgatgccgccttcctgcgcctcctccacgccgaggtcgaccggttcaacgccttcttcctggagcgggaggaggacttcgtcatacggcacagggagctgaaggagacggccgaggacgcgcgcaaggcgatcgtcgacctgcacggggagatggtgctgctgctcaactatagcgccatcaactacacagggctggccaagatcctcaagaagtacgacaaacgcaccgggcggctgctgcggctgcccttcatcggaaaggtgctccggcagcccttcttcgccacggagctcatctccaggctcgtccgcgactgcgaggccaccatggaggccgtgttcgaggccagcacaggccacgcccgctcgtcggcggggacggcccccgtggcctcagccaggcagggcatcttccggaacaccgtggccgcgctggtgaccatgggcgagctccgcagcgggagttccacgtacggtcacttctcgctgccaccgatggccccgccggagtccgatctcctgcggcgcgtgtgcgtccaggtcgccggtcaagtgtccatctgactatccgagagattttccgctgtgctcttcgacggccagttactactcatgctagattgtcatactataagagacatgtatactttcgcttcctactacaaattcacctatttgtataagcctagaaattctgtcgaattcttctttttttacttttccagcatctacgcagttgaatcgccaaaaaagaagcatgaca

SEQ ID NO: 19990 - DNA, 1107 bp, Zea Mays
ttttttttctggccatgtacaggactatgttccgacggtgtttgacaacttcagtgctaacgttgtggttgatggtaacactgtcaacctcggcctctgggacactgcaggtcaagaggattacaacagactgagaccactgagctatcgtggagctgatgtttttcttctggctttctcactgatcagtaaagccagctatgagaatgtttcgaagaagtggatacctgaactgaagcattatgcacctggtgtgccaataattctcgtagggacaaagcttgatcttcgagatgacaagcagttctttgtggaccatcctggtgctgttcctatcactactgctcagggagaggagctaagaaagcaaataggcgcgccatactacatcgagtgcagctcaaagacccaactagtattgccatctgctcattcatccgctaacacgcggtatcacgtgagaggcactgacggactttacttattgtttcccacgtgaatttgcagaacgtgaagggtgtcttcgatgcggcgataaaggttgtgctgcagccgcctaaggcgaagaagaagaaaaaggcgcagaggggggcgtgctccattttgtgatctaataatgatcagtagacaaaagaaacaagggcgaaggtgccatggttctattatcgccgcgtcttgcttcagcgaaacagcaatggatgatcccaccccctcccccccctagattttactggcggctgcagcgagtcgaggcattcgagagcgatatgtttgtttcatttccctccttcccgccttgtgattatctggtgtgtgtgactgacgaggtcgtggcaatttaggtaactcgcttagaaggtatttcccccgtgtttgagcccccacccccaccaaaaaaaagaaggtatcatgctatctctgttccataagtagacatgatgtaatcgtactaagtgtttatttttattttttttacttatttcacttcaatcaatggaaaattatgcttcccaattatatggtgggtcatggcagtccccctccctccttgtttgcctgtcaagttctcagtgtctttgtggcaaatggagcatgcatattgattta

SEQ ID NO: 19991 - DNA, 4067 bp, Zea Mays
cacggcccctcccctgccccttccgctcccgcaacgggtgtgcctccgttccggccccgcccgaccttctctcacctctccagcgctcgcctcccgatcctcctgcagtcccacctccttcgccgccttctcatcgcttccaaaatcgcaaagccggatcgcggggacatggacccggacgacgagtccgcggcgcagcggaaagccgccgacttgcacctgccgcgcgtcacggagcctgcctccgcgcccgcacgcaccttctgcgccgcgcagcgcgtgctcagctacggtgacggccctgtcgcctccgcctcggcgcagcgctgcgcgtcgttcccgcagcgccacgggcacgggcacggccacggcgaggcggcgctcgcccctgctgcgtccttcgccgcctgggtcgacggcggcccgacgccgccttcggcggtggcagcggcactggagcgggccatgtcgcagtacgacggcgcgggcgacgcgctgccggagttcgtcggcgccggcgggggcgagggcatcttccgcgtgccgctccgcgcggcggtgcacccggcccgcccgccgccgctcgaggtgcgtccccacccgctgcgggagacgcaggtgggcgccttcctgcggacgctggtgtgcgacccgcggcggcggaagctgtgggccggcgccgagtccggggtccgggtgtggtgcctcgacgaggtgttccgcgggtggtggccaggcgccgggccgcggcgccgcggcgacgaggaggccgcgcccttcagggactccgtgccggtcccgcccgcgctctgcgccgcggtcgacagcgccaacgggctggtgtggacgggacacagggagggcaggatcagggcgtggcgcgtggaccacgccgcgcccgccggaggagaccccaccggcagcgcggccatgttcaaggaggccttcgcgtggcaggcgttcagccgcacgccggtgctcgccatcgtcgtcacgccgtacggtgaaatttggtcaggatcggaaggaggtgcgataaaggcatggccttgggaagcccttgctaagtgcctctcatctacaccagaagaaattcatgaggctgcctcgttggttgaaaaatcctatatcgaccttaggaaccatgctacagttggtaacatgtgctctttgcctactgctgatgtgaaacacatgctcgcagaccactgccgattgaaagtttggagtgtaactagcatgacatttgctctttgggatgctaagactagggagcttttaaaagtatttggcatcgatggccaagtcgacttagctcgtcctgaggccccagtaatgccggaacaattcatagaggaagagattaaagcaaaacccacaaaaaaggagaaactgcaaggttctttaagtttctttcggaaatctaggaatgccttgatgggcgcagctgatgctgtacgcagagttgcaacaaaagggacatttgtggaagataatcggcgaaccgaagcggtggctcaagcaatgaatgggactatttggtctggttgtacagatggttcaattattgtgtgggatggaaatgggaatagactgcaagaatttcattaccatagctcttctgttcaatgcatagaggcactcggagagaggatctgggtgggctatgcaagtggtactattcaagttatggatgttgaaggtaaccttcaggcaggatggattggtcatagctgcccagtcataagcatggcagtcggcgattcttacattttttctttggcacatcatggtggcattcgaggatggtctctaagttcccctagccctcttgatgatattctacgctatgaattggctagcagggagctgtcatacacaaggctagagaaccttaaaatactggttgggacttggaatgttgcacaagagaaagcttgtcctgaagcgctaaagtcatggttgggtggtgcatttttcgatgttgggttggtggtggttggtttgcaagaggtcgagatgggtgctggagttcttgccatggcagcagccaaagaaagtgtaggacttgagggcagtaccaatgggcaatggtggatagacagtattggcaaaacacttgatgaggggatatccttccacagggttggttcaaggcagttggcaggattacttattgctgcatgggcaaggaatgaccttaagccacatgttggtgatgttgatgctgctgcagtgccatgtggctttggacgtgctattggcaacaagggtggtgtaggattaagaataagagtctttgatcgcaggatatgttttgtaaacaatcattttgctgcacaccaagaaaatgttagccgccgtaatgctgattttgaccatatttatcggacaatgactttcaacaaaccccatggatctacagcttctgctacatctgtccaattgcataaagcagtgagtgctaatgaaaaccaagccgatgaagataggcctgagctggcagaagctgacatggttgtctttcttggtgatttcaactaccgacttgatggcatcacctatgatgaagcaagggatatggtctctcagaggagctttgactggcttagagaaagggaccaacttcgagcggaaatggaggcaggaaatgtgtttcaaggaatgcgtgaaggtcgaatcaaatttcctccgacctacaaattccaacgacaccagatgggtctctcagggtacgattcaggcgagaagaagagaatacctgcttggtgcgatagaatactatatcgtgatagccgttctgtatcaatgcctgaatgctcattagagtgtcctgttgtcgctgcaattacagcgtacgaagcttgcatggatgtcacagatagtgatcataaaccagtgagatgtacatttagcgttgatattgcgagagtagacgagctgataagaaggcaagagtatggaaaaatagtcgagtctaacaaaagggtacactctttgcttcgggagttgcattttgttccggacactatcgtcagcacaaacaacattatattggaaaaccaagaagatgtcatcctccgaataactaataactgcgaaactagtaaggctgcatttgaaatcctgtgtgaaggccaatcaatcagaaagcaagatggaactaaatctgagccagtcataagggcatcctttggctttccactttggcttgaggtccagccatcatccggcctcatcggaccaggagacacaacggaagtcgccgtgcaccacgaagacttcttcacgcaagaagagttcgtcgacggggtgcagcagagctggtggtgcgagaccaccagagacatagaggtcgtcctgtcggtgaacgtcacgggcgtcgcctcgaccgaggccgccacgcacaggatcaccgtccggcactgctgcccggcgcctccagccccgccgtccgctaacccacgcggccccattaccgactcacctagcgacgctgtgccaggtcccaagagtagccagtcgaatcacttgctgcgttctgacttcgcaaacttcggcagctccgaggtgcgcgacctgtgcggcgtgcggaagcggaacctgtagagacgagcagctcagttttgttttgcctggtgctgtggtttttttgctttctgtccgagtgtttagccggtggagtcttggatttcttgcctaagcttgggggtgggggtggggagagaagaagtggttctgctcttcatcttgttctgtacatatgcgtccctgacctctcacgtctcaccgtcctttgcatatcagatcaaaaagggaaaagaaaaaagtgtgtgtgtgcagttgttgcaaacatttttctttttacattcttacgttctagatgtggcattgaaattatgtggttagaaggtggagtacataattgtgtgtgtacttataatagaggtttacttcattgaatcaagctagtgtgaattatacacagaggcagtacatttaacttacagggcaattctcttggattaatgaggcagtgatcttttgtgcagaagaacctataccca

SEQ ID NO: 19992 - DNA, 2135 bp, Zea Mays
agcagccagccatcctccacctccactgctctccatttgatcatttggatggatgtctttgctggtttgatctgcgcaccaaagatgcacttttgaccatggaggcagcaaataaaccaatttcttcaatttgctttaaaccaggaaatgaagattttgtgtatatctctgctggaaatgaaatattgtcctttgatgttcgtatgggaactcaatcaaagccattagagacatataactacaatagagatgaaatcaatcagattgctgtcagctctaaaggttttctcgctgctgcagatgatagtggggatgttaagattgtcaataccattcagaaatgcctgtataaaagattaagggaagcccacacaagtatttgcagcagcgtgcaattcattccttggagaccttggacagcaattactgggggccttgactcaaagctcgctgcatgggatttctccaaaggacgaacactgttttctattgattatggatcacctgaattgcaaaacggcagttcttccggtagtgcagggcaatgtttcaaccctgcttttgttcattcagtagcagtttctgaagagggtattttgggagggctctacaaggtttgtgctgttgcaaggggggatggtgctgttgatgtggttgatcttgagtatgaactggcccctgcgaaatcgaagggacctcctcgggcagctattttgacaacgagatcaaaaggcgctgaacttggagatgggagctgcaatcaaagtcgagcgaaaagaatccatcttgactacaccatgggcggccatactgcagctgtgtcttgtgtagcattttcagcatttggtgagaaggggaagttcctcatttcaggtggcaatgatgcatcagtgaagctgtgggattggtcgaaaggattttactctgaaacaaacagcaaagttgatttggttttggatattgatgtaaagaaaaagtctgagactctcagtggctgcaaactcttgttgtacccattggaacaggaggaagaagaggggagttcaaagcttgcctctttaccagcaatagctaagaaagttttatcttacgaggagggtatttatgcaaaactttccaggaagtggatagaagaaggcctcagaaccgtatccattggaagacaggaaccagggggttttgctgctgttctttggaggagaagagaaatgggaggcttgctcttgccgcatcaccgaacctttccaaattctttgcaagcttccatcccgggacctctctctcttcacaaaggcgaccgcaaaaaccttcattactttgcacctgatgtgcacctcttctgttccctgcggcaaggctttccacgctcatcttggtcggccgtcatcagatcagaagccagcggcaacgcggtggcgtcgccaggcacggtcatcaagcgtagcaaggaggagctcatcaccttcttcagagacatacagacatccattgccgagtgctcgcgtaaagcttccaagaggacgaggaagcagccgcctgatctgttccaagaggtccgcaggagggaggaacagtcacacggtggaggagatagcggcaccgacgacgtttcagagggaccgaggaaagtgaagagtcttgaggacatgaacgtggctggattgagagagttggcgagggccagaaggatgaggggttactccaagcttaagaagggcgagctcattgatcggttgagaggggctactacgtaataaactaccatgatgcagagcagcttcgcagttaatagggacacatgttcttttcgaacgtatgatgagattaccgatcaaaaaattgtatgatgatgagattaccgactttccaaacgatctagtcagttcattgataagaactagaacaatgtgtgtagttattatactatagaaccggtggagctgtattgttgtactacgccgaaacttttgtgtaggcatggcaatctcctgttgttacgtaagttactttgttatgtacggaattagtttctctaaatctaccatggattgtgtatttctacaacatctgtttggaatttgatgtacattctaactaggtggcaattggcaaataaagaagtttaaaatggccta

SEQ ID NO: 19993 - DNA, 254 bp, Zea Mays
gcgagattcggccgcgcatgggctggttgtctggcaccgatgccgacgagtcggcgacctacaccacccagcgctcgcgagctcccgccccgacgccggacatgcgcaccccatgctgcgtagaccctgcacgatccgatgtgctctcctcagtagaaagtagaaaggggaggaagaaaaaggaagcggtggggtctttttcccattttccctctgatattatcatgtgcggcccatcacagagggtaactatg

SEQ ID NO: 19994 - DNA, 707 bp, Zea Mays
gaaaccagctggattttctttccacttcggtgtgctggtcgacgtggtccttctctcctctcgtctccacagtccacacacaccgtgtgcggcggtagctgctgctgcccgtgcctaccgaagaagacaagtccaacactgttgttctgttccgtgattgcggaatttgcttcaccacaccttcatcagagagccgagacgacacgctcgagacccagcaaggcaagaagaacacgagagagacagcaggcaccaggcagggatcaatcatccgtccatggagaacctaaaggagggagggaagaagttcctgagctacttccggtgttgtatcaaggcctgaagaggtgctgctctagtgcctgcagtccctgtgtttttttttcgcagcagaacacttgtgagcaatcaggcctcggttttgttaagtaccccgtgtccaaaaacgtgtaatatatttgtccttatggatcagtcgttgggcctgtatgaagaacagaccagtttatggggtaagcaacgttctttttgtacacatacatcaccatcgatttgtccttgatacgatcaaggggcatggttcgaatgaattggttttgtaattatgatgggaaaatacgtacggaaagcacaaatgactcctggcacctttttctataggagcacacaattttttatatatagaagtgtggagacttctcagcgaa

SEQ ID NO: 19995 - DNA, 757 bp, Zea Mays
cgtgtagtagttttaaattggtgagtagtccttagaatttatgtgccatgcccccgcacccctcgtgtccggagacaccgaagtctgcccctgcccagcacgcccgtctcccgagccccctacccccacatgctcctgctcccaaccagtcgtacccccaccgaccatgcgtacgcgttgagtagatccagagcagtggggctgggaagtgcccgaggtgagatcaggcgaggtgatcaggtccgcttcctcctcttcctccgttggcttctacacgctccaggacgaggaggagtagggtgatgagggccgcgtccttgaggcatgggagcacgcatacgccgccctaggccaggtgaccagcttttggccgggcccattgctggcgacgagaatccaataggtatgcccaccccttttcttatcttcctacaaccgagtgcccaaaccctaactgaagttatttggctacatgtatttcgatccgatgtaatgctaagtttttatacacatgtaatcttcctgcaaccgagcacccaaacccaaattgaagctatttgtcccattggcgatggggttcgtaaatctggcctttggcagaaaactcaggaaattatttgtggtcttggtcctaatccatctagcgatcttctttctaggcttgtttatggttgtactaaaatcactgttattggtatgtgttgtacgaccatgagcctgcttagttaatatgtctgcacaacgattattgcttttc

SEQ ID NO: 19996 - DNA, 1516 bp, Zea Mays
gttccgtatacataatttggttccaaatggaataacccaatgcagcagtagccgtctgcctcctcgctttccctttcgtccgtacgccgccgcctcgcaccgccgacagtcctcagtccagaactccagatcgagcctccctctccccagatcgggtcctaggctacagcagccgccgcatccgtcaccttcacaccgcgtgcgtgctctctctccccctccccctctccgtgcgacgactgggtgggctaccgccgccctacgcaaggtgccgagaacttcgccgatatctgcgccggagaagagcgcccaccagatcaggcgcttagaaggcgcgctggccggtggatgacgatggcgggtggcgggggactgaaccggtcttcatcgagggggcagctgccgccgcaagagctgcttgacgatctctgcagccggttccttctgaatgtgcccaaggaggagctggagtcgttcgagcggatcctgttcctgctggagcaggcgcactggttctatgaggacaactccgttgagcacaaccccaacctcaagtccctctccttcaaggacttcacttccctcagtaagcccgcctgtgcatggatgcatatgagattatggttggattggtcaccgactccagttcccttgcgttgatatggtgtattggatcgatggtgtgtgcagtgttcaagagctgcactgctctccggccctacatcgcgcacctggatgatatctacaaggacttcaacaactacaagtttcgtgtgcctgtgtccggcgccatcatcctagacgacacttatgagaggtgcttgcttgttaaaggatggaaggctggggccagctggagctttcctcgtggaaagaggaataaagatgaggaagaccacacatgtgctgttagagaagttctagaggaaactgggtgtgatgtttctagactattaaatctggatgattacattgaagtttcaattggacaacaaagggttcggctctacatcataacaggggttaaaagagacactgtgtttgcacctcaaaccaagaaggaaattagtgaaatttcatggcacagaattgatgacctcttaccagctagtgatgatgcagtatctcgtgcagtgaatggaatgaagctgtacatggttgcgccatttttgacgggtcttaaggcttggattgccacacatcctccaccactgcatcagaaaccagagacatctgctagaggtactgtgtggagggcgaagggttcgtcgagcggcacaaccccagtggagaatcctgttgctaaagcaggatctgacgtgcagcacgctgccgaccgccctggttgcagcttcagaaacttcaggtttgacaccgcaagcatcctgcaggccatggaggcttccttcctacgcacctagaatcctgacgaagcatcaacacctgcacccttgatgtgtatagaccgcggaccagcgctatctgtgttgtcaatctgtctttgtttcaaaaaaag

SEQ ID NO: 19997 - DNA, 2317 bp, Zea Mays
cctcgcccccttgtactgctcgccacagcgcggaatctcacctctcttccccgacccgagagagctcggtcggacaaacccaccacccacaccggccggccgggagagccacgaagttactgcgcgcgtacgtcgccggtttcctttctcaccgcacgtcgtcgtcatggacacctcgcaccactatcatccatggctcaacttctccctcgcccaccactgtgacctcgaggaggaggagaggggcgcggccgccgagctggccgcgatagccggcgccgcgccgccgccgaagctggaggacttcctcggcggaggcgtcgccaccggtggtccggagcagaggaaggccgtcgactcctttgggcagcgcacgtccatctaccgcggcgtcacacggcaccggtggactggcaggtacgaggcacatctgtgggacaacagctgccgacgcgaagggcagagccgcaagggccgccaagtatatttgggtggctatgataaggaggagaaggctgccagggcgtatgatcttgcagctttgaagtactggggttctagcaccaccaccaactttccggttgctgagtatgagaaggaggtcgaggagatgaagaacatgacgcgacaagagtttgttgcttcccttcgaaggaagagcagtggattctctcggggtgcttccatctaccgaggtgtaaccagacatcaccagcatggacggtggcaggcgaggatcggaagggtggccggtaacaaggacctctaccttgggacgttcagcaccgaggaggaagctgcagaggcctacgacatagcggccatcaagttcagaggcctgaacgccgtcacaaacttcgagatcagccggtacaacgtggagaccataatgagcagcaaccttccagtcgcgagcatgtcgtcgtcggcggcggcggcggcgggtggccggagcagcaaggcgctggagtcccctccgtccggctcgcttgacggcggcggcggcatgccagtcgtcgaagccagcacggcaccgccgctgttcattccggtgaagtacgaccagcagcagcaggagtacctgtcgatgctcgcgttgcagcagcaccaccagcagcaacaagcagggaacctgttgcaggggccgctagtagggttcggcggcctctactcctccggggtgaacctggatttcgccaactcccacggcacggcggctccgtcgtcgatggcccaccactgctacgccaatggcaccgcctccgcctcgcatgagcaccagcaccagatgcagcagggcggcgagaacgagacgcagccgcagccgcagcagagctccagcagctgctcctccctgccattcgccaccccggtcgctttcaatgggtcctatgaaagctccatcacggcggcaggcccctttggatactcctacccaaatgtggcagcctttcagacgccgatctatggaatggaatgattcgggccgcccggtcgtggctgctggtcggcctccgctcgccgctggcgtctcgcatgtgcgaaaagggtggggagaagccatgagaacacgagactgacatgggcgctctcgcacaaaagacataaagcggggggactgaaagatcagaggtaccagtagacagtagtagtatgatggaagagacagtaagcagcgagtagtgtgctgcaggatacactgaccatcgatctgctaacaacaaaatgatcgttgcagctagctatagcatatttgcctttgcccttttgtagctttggtctggtctctctctctctctctctcttttttcagctttgttgctccccagcgtcctgcactgcatgccagctgctttgaagctttctctttctactgacatggttctgcaagtgccatcatagctttagtcagccctgtacaatggatgcaggaacgtcgtctttgaattggatctctgtagctcatctctccccctagctcccccactttgttttcttttttgtgctttcctttctgctgcctctgctagcgttatgtgtactgaacaagttcatcaaacagatatagcacccttgcaactatgaatcaatgtcggtcttatttaatgaaactctcccaaatttaccgccttaacgatacgttcatactacaaccattttgcctccctggaaggtacggtttcccgttctgctgttgatttctcgtttgcagcattctgtatgcctttcctttgcccagcgagaataatattgtatgcgtttgaataccaatgattttgcaaaatctctactattttatcaatagtgaatgtgtcac

SEQ ID NO: 19998 - DNA, 5794 bp, Zea Mays
cgcagttcgcacagctgacagcagtccattcaccgtccgcgcctccggtcaccgcacagtagtgaatccattcgtcgtccgtgcctccgatcaccatacaaccgtgaccgttagcagcaccttgatttttgcgcgtcctccgccactggtggcagcgacgcgcttccgaggaggttagagcgttggctgctatggcgccgcctcgcgtcaccaggaagaaggggaagggcgccggcggcaagaccgacctgcgtcccgaccggaagcagttcaaaaggcaccacaaggaggatgcagccgctgagcagggggatggcaacggagagcggcagcagtcggcagcgccgggttctgcagcgctcctcgccgcagcttctgacgaagctgactttccaagagggggacacagcctcctgagcaaggatgagatggcggaggctcgtgcggaggcggagcaggatttcgagagggaggcgaagaaggggaagggaaaaaggaagaggagtggcggcgagtcgtctggttttggcgtggatgacgacttggggatactcttcggtggggccaccactgggaagctcccacgctttgctaatcgcatcacagtaaagaatatttcaccaaatatgaagctctggggtgttgtaattgaggttaaccagaaagatattgtgttaagtctacctggtggaattagaggctttgttcgctcagaggatgtttgcgacattgctttgcaggaaaatcgtaaggatagtgggaacaatttatgcgcagaagttgttcatgttggtcagcttgttccttgtatagtcctacgagtcgacgatgatagtagagaaggaaaagtaaacaaacgggtttggctatcattgcgattaagcctattgtacaagggacttgccctggatggcttgcaggaaggaatggtacttactgcccaagtcaaaagcatcgaggatcatggttacattcttcattttggagtatcttcctttagcggatttatgcagaaggatgacaaagatgtgaagactgagcgccgacaactgatgcaatgtgttgtgaaggcgattgacaaaactcgggccattgttcacttgagttctgatgaagacttgctttctaaatctactattaaggatctgaaaggcctttctattgatcatttgattcctgggatgatggttaatgcacgtgtccattcatttcttgaaaatggactcatgttatcatttcttacttatttcagtggaacagttgatatttttaatttgttgaattccttcccctctggtaattggaaagatgattacagtaagaataagaaggtaaatgctcgcatcctgttcgttgatccatcaacaagagcagttgggcttacattgaacaaacatttacttcatcttgaagtaccccctattaatctaaaagctggagatatctacgataaatcaaaggtgctgagggtagataaaaaggccggtctctttcttgaaataccttctccaactccatcacctggatttattagtatacgtgatgtgtcagacaaggatgcaaaaaacttggagaagttcaaggaaggcagtagcttacgtgtccgtatacttggagtgcggaatcttgaaggagttgcaataggcaccataaaagacagtgcttttgaagggtctgttttcactcatgatgatgttaaacctggaatgttagtgagagctaaggttgctactgttgagccattcggtgctattgtacagttttcaagtggcgtgaaagcactttgtccgcttcctcacatgtcagagttggaacatgttgttaaaccaccaaagaaatttaaggttggagctgagcttcttttccgtgtgttgggctgcaaatccaagagagttacagtgacatacaagaagtctctggtgaaatcaaaacttgatgtgctttcatcatatgctgatgcaaaaattggtttagtgactcatggatggattactcatattgaaaagcacggttgctttgtaaaattctacaatggagttcaaggttttgttagcagatctgaccttggattagaggctggaactgaagcagaaaatgtttatcatgttggccaagtggtcaaatgtagaattatcaatgtgatccctgcttcaaggaaactaaatgttagttttgtcatatcccataataggattgctccaatagacactccaaagttgggcagtattgtctctggtgttgtggaacggcttactcctgcagctgttgttgttagtgtaaatggcttctccaaggggacaatactgaatgaacatttggcagaccatcatggtcaagctgctcagttgaagaatgtgttgaaacctgggcacgagttcaaccaactcttagttctcgatactgaaggtcaaaatttagttctttcggcaaagcactcacttataaattgtgcaaatgacattccttcagagatatcacagatgcatcctggtgttgtagttcatggttacatctgcaacattattgaagctggttgttttgtccgtttcctcggacatttgactggtttctctcccaaggacaaagcagttgataggtggatagaaaagctttctgatgcgttctatgttggccagtcagttcggagtcatatactcagcgtaaatgcagaaactgctagagtaaaactcgcacttcaacagtcaatgtgctcctcaatggattcttcatttattcagggatactttcttctggatcagaagattgcagcattgaagtactcaagcaatgactgggctcgccattttggcattggtagcttagttgaggcggaggtgggagctatagaagaatatggtattatccttaacttcaaagaccatctggatactgttggtttaatcgagcaccatcaacttggtggcagtagtgtggaagtgggatcttctgtgaagggtcttgttttggatttatctgatggagttgttaacttgtccgtcaaaccagagctaattgacagtgtcagaattgttggaaaaaagaagaaacgccaaagggccgtagttgcagacttggagcttcatgaggaagtgaatgcagtcgtggaaataatcaaagacagctatatggtcctttccatccctgagtacaattatgcaattgggttttcaccactgatggattataactcacaactgcttccccaccaccactatgataatggacaacgcattactgtggttgttggaaatatcccaagttctgactcttctggaagacttatcttactaccaaaagcttcagcacagtattcttccctctctgattctaaaagggctaagaagaaatcaggctacaaaattgggtcacttgttgaagcagagattattgatatcaaaccgcttgagcttctactgaaatttggtggcaatcttcatggaagaatccatattactgagattcttgaagaggattctgctgagcatccctttagtgaactcagaatagggcaaaagcttactgccagaattgtttcagaggctgaaccttctggaaagagtggcaaaaaattcaaatgggaattgtctattaggccatgtatagtcaatggagagtttgctcaaaaagaacaaaatcacaccacaaatgggattgtacgtgcttatgttgtcaaggtggataaggaatgggtctggttaactgtatcaagaaatgttatggctcatttatttttacttgatagttcttccgagcccagcgaactgaaagaattccagcagcgctttagtgttggccaagcagtgaaaggtcgtgttatcagtgtgaaccaggagaaaaggttacttcggttgaaggcacttgataaccaatgcacacaaccgaatatagatgaaacacaagaaccaaagtcctctgtgtttggacaaacaaaacaaggagatatcattggtggacgtgttcaaaaaattctacctggtgttggtgggctcgtcgttcagattggacctcatctccatgggagggttcattatactgaaattgttgactcttgggtgtctgaacccttgtctggattccatgagggccagtttgtgaagtgcaaggtcctgtctgtgagccgctcatcagaaggatcacttcgagttgatctatcactccgttcatcaaacctgatcagagactctaacaactcaagactagatgatctggaaacctgtacctcccggattgagaagatcaaggatctgctccctggaactgagattaagggctatgtgaagaacgtgaattccaaaggatgttttattatgctttctcgaatggttgatgctaggattactctatcaaatttatcagatgaatatgttgaaaatccacagaaggatttccccgttggaatgcttgtacacggaaggatcctgtctacagacccatcatcagggagagttgaggcatcacttaggaagaccactggttcaaaattggaaaagctggatgatattagttatagtgacttgcatgttggggatatcgttgatggccaagttaagcgggtggaatcctttggattattcgttacaattcggagaagtgaattggttggtctgtgccatgtatcagaactttctgatgaacctgtcgttgatattaactcttgctataaagctggtgatatggttaaagccaaaattctgaagattgatgagacgcggcatcgagtatcacttggaatgaagaagtcatactttgattctgatctgactgctgacacaaatgatgatgaaagtgctcttatggacatcagcgttgcccctcagatggttgaatatcataacagaaatttagttcaccgcaaagcagaaccaagggcttctgttctgcctcttcaggtttccttggatgaatcggaaggttccgacctagaggataatattagtaatacatgtcttgaaattgctaatggaactgaagcaaatgctaaaaagagtgataaacagttaaagaaggaagcaagaaaacaaagggaactagaaatcagtgctatggaggaaagggctttgcaggaagatataccacaaactccagatgattttgagaagttagttaggagctccccaaatagtagttttatctggataaagtatatggcaactttgttagatcttgcagatgttgagaaagcacgtgcagtagctgagagggctttaaaaacaataatccccagagaagaagaagagaaactaaatgtttgggtagcatatttcaatctggaaaatgaatacggtagtccaagggaggatgctgtgaaaaaggtattccaaagagccttgcaatattgtgatcccaaaaagctgcacttggctcttcttgcgatgtacgagaggaccgaacagtatgagcttgcagatgaacttctagacagaatgaccaaaaggttcaaaacttcctgcaagatatggttatgccgcattcagtttgctctcaagcaaggcaaggatgttgagtacatcaaagccattgtaaaccgtgcacttctaagtttgccacacagaaagcgcataaaattcctctcacaaactgctattctagaattcaaatgtggggtgcctgaagaaggaagatccagatttgaactaatattgcgggagtacccaaaaagaacagacctttggagtgtttatctagaccaagaaatccgccttggtgacgtagaagttatacgggcattgtttgagagggtgacttgtctgaccctacctccaaaaaagatgcagaaatattaggagcacctaaa

SEQ ID NO: 19999 - DNA, 1583 bp, Zea Mays
tgctcctactgagacattctctgcggctgcaggctgtgcatcagaaagacaggagagggtctgcacctgcacagctaccaagagtgacatccactcatccagcataaaatccctgacccttcgctttcctgagctgcttccaagggaaccagcttggcttctgccctgccgtgtagccatggagccagaaagaggcctgatcgcatatgaagggccgcctccagactcgacggacctgctgtcgagcgcgtggtgcagctcggctatccaagttcttgacacaggaggacacaaggagtgctcgatggccctggtggagcatccggtcatggcgcttggcaacgacaggaacgacgtgttggcaaagagcgaccgtagcttggtggttgacaacagcagcttcagcacggcccagtggaaatatgacgatctgaagtcgtggatatggctgcagaaggcaattcatcccgaactggactatgatctctgcctcaagaagaaatggctcccgcgcaagatgacggcgtggaacgggatctcgctcaagaagtgggtcaaggagcggaagcagaagcgcaaggaggaggcgcgcctgcagcgggccgaggtccacgccgccgtgtccgtggccggcgtggcggccgcgctcgccgccatcgccgccgagaacgccgcgccgcgccgcgcgcccgggatgagggagacggcgctggcgtccgcggccgccctggtcgcggcgcagtgcgccagggtggccgaggccgcgggcgcctcgcgcgaccaggtcgcggcggccgtcgacgccgccagggcctccacggacgacagcagcgtcatcacgctcaccgcggccgccgccacctcactgcgtggcgctgcgacgctgagaggacggcgcagcggcagcggcgggcacggccagaacgagagggcggagcacgcggggccggctctgtctcaggacgacctcgacttcgacttcaaccacgcgaggtccagggcggcgctggccaagggcgacgagatgttcgtcgcgatgccggacgggaagtggaagctccacacggtgtcggcggcgtcgaacaagcgcggcgagatcgtgctgcggatcaagaagacgaacctcgtcatggccttctcccacgcaaaagaaagcgtgatccacgacgtgcagccgtgctccccggagaagccgagcccccacgagggcgcgacatacccagtggaggtctccacgaacaagggcaaggtggagctccgcacggacgactacggcgtctacaagcggtgggttgcgacgctgagccacatgctcgtgatgtccaccgccgtctccgtctccaccaggcacgagccggcgcgccgggactgacccaccggtgcggctcttccctcgaagcaatggaccgaccccacccatcacgacgtaaacgaaaacgttgatctgtgtcgatcccatgtgtatttagtactactactgcccatgaactgtatgagtagcagtatcagcactgcaagctgcaaccaaagattcagatactgtttaaaattctgtaaattcgcatcgttttcctcactttttt

SEQ ID NO: 20000 - DNA, 1048 bp, Zea Mays
tttttcagtgtctggactgcgcgcgctaaaatagataacctcgggatttaatatgcaaatgttcccaagactcaggacctacccgcggaggactgcgggtttaatccgttaaaagctgagagctcttttgcactatttccaggccgaaggggtaaggagagattcgggccgtccgatcaggaatctagggctcaagttagatcgacgcagtacgcgaaccggtattgaatcctggctgacggatcgccatccaacgatccacattttaaatatcagaggtccccgcgatccattcgatcgacatcgaacggacgcgggcgaaacgctacccagatctaatcctacgcgatcagccgccatccgacggtccctgaaaactccacaaagggtacacggtttcctaatctagagcgtaatacgggagatcaacggctcctgtccgtcttcttccccacgcgacggcagtgaacagtggcgttgccagctgccacggcgaaggacgccgacgatgggccacccagtcattccaacggccaaaccccacataaaatagtgctaaacaatgaggggtcaacggcgaacgcgcggggagagttctcatatgtgatggcgcccaacagagttctatcgacgaggaagcacggccacggcgaaatttccagccccggcgatcgattcgcaccggcacagcgccaatccccgacccgggatacagcggacactttccactaccaccagcgtttcaccaattcgcgtttctggcggccgaacgacggtggggaagctcctgcctggtggagaatcggccgcgctcgcacggcactctcacagcgcgcaacagcgaacgccgcccccccggtagccatgcacacacccagcggcccccagagaacgattccgcacgggacgcagtggcagcaccgcttcctccctcccatccgcttgctgggtgcccgcaaaggtgagaagcgccattggcggtattggagatccacggcggatcgacgacgcgcccagagcagtggacgagtacggcagggacgcgcaa

SEQ ID NO: 20001 - DNA, 4157 bp, Zea Mays
gttcgatagtgatttcatcttcctctaccaggcggctccgtggtccgtgctgatcaactgcatcaaggatcgtcgccggcggcgcgctggcagcagttcgcacggcgagatcggattgatcgagatcttctaggcctggacctgcgctagacctcgaagcctcgatcgcaccgcatcttctctctctgctgctggtccgctccgtcgccgccgaccccgccgccagcttccccttccacctaaaaggacgacctctggccgcccttgtcccgccccgacgcctcggtttccactgcataggcgtggtgcggcgatccgtccgggcctagggttgcgagagacactatagggtacgaccctaggagcatccgcctccacgtgggtgaggcggaagagggaggatgacatcgctcagccgtgagctggtcttcctcatcctgcagttcctcgatgaggaaaaattcaaagagacagtccacaagctcgagcaggagtccggattctatttcaacataaagtactttgaggacgaagtcctcaatgggaattgggatgaggtggagcgctaccttggtggattcaccaaggttgacgataaccgctactccatgaagatattctttgagatccggaagcagaagtatctggaggctcttgataagcatgatcggtcaaaggctgttgaaatcttggtcaaggaccttaaggtctttgcatccttcaatgaggagttgttcaaggagatcacacagcttctaaccttggagaattttagggaaaatgagcagctctcgaagtatggtgatacaaaatctgcaagacaaataatgcttgctgagctgaagaagctgattgaagctaatcccttgttccgtgacaaactacaatttcccagcctgaagacttctaggttgcggacacttattaaccagagcttaaactggcagcaccagctttgcaagaaccctagacctaatcctgacatcaagaccctttttgttgatcattcatgtggacaaccgaatggtgcacgtgctccatcaccagcaaacagtccgttacttggatctatgcccaaacctggaggtttccctccattgggtgctcatggaccttttcaacctgcaccaacacctgtcccacctctggctgggtggatgtcaaaccctccagcaataacacatcctgctgtgtctggtggtgccattggatttggcactccaacaaatcctgccgttttgttgaagcatcctagaacacccacaactggtaatcctggtatggattatccatcaggagattctgaccacatttccaagagaactagaccggttggcatgtctgaggagatgaatcttccggtgaacatgctgcctgtgacttatccacagagccataattaccaacaagatgatttccacaaagctgttgcacggaccttgagccaaggatcagcacctatgagcatggatttccatccacttcaacaaactcttcttcttgttggtaccaatgttggcgacattggattgtgggatgttggtaccaaagagagactcgttgtaagaaacttcaaagtctgggaccttggtaaatgtacaatgaccctacaggcagcactggttaaggacccagctgtgtcagttaatcgcataatatggagtcctgatggaaccttgtttggtgttgcttattcaaggcatattgtacagatttattcctataacggtggcgatgatattagacaacacttggagattgatgcacatgttggtggtgtaaatgacatagcatttgctcatccaaataagcagctatgtataattacatgtggagatgataagacaattaaggtatgggaggccactagtggagctaagcaatttacctttgaaggacatgaagctcctgtttattctgtgtgtccacattacaaggaaaatattcagttcatcttctcaactgctttagatgggaagatcaaggcatggctatatgataatttgggatctagagttgactatgatgcaccaggtcattggtgcactacaatggcatatagtgcagatggttcaaggttattttcatgtgggactagcaaggatggtgaatcacatctagtagaatggaatgaaagtgaaggagcagtgaagagaacatatcagggattccgtaagcgatctatgggtgttgtgcaattcgataccacccggaacaggtttttggccgcgggggacgaattcatgattaagatatgggacatggacagcacgggtcttctgactaccattgatgctgatggtggcttaactgcaagtccacggatacgcttcaacaaggagggaactctattggctgtctccactgctgacaatggtatcaagatcttagcaaatgctgatggacttcggttgctgcgcacactggaaaatcgttcttttgatgcttctcgtaatgcatctgaggctgtaacaaagcctctaataaatcccttgactgctgcggcaaatgcagctgcagcaagcagttcaggagctggtgctccgtcagctataactgcaatgaatggtgatagcagaagtttggttgatgtaaaacctagaatagctgatgagtcacttgacaagtcaaaggtatggaagcttatggagataactgagtcaagtcagtgcagatcaatcaaactggcggataacatgagaacaagcaagatttcgagattgatttacacaaactctggtcttgctatcttggctttaacttcaagcgctgttcatctactctggaaatggccacgcagtgatcggaattctggaaaggcaaccgcaagtgtatctcccactctatggcaaccaccaagtggcatcttgatgactaatgacacgactgacaataatcctgaagaagctgttcactgctttgctttgtcgaagaatgattcatatgtcatgtctgcttctggaggaaaaatctctctgttcaacatgatgactttcaagacaatgacaacgtttatgcctgcaccgccggcagcaacttttcttgcatttcatccccaagataacaacataattgcaattggaatggatgactcaaccatccaaatctataatgtccgaattgatgaggtcaaaagcaagctcagaggtcactctaagagaatcacaggtcttgccttttcaaatgtgctaaatgttttagtctcgtcaggagctgatgcccagttatgtgtttggaacacggatggatgggagaagcaaaagaacagatttttgcagataccatcaggtcgccaatccaatatcttggacactcgtgttcagttccaccaagatcaaatgcactttcttgttgtgcatgaaacccagattgccatctatgaaactacaaaactagaaccagtgaagcagtggcctgttcgagagaattcacctccaatcacacatgccacattctcgtgtgatagtcaactgatctatgcaagctttatggatgccactgttggcatatttaatgggtcgagtttgagacttcaatgtcggattcttccagcttcgtatcttcctccaaatatcagtccgagcgttcatcctgttgtggttgcggcacacccttcggaagcaagccagtttgctctagggctgactgatggtggtgtttttgtgttggaacctttggaatcggagagaaaatggggaaatcctccaccagtagagaatgggtctgctagcaacttgtccacaccgcctcctaatggagcttcaagttctgaccaaccagaaagatgattaagaagttggaactggtagatttttcgtggcacgagtctaaccaagaagggcttcaaagggtggtgcgactaaccttggcagataggttccaagggagccggacaatgcgctcaataaaaataagttcaacagaagtttgtccgttgcttgtataaatatttgtattgactatcgagtgaggagtcctagtatttcatttttgctttgtttgcggtgctgtgaaaaggatcagtagataagctgtagtacaacaactatcagactggctgtacttacctatatttatgactattagttaatgtatgttgtttcatttgcctttttggctccgttcagccgtttttgctatcataaagtgctgtttct

SEQ ID NO: 20002 - DNA, 2168 bp, Zea Mays
ataaaagccgcgccccggcccagccctcgcctcgccgttcaactcgatcacttctttcccttccacacaacacacagctcactcaactcccctcccgcttcgtcagctcatcatcataaaccaaacagagagctctctctcggtcgttccattccaggatgctgcttaacccggcgtccatgctggacaccatccggcagcacctcctggaggagccaccagcggcggccgacgagagcttcgggatcctggtggcggaccagtggagcgactcgctcccgttccgcaccgacgacgccgacgacatggtggtgttcggggcgctgcaggacgccttcgcctacggctggctgcccgacggctccttcgcgcacgtgaagcccgagccggtgcggtcccccgactcctactactcctcctcctacgacggctcctgcttcggcggcctcccgtacccggagcagccactgacgcccggcagcgagggcgaggcggccgccacgcccagccccaggagggaggaggccgcggcggccgtggccaggggcaagcactacaggggcgtcaggcagcgcccgtggggcaagttcgcggcggagatcagggacccggccaagaacggcgcgcgcgtctggctcggcacctacgacaccgccgaggacgccgcgctcgcctacgaccgcgccgcctaccgcatgcgcggctcgcgcgcgctcctcaacttcccgctccgcatcggctccgagatcgccgccgcggccgccggggacaagcggccgttggcgttgcccgagcccgccacctcctcggactcgtcctcgtcctccaccggcggctcgcccaagaggcggaagcgaggcgaggccgccgccgccaacatggccatggcgctggtgcccccgccttcccagcttagccggccggcccagccatggttccctgccgcgccggtcgagcaggcggcgatgccgccgcgcgtggagcagctcgtcatctagctagccccgcgcgttaaaccgggctcgcggcgagacaatgaggcgtgcaagtgcaacgacgggtgcgccggtggaaagctgaggaaaacaggacgatgccctgcgctgcacttgcgcgaatgcgacggcgcgcggaatgcgataagctcgggagcaattgggggtccggatgccgctgttgctccgtgcaactcgcgcaagtggaaagaagctgtctgtgtgtagattcatccaagtgtcttgtctgcaaacggattttcggtatatgcgtccttgtcacctgtcagggtggtgtggtgtgagggcttgggcttgtgctgctgataagtttggagatctgtacaaagaaaaaacgtagggagaagatgagatcaagaacagtcgttgaaaaacagaaaagaaccacaaatgggagcgccgtggtctgataaatatcctgcaggctaaaccaggcgcgcaagtcaacagaacaacgacctgaactcgtggcatggaatcggaatcgaaatcgaaatcaccaccctcaaaccaaaactgcggaggcgaagctagcactaaacaaacgctgctgacgtggcaggaaggtggcttgctcacggcagcagtatcgagacgagagaaaaaagaactgtcaagtgtcgatagttcggtggagcaagtggcgcgatggtatcagtgtcgccgtcgtgctttgcggtggtactgaagacgagagggaggagacagatccgtattgtggctcaccatgcaacgagtgacggcaagaggcgtctaggtggcaggatggagccgccattggggcgccggagcataggatttgaggatggcttggagaaggcaaagagcacgtgaacgccagcaagagattctaactgccgcaaccattgtccagatcattgatgaggaggaagaacgtcctcgtcgtctctctgtaattgggagggcgacgctagctgcacagggctattggttgggggctacgttcattgtcatttatcatgcagtttctgctaagaacgactagtcagggttcgctacagtgcagaaggtaactgccttgcggatgcttgcattgcatattggagaggctacaaacgggcttgatgatttattttcgtattgggggagagagtcgtccttacgagtgtggatcacttcactagaactata

SEQ ID NO: 20003 - DNA, 4196 bp, Zea Mays
gtgatttttaggtaacccatgcccgcgtccgagaccgagagacaaggccaaaatcatcgctgcgccgccagtggacgcgttcgactccggccgccgcccctgctcctcctgcccacccgcaccggccattgccctcgcctgctctgccacccgcaccttccaccgcccccgcgtgctcctccgcaggtctggccgttgcacccacctgctccccaccaccgccgccccacccacttatccaccgttgccggtcgtcgccccacctgctcccccactgacaccggtcgagtttctagaaccttccagacctccagttcccgacctcggcgccatggacctggacccagaggggatcttccgcgacgacagcgatgaagacgaagacagtgtccaggagagggaggcgaacaaggagatggttgtctaccttgtcgacgcctcgcccaaaatgttcacccctgccaccacccaggacaatgaaaagcaggagacacatttccataccattgttaactgcatcacagagtctctgaagacacaaattattggtagatcttatgatgaagtcgcaatatgtttctttaacactaaagagaagaagaatttacaggactcagccggtgtttatgtttataatgtcggagacagagagcaacttgatagacctactgcaaaactcatcaaggatttttctttgatagaagattcttttatgagcaccattggaagtcgatatggaataacagctggatctcgggagaataccctgtataatgctctttgggttgctcaggcgctgttgcgcaagggatctgtgaagaccgtgagtaaacgaattcttatattcaccaatgaagatgatccttttggtactattacaggagcagtgaaaactgatatgattaggacaacacttcaacgtgcaaaggatgcacaagatcttggcctgtctattgaacttcttccactgagcccgcctgatgaccagttcaacatgtccctgttttatgcagatttgattggtctggatggagatgagatgaccgaatatttgccatctgctggtgataagctagaggatatgactaatcaactgagaaaacggataatgaagaagcgcagaatcaaaactctttcatttgcgattaccaatgatgtgtgcatagaagtcaatacatatgcgctggtccgtcctactactacagggacaatcacatggcttgattcactaagtaacctcccattaaaggttgagaggtctttcatatgcaatgatactggggctctacttcaggatgcacagacacgtttccagatgtacaatgacacaattgtcaaattttctgtacgtgaactctctgaggttaaaagggttgcaagccatcatcttcgccttataggtttcaagccattggattgcttgaaagattaccataacttaagaccatcgacatttatttatccgagtgatgagcgtatatttggaagcacctgtgttttcgttgctttacatagctcaatgttacgtcttggaaggtttgcacttgcattttatgggaatccaactcgaccacaactcatagcccttgttgctcaagaagaggttacttcgtctggtcgtcagtttgaaccgcctggcatgcacatgatctatcttccatactccgatgatattagatatcctgaagaagttcatgtgacttctgatgatgcaccgcgtgcaacagatgaacaaatcaagaaagcttcgaacatattcaaacgtattgatctgataaatttctctgcatgccaatttgctaacccagctttgcaaagacactatgggatcttggaggccttagctttaggcgaagatgagatgcctgatataaaggatgagaccctgcctgacgaagaaggcttgtctaagccaggggtagccaatgctattgaggaattcaagacttcagtctatggtgaaaattatgaccaagaggaggcagaagcggcagcagggaaagcttcccgtggtaatgcttcaaaaaagcggaaggaggtcactgatgcagctgcgcagataagtgctgcttatgattgggcagaacttgcagacaatggaaaactgaaggaaatgaccacggtggaattgagatcctacctgaccgcgcatgatctcccggtttctggtaagaaagatgtacttatcagcaggatcttgactcacctgggtaagtgaagccgggtatccgaactgttagtttcctgagacccgactgacatctgtagtgctgtctcgcggatccttgtggaccgtaatcctcccccgtgcaggctacgtgccgattttttgtatagcgacaggacagcaccagttgccaatgtaacctgtgttaagtttcgtcttgtggtatcatctgcttgtcattgtcaacatgaaacataatgtaattctggatacttagacccacaatatggagcataactgcataaggtatgttaaagcataggccctctttagcatggctacttgctgtttcaggttttatgctcagggtactgttgcatgctgcgaaatggctttggcttcaaatgagcttggagacaggagaagctgatgaagtcatgtgttgggcaatccttgtcatctatagggtgacttcctgggctttaggtactcgctttcgcttccaaccagcgcgtcctcagccagcgctggaggccgcccagccgcgcctgcgaccgcagaccgcgcgtcctcactcagccagcgctggagatctcctgtccgcccagccgcgcctgcgacagtgcgaccgccctcctgcccccagtggcgagaagggcatggacattgactgtcacacggtagagttcgatgatgtccggtatcatatccagttttctatgaggaatccaaaggtaatggtgttgtcagttgctttgcctctgccacctcctgaagcgattctgtatgatgggctaccactaggtgccattgaagctataaaagcagcatatgggccagttgtgcagattcttgatcctccaaaggacgggtttgatctcacaatgaagataaatttgacaaaacttccgctagatgaagagcaaaggaatactatcttgacacaaattgcatctattagagaggttgtgttgggtgcaccactgaagctcctgctgaaacatttagcctcaaagacagttgcacctaatgttaacaaccttgttgctcttgttcaccgccctaatgaatcatttttccttgctccccaggcagataaagttactattgtgtatccaatgagattccaggactccattgatattgttttagcaacttccttcctgcaggaatttgtggaggcaagacgaacagctgcacttaataatgttccttcttgtatgtggtctccggtaccacctcttgagttaaaaggagtatctgctgatgcactaaatgcaaatgctggctttgttactttcgttgtttaccctcggcatgttgagggtaaaaagctagatagaacagtttggaatttgttgacatttcatgcttatgtaagctatcatgtaaagtgttctgaaggattcatgcataccaggatgaggcgcagggttgagtcgctgatccaggcgttggaccgggcgaagtctgatgctgagaagttgaagaagttggtacacggtggatctttcaaaagactgagcctgaagaacgagggggactcgcgtttctgaagggaattggcaaatgttgttgttttccatttggctaatgacttctgttgtgggaagcttacttccgttcagttttgggagcgaaggctcggaaccggttaaatccatgccattgaattttaatgtaaattcgcgttgcttttacatatttactagcctgaaatctctcggcgtatcagttccatgacacatcgcctttgcaaccggagagcctgctgcctgcatcttggtgcaagtagtttgtttttgccatgagatgtctgagtctgatcttttttggcattaataaatgtgttgttcttggatcacatgatgtagtagggagttgaggcttggttgaatcacatgaccactcacggtcacggtacagcatcggctgagttatgtcgagcagccgcattcatttttttataagcttgatggtgtattgttttataagcttcggctgagttacgctcgaaccacggtcctcc

SEQ ID NO: 20004 - DNA, 336 bp, Zea Mays
acgtctgttgctctctaccggagacggatcagcgtgtcaactgacagccctatgtccttcgccgctttctcatggccgtttcgccgccggggcggggctggcagcagtggcgcaagcaagtccgccgccacggcagaggaggacgaggagctgggcgtgaccccgcagctcctcgacttcctccggacgctctcgcccgacgccttcaaggccgccgcactccagctccaaggaggctccacggaggcggccgccggcgacctcaccagctggcaggagcggcacgccgtgctcgtgctatccaaagctaagcctgagctgcacctttgtgcttcg

SEQ ID NO: 20005 - DNA, 1605 bp, Zea Mays
gagagaagagagagaggaagggaaaaaaaaatatctgctgcctccttgcggcgctttgccattaatttagtcagcatcacatcgcaatcacaagactcctatacccaaacccacgccccccaccccctattattctatatatataatacacacactagtgtagtagtgtggagtacttcaattggcgttggccgaagaagaggagaagcgaagcaagcaggcttcgagaacaagggggagggggaggaccaagcgaaagggggaactagagcaagatgggcggcgaactgctgcttgcgctcctcctcgtctctgctgctgccgcccctcaggtacttggagttggcaatggagacaatcacatgagaatcatccaggaggacatcattgagacagtcaacaaccatcccagtgctgggtggacagcctcacgtaatccttacttttcaaactataccattgcgcaatttaagcacatacttggagtgaaaccagcaccacagaatgcactaagcaatgttcctgtcaaaacttattcaagatcactggaacttccaaaagagtttgacgctagatctgcatggtcccgttgcagcacaattgggaacatacttgatcaaggtcactgtggctcttgttgggcttttggtgctgtggagtgcctccaggaccgtttttgcattcacctcaacatgagcattttactttcagtcaatgacctactggcatgctgcggttttatgtgcggcgatgggtgtgatggaggctatcctatagaggcatggcgctactttgttcaaaatggtgttgttacggatgagtgtgatccatacttcgacccggtcggttgcaagcatcctggatgcgaacctgcttatcctacaccaaagtgtgaaaagaaatgcaaggagcagaaccaagtttggcaggaaaagaagcatttcagcattgatgcgtacagaataaattcagatccacatgacataatggcagaggtctacaaaaatggtcctgtagaagttgctttcacagtttacgaggatttcgcacactacaaatctggagtgtacaagcacatcaccggtggcattatgggtggccatgccgtcaagttgattggatggggaaccagtgatgctggagaggattactggcttctggcaaatcagtggaatagaggctggggcgatgatggatacttcaagatcataaggggcaaaaatgaatgtggcatcgaggagggcgttgttgctggaatgccatcgacaaagaatatggttccaaacttcggcggtgccgttggaagagctatagtttaattggttacgtttgcatggcctcaaatgctgttggaattaactaaagtaattttaaaatgcaattgttaaatggccacgatggtgtatgtattttgtacactagctcattccaaaggtcgttatgttgctgatgccacatcactttggtcaagtggaataatattaataagaactagaatttcgattcgaatgttacggtttcaagtccgaccagatttgtgctctgatgatctccggccaccaagcctggttaaaatatctgttgtaaaatgaaatcaagttgagg

SEQ ID NO: 20006 - DNA, 867 bp, Zea Mays
atttgattacttaatactctggccattctaaagtgccagggaacgtgaaaggatagaggaacaggaaagacgtgaaagggaggctgtagaggctgagaaaaagcgtaaagaagaggaggaagctgtagcaagggcagcccaagaagcagctgaaaaggaagctgctcttgcaaggaggaggcaagagaaggccatggctcttggagctgaacctgagaaaggaccaggtgttactcgggttctcataagattcccaacgggagagcgcaaagagcggagattccatagttctgcaaccgtcacttccctctatgactacgtcgattctttagactgcatgaaagcagagaattacagcctagtttcaaatttcccacgggtcacatatggtccagagaagcactccctgacactggaggaggcaggcttgcatccgcaggcgagcctgtttatcgagatagagcaatgatgctatagaaaaaccggaacttggaagtataggtgctcctttttccgaatttgtccagtaacagttaaggatttccagatgtattacacaccacaggtgcatgcttgttcatgaaataaaattcgccctcaccaagatcagttgactgcagccaggtcttgtgaattgtgattcgtttggaaagcctgccttgattctgtcagccaaagcatgacgacctaatttgcctatccttccgtaagacatcctcaagaaaggaattctccctggcttcttttagcaactaagtgactccagggtaaaatggattcgcaagttcagttggattcaatttgggtaggcatatcaagcttccatacattaagaaaactactactttttctctatatatatataga

SEQ ID NO: 20007 - DNA, 1673 bp, Zea Mays
gatacgaagcgaggactacctggtctcgaacatcatgtacctagactctcctgccggtgtggggatgtcgtactcgctgaacagatcggattatgtaacaggtgacctgaaaaccgcagctgacgcccacaaattcctgtcgaagtggttcgagttgtaccccgagtttcagttgaacccgttctacatctcgggggagtcgtacgcaggggtctacatccccacgatcactgacgaagttgttaaaggcattgagagaggtgtgaagccaagaatcaatttcaagggctatctgattggcaatccgttaactgacgtggactacgatttcaattccttcgtgccatttgcgcatgggatgggcctcatctcaaccgacatgtatgaggatgtcaaagcgtcctgccgcggcacattcttcggcgccgtggatgatctgtgccaggagaagatcgacagagtgcgctgggaactgaaggacctgaacaagtacaacatccttgcgccttgctaccatcatcccgaaatccaagaggtagagttcagcaacagcagcttgccgcggagtttcagaaggctaggagagacggacaggccgtttccagtgaggaagcggatgtcggggcgttcttggccgctccgtcttgctctcaaggacggccacgtccccatgtggccaggccttagtggcagatcacttccctgcacgagtgatgaagtcgctacggcgtggctggacgacgaagatgttagagctgcgattcatgccaaaccaaaaagcttaattggatcatgggaactgtacactgcaaggatagacttcactcatgatacagggacgatggtgagctaccacaagaagtttacggctttgggatatcgcgtgctaatctacagcggagaccatgacctgtgtattccttaccctggtaccgaagcgtgggtgaaatcaataggctaccaagttactgatagatggcggccatggtacttcggagaccaagttgccggatatacagaaggatacggtcacaatattaccttcctcactataaagggagccggacatgctgtgcccgagtacaagcccaaggaggctctcgcgttctacagtcgctggctggcaggagagaagttctaagaagaccaggaccattacagatttcacaagccttcagttattcgtcgctcatcggacaattactgtgtgcatggactcagagtagatgtatgcagatcagatccgttcactcggctgtgtaagcctctgtatacagctgaagagatttttaacgtgggatcttcacctctactcaattaaccatgggtcagatccattggcaatattattctactattatataaagaataatttaaatatacagaaataaatactcacaagatatcaattaaccatgggttagtgacaaaagaggcatggtcacagcataaatatggatggatgaaagtagtgttagaagcagagagcgagaggggtggggtcaagagtgatgtaaatgggattatctttcactgaacgtgtgtgcatacaaacataaagtgacgaaccaatcaatgtgtcatctagaactaatcggatggtggaaccagcccaccagacccggaacatgtgtgattaacccatttattggattcgtgcacgccgatttggt

SEQ ID NO: 20008 - DNA, 1590 bp, Zea Mays
tctgggttcagatagtagttaatttgacaaagtatataaaagggataatgaatcaacttggccttgttgttcgagaagatgctgttggtaacatatttggccgctgggagggttccgagcctggactaggagcagttgcaactggatctcatgttgatgccattccattctcaggcaaatttgatggtgttgttggagttctgggtgctcttgaggcaattagtttgctgaaaaggtctgctttcctgccaaaaagatctttggaggttattatgtttacatcagaggagcctacacgatttggaattagctgcttgggaagccgcttaatggcagggattgaagaacttgctcaatccctccgaaaagtagttgacaatcagaatgtgtcatttttggatgctgcagaatctgctggctataagttgaatctagaggacctgcatagcgtatttttaaagacagacaaatactctgcttttatagaactgcacattgagcagggtcccatcttagaaaaggagggtatccctattggcattgttactgcaattgctgctcctgcaagtcttaaggtggactttgaagggaatggcggtcatgctggagcagtgctgatgcctgcaagaaatgatgctggactggcagcagctgaattagcattagcagtcgagaaacatgtcctggaatcaggatcaattgatacggttggcaccgttggtattctgcagttacatccaggagcaatcaatagcatcccaagcaaatcacacctagaaattgatgtaagagatattgatgagaagagaaggaatgatgtcattgagaagattcgccagtctgcagcacatatttcaaagaaccgtggagtagagctttcagaatttaagatcatcaaccaggacccacctgctctatctgacaaatcagtcgttgacgcaatggaatttgctgcaaaacagttaaacctggcatacaaaaagatgattagcagagcctaccacgattcactcttcatggccaggggggcattttgaaaaatattggatcaaataactatgatgtcttagtttggcagttcagttttcccatgatctaaatattctcgttcacttctatgccaaagagagtatcaccaatgggtatgatcttcattccctgttacaaaggttacagccacaagccggaggagtatgcatcacccgaggacatggcgaatggggtgaaggtcctagccttgacaatggctacgctgtcgctggagtgacttgttagcgtttggaggaatcaagtcagcccgtgccaaaaaggcaaaaacaaacacctgtgttatttctaataataagctgcatagcattggcgtcatcttccctgcaccaggcctgtatacaaaccatcattcatcagggtttaggaataaagttgtcatctgtatctgtatgatctggacaatgattttctagcttgatcatattgatatatagtagtgattttctaaatctttatccatataaacaaactaatatagaaacgatgttatatcaattgtacattacctctatcgggtacacagggacaggataccctaaa

SEQ ID NO: 20009 - DNA, 884 bp, Zea Mays
cgagaagctgctgtcccgtttcagtggcttaacttctaagcaacatggtcctatctgtggtgtgccagacttcaagatgaggggaaagaagagtgatgagctcgaacctgtcgatgctggcgatgaagatgatgatggtggtgacgatggggacgaggatggtgactttggggaggagggtgaagaggacgtctcagaaggggagggatatgacaacccaaagggcaatgagaccaagaagcaaagaggtgatcctgaggaaaatggtgaggaagatgaggaagaaccagaagatcaggagggtggcggcgacgacgatgatgacgacgatgacgatgatgagaacggggatgacgaggacgacgacaatggggatgacgatgaggagggtgtagatgaagaagacgatgaccaggacgaggatgaggaggaagatgatgatgaagactcgctccagcccccaaagaagaggaagaagtgaagatcttctgccgctttagttaccgtgcgctgagttctgcctggcttttcgtcatatcctcgcatttcaactttcccatagagagttaagaaggatccacacgttcagcagcacgtgtgggcttgtaggagctttatgatttgaggcaattagggacaactcttatgtcattgttgcttgcttctgtggagtcgaacagatgtttcgctaacataattcgacttgagtgatgaaagcctccagattgaatatgccttctcttttatctcgtatggaatcattgatgcagccctggttgatagcgttccttcaataaatgaattatattggcatcatgacagcttcatgtgaattgcacgtttatactgtgcgttcaaatctcaactaatgtatgactgatcgg

SEQ ID NO: 20010 - DNA, 464 bp, Zea Mays
cttctatccaaaggtaaatgtggttagcaggaacaataggatatgcacgggaaaggtgctcaccatggattaaggatcgagcagatgcgtccacggtgcacggcggaatccgatctccgacgagaaattccagtccacgcagcagccggatttgcgccaatcgaccactatcgcttcccccacagtaccgcaacgttctccggtcaccagcaggtacggtttcgtcggctattggcgggtacagggccaacggcaccctctgcacacgatttgccgcggcactggcgttggtgagcgaaacaggaagaccggtgatgccccgtgcggctggtagataaaggctgaggtgctggcgccgaggcgatatcggcgggatggttgagcttaggccgacgtgcgtgcagagagggaagatctgagggcgcactgtcttagagctgatttggtgaccggggatcccgagg

SEQ ID NO: 20011 - DNA, 129 bp, Zea Mays
cagatttgtcatggagaaagaacacccaagtgtatcttgagaaatcatcaacaatcacgagacagtagaggttgccaccagcacttacataatttgtagatccaaataaatccatatgaagtagttcca

SEQ ID NO: 20012 - DNA, 148 bp, Zea Mays
gttctatacaaaatagttaaataattacatcatacgaagacaatgatcaagcaaccatagtttactaggagacgacggcctagaccactcacgaactcatcacagcatctttcacgcgcctcatcctgtggtacctatccttgacctg

SEQ ID NO: 20013 - DNA, 703 bp, Zea Mays
cacaactgaattgtcgaaaagatgtaaatccccaaccagtttatcaggagagtgcactctaaggatagagtgatgatgctgggagcgtgcatcaggaggcgacgatgataaagaaggcatcgaagactttgtgctgtctttacgggctgagctactacctgctggttcgttgaaataagcagcatcaattggcgcatcttgggcttcatgtcgtctttccttgccaggcaatgaaacagctccatactctgcagaagctactgatcttccaatgaacaagcaaaagcgcaataatcccagtaacaaatacaacaacacagataatcaatgcatatagaatcccacgcttcaagccgtgtcttgcctcatctgatttgtcagaaccatttaatgattcagagcgaggaagaacgagcaattcgttccctggatggaaagatgaatctgggaatttcagtaaattacttggaacagagccagacaggtagttgtaggaaacattaaattcgaccagatcatcagggaggccatcaggtatgctaccattgaaattgttgcttgataagtcaatgtataagagattcttaagtttggtgattgttcttgggatttcgccagtaaagttgttctgacgaaggttcagcaatgtcaacgcgctcaaatcaccaatgcccataggcagtgagccgtgcaaaaaattgct

SEQ ID NO: 20014 - DNA, 1133 bp, Zea Mays
atggtggccggtggtgcggtgaaaggagatgacgatgtgcagcttccatgcgggcgcggggaagatgacgtggtgaagaccgccagcctctacaccgtctccagcaaatgtcgatgccctggccatggtgaacaaggtgatccttgggcaagcaaggtgtcttctactgaaggtaaaggacaacagaatgattcttggtcaagtaagatgacttctcgtggtgctgaggataccagaggtggctgggacagcaaggtgaaaggctcttcctgcaatgatgggggtaagtgggaaaatgctggtagcgttgagtgttagactgtgtgtgttagtgtgtgtgggcaaaacctctttttttttttttttttttgcaattcgtcgtttgagggatctacttacaacaaaactccctccagatacatttcctgtcaaggttgccatcccagtcgtgcctacgatcagagtgcttgtgacattcacgaaattcgaggagctacagccgctagaggagttcggcacaccaccttcaagccctgacaaaagcaagagcccagcagtgcagcctccttcgagctcctggattcaatggatcaaggcgccttattaccgccagatgaacttgtctacggcgccaggcccgagcagccgcgtggaggacatccaccaccaggacccgttcgccatcccttcggattacgtgtggaccacacccgaggagaagaaaaagaagacacaggaaaacaagaacaggtccaagaaaggcaggaacgggtgatagagcattggtgggatgggatctaacaggagggacgagtggaagggaaggtttggagatttcggctgtgctggtctgagtctgacgtcgaatattgggaagcgaccgcttgtcttcttttttatttgtgttaacggatttgctgccaacattctttcgtttaacccaaatcgtttcggtcctgattactgttgcaatctgttggtagattttgagatgtggtggcttctatacaaccagtgatgcacatccctatctcctccgtagtgtctaggtacatcgcatttctttgttcctgcatctccaatagttgccaaaatgcattctatatttcggtttagaagaatattaacaaaaa

SEQ ID NO: 20015 - DNA, 2962 bp, Zea Mays
aaacatccagtttttttaaaatgcgccatcagcatattggaaattgttagtgctgcgagcttggtaaaacaaaggtgttccttagggctggtcaaattgcgattttagatatgcgccgtgctgagattttggacaacgctgcacggcacattcaaggccgtttcagaacatttatcacacgcaaagaatttgtgaaaacaagggaggcttcaatttctatacaagcatactgcagaggctgtttggcaaggaagatgttcgcaaacagacgagaaacagcagcagctgtaattgttcagaagtatgtccgaagatggctgctacgtagagctcacctgcaagcatgtttggcagctctccttattcagtcttacattcgagggttcatcgctcgccgctatttctctgtcattagggaacataaagctgctacagtgatacagtccacatggagaagacggaagtttgtcatacttttccagaattaccggcaagccactgtggcaattcagtgttcttggagacagaagcttgcaagaaaggagctaaggaaactcaaaatggctgcaaatgaagctggtgcactgcgtgaggcaaagaataagcttgagaaaaagatggatgatcttgctttaagacttacccttgaaaggagactgcgggcttccagtgaagagtcaaaatcagtagaaatattgaagcgtgacaaaataattgaatcattaagtgcagaatgtgctgccgctaagtcagctgctcaaaatgaacatgccaaaaaattgctgctccaaaagcagttggatgattctttgagagagattactatgttgcagagtaaaaagattatgtcagcagaagcagcagaagaaaactccaacctaaagaacttagttgaatcattatctacgaagaactcaatactggagaatgaacttattgtgactcgcaaaagtagtgatgatacaatggaaaaattgaaggaagtcgaggggaaatgcaaccatctacagcaaaacttggacaaattgcaggagaaacttacaaacttggaaaatgaaaatcatgtcttaagacagaaggcatttaatatgccgacaatgaacaatctgtctgtagctccaaagacattatctgagaaattttctgcatcaattgggcttcccaacagtgagccaaagcatatatatgaaagcccaacacctacaaaatatctggcttctcttccacagactttgagtacatcaaggagatcgaggttgcctgttgaaaggcatgagcaaaatcatgaaattttattgagatgcatcaaagaaaatttaggatataaggatggcaaaccagttgcagcatgtatcatttacaaatgtcttttgcactggcgtgcttttgaatcagagcgaactgctatttttgatcacgtgattgaggccataaatgatgtcctaaaggggaacgaagctgatggtagattaccttattggttgtccaatacctctgcattgctatgccttctccaaagaaatctgcggtcaaatggattattcactaccccgtctcgtcgttctggtggagctctagggaagatagcacaaacattgaggtctccttcaaagtttataggccgcagtgatactctaccacatgttgatgcacggtatccagccatactattcaaacagcagcttactgcatgtgtcgaaaagatatttgggcagctcagagataatctaaaaaaggaaatatcacctcttcttaatgtttgcattcaggctccaaagtcaacacgtgggcaatctggaaaagcatccaagtcatctggagttggtgcccacccagcatcgaactccaactgggacaatatcgtcaatttccttgacttacttatggatacattgcgcgaaaattatgtgccatccttctttatacgtaaacttatcacacaattattctccttcatcaatatacagttgtttaacagtcttcttctccgacgtgaatgttgtacattctccaatggggaatacgtgaaagctgggctatcgttgttggagaaatggattactgatgtcacagatgagtttgcgggtacatcttggcacgagctcaattatatcagacaagctgttggatttttggttatacaccaaaaaagaaaaaagacgcttgaggagatcaagcaagatctttgcccgtccttgagtgttcgccaaatctatagaatatgctcgatgtattgggatgacaaatacggtacccaaggcatttcaaccgaggtggttgctgcaatgcgggagatggtcaacaaagatacccagaatcttgtgtcaaattccttcttgttggatgatgacttaagtataccattctctaccgaggatctatcaatggcaatcccgtcaatagattatgctgacgtcgatcttccagaatctcttcagcactatacatcagtacagtttctactaaggcagcaggatccacagcctgcccaatagaatgaatgtggtcagcctgccctgaagatctgtctgtcccctggttgtttctaccaaggcagcaggatccacagcctgcggcctgcccaatagaatggatgtggtcagcctgccctgaagatctgtctgtcccctggttttattggggtaacatccatctgcgatgttgtattgatgtttagagagtacctagtttggtggagtggacacaatttaaaagcaaccattgttgctagatgccaattcattggtgttcactccccaagtatttttcattgtacaggaaatgttgtaagtctgttgactagcgcaaaattagttatatcagtggtaaattgggcaatgcgcatcagtgcatcaccgatggtatcttctacacatgaatcgttagccagttaaccgctaggtcgggcgatcataagctccaggctgtctgatatgggttcgtgtgggtctgtcgcgggacg

SEQ ID NO: 20016 - DNA, 3988 bp, Zea Mays
cccatgtgtaagcttttctcgcactcgtactccctcctccgctccggctaggaggctgctccctccgccgctccgccttcgtcgcgcggccatcgtttccggctctgtccccggatatctcttcgccaccgcttcctgcgccgcggcgccgccacaaccgaaggcgacccagtcgccttcaacactatggtgactcctcccactgtcgagcaggaggacgaggagatgctcgtgccccgccaggaggcggtcgacaccgacgcagcgcagcccatggaaggtactgtggtggcacagactgaggtggtgagcacggcggagagccagcctgtggaagatccgcagacatcacggttcacttggacaattgagaacttcaccaggttcagtgagaagaagcactatttagaggtttttgttgttggcggattcaaatggagtgtgctgattttccccaaggggaacaatgtggaccacttctcaatgtacttggatgttgctgactcaaccagccttccgtatggttggagccgctatgctcagtttagtcttgctgttgtaaaccaaatccagccagagtttacgatacgcaaagagacccaacatcaatttaatgctcgtgagagtgattggggtttcacatcttttatgcctttgagtgagctctatgatgcaagtagaggttacctcgtgaatgatactgttgttgtggaggccgaggttgctgtccgcagaattgttgactattggacatatgactcaaaaaaggaaactggttatgtgggcctgaaaaaccaaggagctacctgttatatgaactcccttctacagacactataccatataccctacttcaggaaggctgtatatcatatgccaaccactgaaaatgacataccatcaggaagcattcccttggcgctgcagagccttttctacaagctccagtacagtgacagtagtgtagctacaaaagagctgacaaaatcttttggttgggacacatatgattctttcatgcagcatgatgtacaagagctcaacagagttctgtctgagaaacttgaggacaaaatgaagggaactgtcgtagaaggaacaattgagcaattatttgaaggtcaccacatcaattacattgagtgtataaacgttgagcataaatctaaccgcaaggaatccttttatgatcttcagcttgacgtcaaaggctgtcgtgacatttattcgtcgtttgataaatatgttgaagttgaacgtctagagggtgataacaagtatcacgcagagaatcatggtctacaggatgcaaaaaagggcgttcttttccttgatttcccccctgttttgcaactccagctgaagcgctttgagtatgattatatgagagatagcatggttaagattaatgatcgctatgagttccctctgcaacttgatctggatagagatggtggcaaatacattgctccaaatgcagatcgaagtacacgaaacctttacactcttcacagtgttcttgttcatagtggtggggtacatggtggtcactactatgcattcatacggccaactttatctgagcaatggtataaatttgatgatgaacgtgtaacaaaagaagatgctaagaaggctcttgaagaacaatatgggggtgatgaagagttaccccaaataaaccctggtttcaacaacgctccatttaaattcacgaagtattcaaacgcgtatatgcttgtttatattcgtgaaagtgccaaggagaaaattatgtgtactgttgatgaaaaagacattgctgagcatttaagggtaaggttgaaaaaagaacaagaagagaaagaacacaaaaagaaagaaaaagctgaagctcatctttataccataattaaggtagctcgagatgaggatttgaaggaacaaattggaaagggtatatattttgatttggtggaccatgaaaaggtccataatttccgtatacagaaacaaatgccttttagttgtttcaaggaggaagtagccaaggaatatggcatccctgttcagtttcagcgcttctggttgtgggcaaagaggcaaaaccatacataccgccctaatcgtccattgaccgttcatgaggaaacacaatctgtggggcaactgagagaaatatcaaataaggcacacaatgttgagttgaagctgtttttggaagtagaacttgggctggatttgcggcctctccctcctcctgagaagggcaaggaagatattcttcttttcttcaaattctacaacccagaaaaggaagaactctgtttcatggggaggctctttgtgaaggccttgggaaaaccttcagaaatcctggcaaaactaaacgaaatggctggatttccccctgatcaagaaattgagctttttgaggaaattaagtttgagccaaacgtgatgtgtgaaactatagacaagaaactcacttttcattatagtcagcttgaagatggggacattatttgtttccaaaaatcaccaggagcagaatatgatgcacccgtgcgatatccggatgttccttcatttttggagtatgtccataataggcaggttgtacatttccggtctttggagaaaccaaaggatgatgatttttctttggaattgtcaaagcttcatacctatgatgatgttgttgagagagttgctcgccaacttgaattggacgatccagcgaaaattcggcttacaccccacaattgctactctcagcaacctaaaccacagcccgtcaaatatcgaggagtggtgcatctgtcggacatgctcatccactacaatcagacgtctgacatcttgtattatgaagtgttggatataccactgccagaattgcagttcctaaaaaccctgaaagttgcatttcaccatcctacgaaggatgaggttgttattcatagcatcaggcttccaaaaaatagcaccattgctgatgtaatatatgacttgaaaactaaggttgaactgtccagtcctaatgctgaactacgtgtactagaagtcttctaccacaagatctataagatctttccactacatgagaagatagagaatataaacgaccaatattggacactacgtgctgaggagattccagaagaggaaaaaaatataggcccaaatgatcggctaattcatgtttatcacttcaagaaagatattaatcagactcagcagattcagaactttggagaccctttcgttttggtcgttcatgaaggtgagactttagcagaagtcaagaagcgcatacagagtaaactgcaagtctctgctgatgaattttccaagtggaaatttgcatttatatcaatgaatcggccagactacctccaggattcagatgttgtacctactggctttcagaggagagaggtctacggagcttgggagcaatatcttgggatagagcacgctgatactgcaccaaaaagggtctatacagtgaatcagaaccgtcacgcatacgaaaagccggtcaaaatttacaattgagatttctaactaacatggccgcacggtgaaggcctccatacgagaggagcggccagaaaagggaggacagggaatttatactgtcagggggaaaacctcatagttagcgagccattcggtgtggcacggccatgtattccagcgctagaggccagccactgttatttcatctgtagcagccagcagctcctatagcaatgattttctttttgtacaagattttccttctttgccttagggtgatggcgcgagcgcattggtgtccgtttcggttgggcaattgcttcattcttagagcaaagctgggtacataagattttggtaggaagcgtgtatacaggcaggctgtatagttgtggctctctcggcttgatccctcgtatcttgtcttgtgctattgttaatgcagtgacaggggctgactgtaaatcgtggttccaattttcag

SEQ ID NO: 20017 - DNA, 295 bp, Zea Mays
atggcgtcggcggccagggcaaaggaagggccggggaagctgggagccacgggaaaagcgggttatgtagattcatcaggcgataagtccaaacgaagtgtagtagagattaaaggtcgcttctcagtgacatctgagaatgtcgatcttgcaaaggttcaggaaggtccacttagtagtctctcccggaaatcaccagagggttcactgttaagaaaatctgccagcactggtgattattttgttaatcctaagctgatgtgcatgcagccagccacatgcgcctggcctgccc

SEQ ID NO: 20018 - DNA, 2102 bp, Zea Mays
ggccggtccaccattgtagttctcctgctttctctcgtcccccactaccctcagcaaacaaaagaatcctgaaccccttcttcgccgattcctctaacccaactcatctcatctccgctcccaaggcgagatctcaccaccccattcccaaatcaacccaaacaccgaattccaaacctggtgatcgatccaaaaacgccataaatcccaccgaatccaactcaaattcgcaatcaaatgccccagattggcacccaaaccccgcacccagcaattcaaatctgacctcgccattcccgctcctccccctctaccctccgctgcatgctccagactcccatagcaatggcgaccgcgctctccaaatctgccgtcaaatcccaccctaggtcgcctaccacagcgcagccgccgccgaaccccggctcaaacgccgcgtcggctggcgtaggggcggctcctccgcctccgccgccgttgtcggccgccgccggtgccacgccgtcgaagaacgccgcgatggtggagctcaagtcgcgcgtgctcgccgcgctggccaagctctcggaccgcgacacgcaccacatcgccgtcgaggagctggaacgcatcatccgcgcgccgccgttgaccgacgccgtgcccatgctgctcaacgcactggcatctgactccccggggttcgcctccccggccaggcgcgagtctctgcgcctcctcgccacgctctgcgcgtcgcacccggacgctgccgcgccgcacctccacaaggtgcttgcccacctagcgcggcggctcaaggacccggcgtccgacacctccgttcgcgacgcgtgccgagacgtcgcgggccagctcgcggcagtgtacctccgccctctgtctgcttccggcgttgccgaggcgggcaatgccaccgtgatgctgttcgtgaagccgctgttcgaggtgatgggggagcagagtaaagcggtgcagggtggagcggccgcatgcttggccaaggcagtggaaggggccgggcctgggcccggtgccatcgggatgtttgggaagctcggtcctaggatctgcaagttgctcggtgggcacggcgtgcaagccaaggcggcattgctcggcgtcatgggaagtttggcgcaggtgggagcaatcagttcccataatatgccgcagacactccaaagtatccgtgactgccttgagaatagcgattgggctactagaaaagcagctgctgatacattatgtgtctttgctacacattctggtcacttgataggtgacggaatagctccaaccatttctgctcttgaagcttgccgttttgataaggtaaggcctgtcagagatagcatgattgatgcagtacagttgtggaaaaaactgactggagaagatgcaactgacggtagaaataaggatctaggtgatggtgaagggaaactggactcaagacggtcaatgcaaagtggtggaaaatcagaatgctttgatgattgctctccagattcacctagtaacatgaagggaagtagcatagctgaaaaggcagcagttcttttgaagaaaagaccaacattaactgacagggaactgaaccctgagttcttccaaaagcttgagacaaggaaaacagatgacttggcagttgaggttgtagtcccccgcaagactctacaatctcacttacgaagtgaagatgacacagaagaagatgatgatcctgttggtccagttgacagcaatggatcagctgaagatgaagcaaatctaacccaaatgcgtgctagctctaattttcaaaatattcgggatagatgggctagccaaaggggaaatagcaacaaagatgcaaaatctaggacagctgatgttgaagataggggtgaacccagtacaaaagattccacagctgcaaccatgaacattcctggagaaggcccttccgtaaataataaaacaaattggttagcaatacagaggcaattgtcacacttggagagacagcaaactagtctcatgaacatgttgcaggtgaaattatcagcctgattggttgccctacatccagtggctgcagcagctgtggaacattaaac

SEQ ID NO: 20019 - DNA, 3982 bp, Zea Mays
ctcccccttttgactcaccacggttccgcctctccccccttctccctctcgcattcttcctcccccgtttcggggagacgccacgagaaaagagggagcagggaaagaaatcgcctccacgtccacggtgacgccggatcgcgcgtcaaatttctttgccgcggatttggtgctgcaaattttctagaattttttcgttttgtagggggcattattggcacggtatcttagtcctgggcttatattatctgcattttcgtttcccccgattttttcgactcaatttcttaacggatttgggaatcgcggctagggggctctgcattgccggatttgctcgatttcgtgggcgcattgcagctttgcattgcataacgatctttgccttggtcgcccacgttcgcgattctgtctgagcttcctcacccgggctcgtgcatttctccgaacatctccaggtgtctgttgcacaagctctcgcttgttgctccaatttcacgcgttctgcatgcatgtattccccgaaggtggtgccattctggggctgttgcaaagttctctggtcaaaaccaatggattccgtcgagcaatcggttccacggtgctaagagattgttgtccattggccatccccatgaatttctgaagggggagaagaattgctgttgcatttcccgggcaggtgcattggcatggtcgcagtagtgtaggaagcagaaaagatgaggcactgttggagtgcatggctcctggccctgtgcctcgtctctgtccagctcctcgctccattggtatgcgagcgattgctcgttgcagcacagaacctgtcaccgccagccttgacaccgccccttgtcaaagaagtagacgatgtggtggaacatgtatggatctcatgtgggttagacaggggatctcttgaagacgttagaaaacatttcaattacaaccacgtatttgacattctccgtacgctctccggaaaagatactaaggatagctctcctgaaactgaagatgccagcaaagcactgtctccagaaattaaaaacactttgctgaactgcttaagcaagcacccacttgtagttgctgcacatgagagtgcaaaaaacttacctattgattatatcaaaatgctttttgccttgttaagaagagatgtggctcaaggatctacaggtgcagcgacaacttctgcaccaccagcagctgtgaaatcaaatccatcaccttctttaggggaaccttcctcaacaaaacctgacaaaaatccagatcctccattagaaacaacacccgaagaaaaaatggtgccccaaactgaaaaaacagtggccaaaaaggaagataacagtaacatgtcaatcactgctgtcattggtttgtctgtgtctgctattgcgttgttagcccttctctgcttatgcaactttgtttgccgtgcaaaacaggcctcttcatctgaagtaggggttgataaaccgcctctgaatcagaacctgagtaatttatctgcttctcttaagttttccaaaggaaactcaattgatgtcaacaagctgggagcactgccgctaaagtcagaggctggccaaaatggcaatgccaaactaagctcatctgaaatctctaaaactgaagttaccccagcagtctacaactgtttggctgaaccaatggctgcttctactggttatgtcccaggatcaagaccaacaaccccaccatctatgccacctccagcccctgcacatccgaaggctcctccctcatcaactcctcaagcacctgcatctctgaaggctcctccctcatcaactcctcaagcacctgcacctctgaaggctcctcactcatcaactcctgaaacacccgcaccaccttcaaagcctagttcagttcttcactcagaaccctcatcaccatctgctctaaaagctgcacctccaccaaaagatgcaccacagccaaaagctgcacctccaccgccaccaaaatctaccggcccaccaccaccagcaatgtctggttcatcgaatacacgtccaccaccgcttatgaagaaatcaggcaataagatggatgatggcgcaaattctcatgaagctaaaacaaagctaaagcccttcttttgggataaagtaacagcaaatgctaatcagtctatggtgtgggatcacctcaagtctggatctttccagtttaatgagggtaagatggaaagcctttttggttataactctgtggagaaaataggcggtgatggcaagaaagatttattatctaaggatatacctcaatttgtgaggatacttgaacctaagaaggcacagaaccttgcgatatcattaagggctctgagtgtttcaccagaggaagtatgtagtgcagttaaggaaggaaatgaacttccatcagacttgatagacacactactaaagtggatcccaagcaatgaggaggagcttaggcttcgactgtacactggggaactgtctcagcttggtcctgcagagcaattcctaaaatcgattatcgatattccatatattttccaacgtctggatgcattacttttcatgtccagtctaccagaggaaacttcaaatgtgaaacacgcttttgctactttaggtggcttgccaagagcttaaaaacagccggcttttcttgaagttacttgaagcggtccttaaaacaggaaacaggatgaatgttggcacattccgtggaggagctcaggcttttaaacttgacacgctccttaagttatctgatgtcaaaggaactgatgggaagacaacacttctgcattttgtggttgaagaaattattcgttctgaaggtatccgtgctacaagggctgcaaaagatactgacggtaataatatgcgaactgaagatgattacaaacaacttgggctgaaagttgtgtccaatttaagtgatgagctacaaaatgtcaggaaggcagcgatcctggatgcagatcaattgacaatgtcagtagcaactcttggccacaagcttgtcaaaaccaaagaattccttaacacgggcatgagaagtctggatgaacacagtgggtttcaccgcaagctgaagcatttcgcagagcagtgccaaactgatgtttctttgttgcaagaggaagaaaagaaaattcggtccttggtcaggggcactgttgattatttccatgggagtacagggaaggacgagggcctgcggttatttgtggtagtacgagatttccttgcgatgctggacaaggtttgtaaagaggtgaaagaagcatcaaaagtggctccaaagaaaacaaagaccgctcagccatctcaagcatctttcaatgatcccaggcgcaaactattcccagcaattcaagacctaagggcagacagttcaagctctgatgaagacgattagctgtataccgaatcaaggagtccatgttttcaccttcgaatgcactgaatttgacccttcaaaacaatagtgcggtgatacataatacatggaaactgatgggaaatggtgaagtgacgctattttttgccatccactgatcaaaaaggcaacaatcaaattgggaaacctggcttggctttacactgacatgttggtaatgacaaatcatcagaccagatctggcattcttggccaatgggtttgtatggcactctcctatctagcaagaaggatgttcatatggtcgagacagcatctatataaaaggtgtggctggtggaaaatggataattcaaaggaaatggaagaaaactggctctagtttagaaccggtgtaaatgcaggaggaagtctgactaatactatttttctgttcattgtacacatgtaccattgtaccgaacgcagagaaatgcagcgcaaacttgtgaatccggtgccattacccttgcaaacaggaatacaaatgaagtgtttggtttgagaaataagctagtttatcatcttc

SEQ ID NO: 20020 - DNA, 3496 bp, Zea Mays
ggctgccactcggctggcgctcacaccggatccgggccccactacccacctcctgtccagcccggtctccacagcagtgcccaccaccgcctgcagtctgcagagatcccccactgattcgctcgccgtccctccgctgcgctgctatataggaccgtgccgccgcgtgcgctcgtggactgtggtgtgccttgtgcgacagtcgccagcctgccccgcctgccggcccggccgcccgcctgcccgcggcactgagaagacgaagctccgggctccgggacgccgagcagaggggaaaggatggaggacaaggcgtccaacctagacgccgtgctcaaggaggccgtcgatctcgagaacataccgatcgaggaggtgttcgagaacctccgatgcagcccgcagggtctcaccacggagcaggcggagcagcgcctcgccatcttcgggcccaacaagctggaggagaagcaggagagcaagttcctcaagttcttgggcttcatgtggaacccgctgtcctgggtcatggaggcggccgccatcatggccatcgcgctcgcgaatgggggaaacaagccgcccgactggcaggacttcgtggggatcatcactctgctcattatcaactccacaatcagcttcattgaggagaacaatgcgggcaatgccgctgctgctctcatggcacgcctcgcccccaaggccaaggttctcagaaatggccggtggaccgaggaggaatcggctatccttgtgccaggagacatcatcagtgtgaagcttggggacatcattccagctgatgctcgtctgcttgaaggggatccactgaaaatcgatcagtctgcactcaccggcgaatcccttccagtcaccaaaggccctggtgatggagtgtattctggctccacttgcaaacagggtgagattgaggccgttgtcattgccactggtgtgcacacattctttggcaaggccgcacatcttgtcgattcaacaaaccaagttggtcattttcagaaggttctcactgccatagggaacttttgcatctgttcaattgctgtgggaatgctcgtggagcttgtcgtcatgtacgctatccaacacagggcttaccgacccggaatcgacaatctattggtgcttctgattggaggaattccaatcgccatgcccactgtcctttctgtgaccatggcaataggggctcatcgcttggctcaacagggagcaatcactaagagaatgacagcaattgaagaaatggctggcatggatgttctttgtagtgacaagactgggacattaaccttaaacaagttgactgtggacaagagtcttgttgaggttttccaaagaggtgttgaccaagatacagtaattttgatggctgctagagcttctcgcacagaaaatcaggatgccatagatgccacaatagttggtatgctggctgatccaaaggaggctcgtgctggtgttcaagagatccattttcttccatttaacccaactgataaaagaactgctttaacctaccttgatggagaggggagaatgcatcgtgttagcaagggagcaccagagcagatccttcatcttgcccacaacaagtcggatattgaaagaagggtcagagctgtgatcgacaaatttgctgagcgtggtctgcgagcacttggtgtggcttaccagatggtaggaaagagagtcctggaggaccatggcagttcattgggctcttgcctctttttgaccccccgcgccatgatagtgcagaaactatcagaagggcactcaatcttggtgtcaatgtcaagatgattacaggtgatcaacttgctattgggaaggaaactgcacgtcgtttgggaatgggtactaatatgtacccttcttctgctttactcggacagaataaggatgagtcaattgcttccttgccaattgatgatttgattgagaaggctgatggctttgctggtgtttttccagaacacaagtatgagatcgtgaaacgcttgcaagcaagaaaacatatatgtggcatgactggggatggtgtaaatgatgcaccagctttgaagaaggctgatattgtgtgattattagtgctgtgctgacgagtcgggcaattttccaaaggatgaagaattacacgatctatgctgtatcgattaccatccgtattgtgcttggttttatgcttcttgcgctgatatggaagtttgacttcccaccatttatggtcctgatcattgccatcctcaatgacggtaccattatgactatctcgaaggacagagtaaaaccatctccacaacccgacagttggaagttagctgagatttttgcaactggagtagttcttggtggttatttggccatgatgactgtcattttcttctgggctgcatacaagactgacttcttcccgcgactgttccacgtcgaaagcctcgagaagaccgcccaggatgactttcagaagctcgcctctgccgtgtaccttcaagtcagcacgatcagtcaggcccttatcttcgtgacgcggtcgcgcagctggtcgtttgtggagcgtcctgggttcttgctggtctttgctttcttggtggctcagctgattgccactctgatcgctgtatatgccaactgggcgttcgctgcgatcaagggcattggatggggttgggccggtgtcatctggctctacaacatcgtcttctacttcccgctggacatcatcaagttcctcatccgctatgcgctgagtgggagggcatggaacctcgtccttgagcagaggattgcgttcacgagcaagaagaattttggcacggaagaaagggagcgcaagtgggcgcatgcgcagaggactctccatgggctccagccgccagaggcatccatcttcgagaacaagacgacattcaatgagctgaaccagctcgcggaagaggcccgcaggagagccgagatggcgaggttgcgagaagtgagcaccctgaaggggaggatggagtcagtggtgaagcagaagggtctggacatcgagaccatccagcagtcctacaccgtgtgactggctgaccgacgacgacggggtttatagaggtttcttcttcttatactatacaatctgtactaggtagcaataaggatcaaggaaggaacccctatatattggctgtggttcgcgggaaatgaatgatggtcatatttatgatgtcggtgtggtgcttctgtcgccaactctcgaccatactaccctcaactcaccccttgtatgctgtggcattaaccacccccggcaccaccggcaggcattgatattgagagatgaggtatagtagtctgtagcctctagtagatgatgatgaattgatgatatagtacatttttgcttgcttgctttctttcttgtttgttgttttccttggttctgctctctgggtttttgatgcttgctggttttgtgctattcctgatt

SEQ ID NO: 20021 - DNA, 904 bp, Zea Mays
tgcatgttacctcccgacgcaagttctgaccgaatttcctggatggatggataggctgagcatggaaaaactttatgaatggatcctgaggcagcacgaaaatggtttgaggctaacagttgctgatgtagcctcccatatccagcatgagattcagtatggaggtgacaatgcatcagcctctccaaggtcacaataccctagccaaagcactgcaccgacaatgcacattcccaacacaagcaaccagcaaccatcgccaagcttatttgcttcaggaaaccctgggttgacacagtccaagaattccatggtcttttcaagcgcattatccagccccatccggcggagcctgcaaccttaccacctagagcaggacggggatgcagggtacttcgcgaacggtgcaagccgcgatgtgaaccccacggcttcgaatgattcgtccatggacatgcactcggacagcccagctcatgactcctactgagcagctcccaccatggaaccagcctcaagaacagcacttcaagtggaagaagtctgctgtcacagccttcccaggcctagtagtaatattcaatttaacaccttccatagcctctcttacactaagcgtgtgatgtcttgtgttgttactactacttaccacttgttgctttgcgagaattatgtaatttgcatgtactatactatactgtaccatttgatttatctgtgcatattactgctgttggtacgtgacaagtgcaggaaacaaaccactgaaaagaattaacagcttggacagtttgtgaggtgatcttgatttatctgttgccactgctgtcattcgttttttgttgagacggaaactgcataaatgtagctgctggtgttggattgtggtgaatcaaggcagcag

SEQ ID NO: 20022 - DNA, 202 bp, Zea Mays
ctccagtccacagcacagccacacactacaattaacatatcagcatcggaccgaatacacaagatttgtcaacttgtcttaaataaatccacatgccatactacaaaactaaacagttggcatgtattaattcaggaaacacaagcacggtccatcatcagagattaaatttgctgtgcatcgggacacagctataaataat

SEQ ID NO: 20023 - DNA, 655 bp, Zea Mays
taggtggacccgcccagtgatcccttcaccacggcgagcgaacgaatcgtgagttcgtttggggaggccagatgccgtcgatatcgtcgcgatcccctctcccctgaccctgtgactatataacctggccctcggctccaccttgcccagaaaccggaaaccggagaagccaaacaccatcaacgccatgttcgtgcgtggggcttgtgctggggggagggggactacctggccggttctcggcgccaccgcggggcgcgtgtcaccgtggtcggtctcttcatgacacccgtcgataatggtcagttggcggagtccgaaggagttacaggtgaagaccctgagcagcagctggttggtgaagacaagtgtcccttgacccatctatgccctattcatgttataattcactcctcgtatttacataattcatacctaaggattgactagcttttgttcatcttgtccttgtttacatatttgggttgggttattttggtttagctttatgctaatgcttcacattaatcaatgaacatgatgagattatttatgatacactgttttcccttttgattatgatgatatacttgtggcatttaaggggactcgagctgtttcttgagtgcctctccgtaaggactagttcgttgga

SEQ ID NO: 20024 - DNA, 3410 bp, Zea Mays
catgtttggaagatagcttcgctgggataccggcccacccttgactccttgagccatgtttccgcggggatattggtccggcctccagacatcaggcagctctcccgagcatgacgctgtctctgttcacaactcttccgagcacgccgccgtcagtcctttgtcatcatcatcagctcagatctagcagcttcgccttctcagtgatggaaggtactaccatttctattgagattgatggggaggccatctgtcttgacagtgtcggagataatgaacaagaagctgcggagaatggagaaatgcaccaaacaatttacactgatgaaaatggggaacaagtagcctttgacaaccaagaacaggggagggaggaagatctggcaggaaatggagaagaggatagggaccataattctatcattccaagccgtgaggagttgactgaagaattaagaaataaagtcgcatatagtgaggaagaagcttacaggttgtactgtgactatgggcaccgcatgggctttagtgttcgaaaaggaaagcagtactactttactggaaccaaaaccatccgtactaaagattattactgctcaaaagaaggcttgaaggatgatgaacagcttactgaagcaaactttaataagccggagaccagaactaattgcaaagcgatggtccgttttagggttgattctgaaggtcaatggcgagttattcaaataattcctgaacacaatcatgagctagttcgaccggaagaaatacacttactgagatcagtgaggactctttctgttccgaaatctggggtgctgaatgcaatggtgaatgctgaaattcaagcaatgcatgataatttgcatataaatgaagatggtacagaatgccacagccaacttagcatccgtagttacacactgcttgaaccaaaggaatgtgaggcccttgttggatatttcaagcgcagaacaaatgaacaatgtatgttctattgggatgtagaagtagatcaagaaggccgaatgactaattttttctggagggatgggaaaagccgcgttgactatgacagtttcagagatgttgtgatatttgatacatcatatctcaccaacaagtataatatgatatgtgctccatttattggtttgaacaaccaccgacaaaatgtcatgttcggctgtgcatttttgttagatgaatccttaacatcctatgaatggttatttaagtcattcttggagtcagtgggtggtcgtccccctgaaacaatctttactgatcagaatgaatttatctccaaggcaatcgaagttgttcttcctgggacacgccattgtctttgtcaacagctcattgaaaaaaaacttatgtcccatttaggcagtatcaatgattctggaacacttcatagcttgttttcaaagtgcatgagagaatgtgagtcagaagcagaattagatgaaacatgggcgatgatgcatcatgagtataacatgcaggaacacccgtggctcactgatctgtaccagcaaaggcataaatggtgctcggctcttcataaggatgcatttgatggtgggattgaatcaatggataggaatgagagtttgaacaatgttttgagcaacattgacgatgaatcagcttcgctttccacttttgtccttgagttggataaacttgcagggagttggcgtaaaactgagtctttagaggacattcagtgcaaccaagctgctccggagtgtacagttaagcataacagaattttgcaacatgccgctgaagtttacacacataaggtctataagtctattgaaacagattttctagatggatgtagtgctacttcatatcaggcagctcagtgtaatgaaacattgcataagtttgagttccttctggaaaatagtccaaatgtttcggtagttttccttaacacctctaccatggagttgagctgtacttgcaaaaaatttgagaccatgcgtatactttgttcacatgctctaaatgcacttgttctcaagaatgtagataggattcctgaaaggtatattttaaaccgttggacaaaatatgccagaaaaggaacatatccatttccagttgatgaatttgcagaacaagatcgcacagaagttgcatttgtgtaccgtaatagggctatgtggtttgtttatgatctgctgactaagagcaaaagtcatcataatacaagaaaactaattctggatgcacttgaaaatggagaaaaatcactggaaagtatgtgtgacctcaaaagattgcatatgaataccttggggaaagagaaagatggaagcagggttgaaaagagaaagaaaaaatcaactaagcaagagaaacattcaagaaatgttaaacaagcggttttgccccagacagctgacccggtttttgttgatccaccaaatcaagatcaatattttgctgcagaagatattgcatcaaaccaatctgttggtagacctttcttctaccagggatatcccatgactgttgtttcaacaagccagattcaggggcatactaatatgcattctgagcctcagtgtgcatctcaggaatattctgcttatggcacagttcagccaccatcacaatttggtggtggaagaaatttctgaaaggtgtagtgtcattgacatgtgaatatctgaagctcatatcagttctactgattgttgtatgtgaatgacttgttcatttaggcagtagacacccaacctagcaacagaagaaacaggttgctctcttccattttgtgaatgtactgattgtaaatctgttgtccacttaactgtatggaatatggaagcatcatgttgtaggaaactaaataagaatttgtttttgaagtctgtaccatttatatgctagctaaacaaaccagtgagcactataatagacttcaccacgtgacactgattgccaaattcaaccataaagttctttaccttggaaggttattcactgaagcatggtcttaagggactcccaacatttttggtacagtcagctcttgttcagtaaattatgtaactgtttatgggtggcatacttatttaagagtttgagttgagaagcaaaactgggtcatgaaaaaaaatgttctgtacatacttcagttttaggagcatataaatccattggaatagctgttgaagcaattggctaaacttccgggcctcctttggatcaaaggatgatttcctgaatcctgtgtttttcttgtgtttttgaactaattcttatgaaattcttgcgtttcaaagtttcaaaggaggtcttaagtttgaatcactgatagagttgaaggcttgagtcatatatccactatccaggaaccaagcctggtgcatgaaggccatgcaaat

SEQ ID NO: 20025 - DNA, 2331 bp, Zea Mays
gtgtgatctccatcaccaatggtggtttctacagccatagagaataaagtgtgcactgaattatgcagcttgattgggaagagagcccaagcagtgtaaacaatttaagtcccttctcatcagtttccaccccaaggaaacgtgtgaaaagtagatgggagcctgttgtggatgaaaatgttaccaataaggtggaacaaatagcaaaaggattgatcggcagtaatgtccacagtacttcggaccctaaaaatagaatgggtagcagttgggatcataggaagtttctccagtcttctcaagcaccttcaaataaagtcaatcagaggtctgccaagaagcaaaaaatgggtagtaatttgagtcaaatacagaatggaaatgcttcaagtgacagtgagaaggaacatgatctaaccaaatattatgccagtgcaactgcactagcaaattcgcctgaggaaaagaaacgtagggagcatagatccaagcgttttgaaaagagtaaagattcatcatttaaatcaagaaatgtttctgcaaataaagatgctatgactaatttgcgtgcaagaagggcaattttgtcttttcgtactagaacctatgaaggcggcactttggctgttgaggatatggattgggatgcactgacagtcaaaggaacatgtcaggaaattgagaaaagatatctacgacttacagaagcacctgatcctgccaaaataaggccagaagatgtcctggagaaggcccttgcaatggttgaaacatcacaaaagaattatctttacaagtgtgatcaactaaaatctatccgccaagatcttacagttcagagaatccagaatgaactgactataaaggtttatgaaacacatgcccgattagctatgcaagctggtgatttacatgaatttaaccagtgccagtcacaactgaagaggctatatgcacaaggaatcaagggttgctattttgaattttctgcttacaatttgctgtgtgtcatgctacactctaataataaacgagacttgctgtcatcaatggcaagcttatcaaaagaagccaaacaagatgcagctgttaagcatgcccttgcagttcatgcttctgttttatctggcaattatgttctatttttcaaactgtacaagaaggcgcccaatttgaactcatgcctcatggatctatatgtggagcggatgcgcttcgaagctatgaaatgcatgtctaggtcatatcgcccaactgtacctgtgggatatgttgcacagattttggggttcatgagaactgatacaggctgtgcaaccaatggggatgatggattagaagaatgcgaaaaatggttgaaagcgcatgggatagttctttcagaaggtaacagtggggaattacaaatagacatgaaggcttcgtcttctacactttacatgccagagccagagaatgcggttgcacatggtgatgcatcacttgctgttgatgactttttggcacggactgacgggcatcttaaaaggtgcagcagcgatgagccaacggtggatactccgtagtgtagtatattggtgctgctgtggcagtcgtgccgagatgtggacgcactgcacttctcccgtagaaactgcaaagggggcatgaaatggagctgcccaacgaagctcgcggagctaagagagtcggaacaactgaacaaggatgtggtcatcgggttttgccacttgcgcaaattgatccagtcatccagagttgcaccgcgatgagcttcgttgagaagacagagaagaaagcagcattacccgacatgagcagaagtttttatgtcgtggtggtttgctcacaagggcctgttccgataggagtagattgaaggtattagaagatattaaatttcttagtcttgtttggaagtaaggggattggaggaactgaagatttgaaggggccaaaatcctagaaggggattttagccttggctgatttgatgacccctccaatctctctcaatctccttatcatcaaatcagccctgcctcgattctcttctcccaaacaagccagcccttactagtaaaaattgaatagaaaaaaagatttaatcctcctcaatctccttcaaccaaacaaggtctaacttgcattaagcgtagaaagtattgtgaaaaacagctacagctttgaagcatacatcatacattatcttttccggtgctctttttttctggctgccccttcctctgtgaagattgtgaattactttttcttgcacgtaaatttattttcctatcccatagaataatgaaaattatatactaatgttcc

SEQ ID NO: 20026 - DNA, 2183 bp, Zea Mays
gccctcgtcctcccctattgtctgtaagtagtggcaaacctggctgcaatcattcataaccgaattcttcgtgggggcgccccacctgcctgcctgcctgcctccgctcctcgcagtgcctagacatctgctgcttctgctcctggcactagttcctgccttcttttgctccgctcggttggttattgctgctctgctgctgcgtcctcctgcagtctccacctcaacttctccgccttcctccttttcctcctccccctcctcgcgcagctctcgtgcttcgcctgttcgttcggggacggtcgtgcgtggcgccagcggcgtcggagttcgatttccggtgagcgcttttcgcaggaaaggttgggtcttgtcggttgggattactcgaccgtcgctacgggaaaccgtgccccatctctgcagcggattgatttctgtccgtgctgcgaggttggtgtggtggtttgtctgtgcttccactgtcggaccgaagattccgtcatcgtttcgtgcagtaaccggagcggtgtttagtggggagaagatttggctggaaggcttggtgcttgcaaataaacaccacacaagaatcgaatgcgccgcaccagtgccgattgacgagattcgagtctggatttcgagcgtgatatggtttcatcaggcacctttggactctaaataccggttccaaggacaaggttttccattcgaagaactgtcgctgagggaagaagaaggaaaagaagaagaggtcaatggcatcgctgtcagaaagtgagctgacaaaccggggaaccatgtgggagctagatcagaaccttgatcaacccatggatgaggaggcgggcaggctgaagaatatgtacagagaaaagaagttctcatcagctttgttactacggctggcatttcagagccttggggtggtctttggtgacttgggcacgtcacctttgtatgtgttctataatatatttcctcgcggaataggtgagggcgaggatgaggatgttattggagctctttccttgattatttacaccctcactctcataccgcttctcaagtatgtttttgttgtcttgagggcaaatgacaatggtcaaggtggtacatttgctctttattccctattatgccgtcacgcaaagatcaacaccatacctaatcaacacaggaccgacgaggaattgacgacgtatagtcggcaaacctatgaagagaattcagttgcagcgaaaataaagagatggatagagtcacatgcatataagagaaacattcttcttattcttgttttaattggtacttgtacagcaattggagatggaatccttacgcccgctatatctgttctttctgcatcaggtggcattaaggtccagaaccagaacatgagtactgatgtcgttgtgctcgtcgctgtggtcatcttaatcggattgtttagcatgcagcactacggaacagacaaagtgggatggctcttcgcgccaatagtcctcctctggttcatcctgattggaagcgtcggggctataaacatacacaagtatgatagctctgtgctaaaagcatacaacccgatgtatatataccgttttttccgacggagaaagaattctgacgtctggacgtctctgggaggaatcatgcttagcatcacgggaactgaagcattgtttgctgatctctgtcactttcctgtgctggcaattcagatcgctttcaccttgattgtgtttccatgccttctactggcgtacacagggcaggccgcctacataatttccaacaaaacacatgtggctgacgccttctaccgatcaattccagctgccatatactggccggcctttatcatagcaactgctgcagcgattgttgccagtcaagccaccatatccgcaacctactcgatcataaagcaggctcttgcgctgggttgcttcccccgcgtgaagatcgtccacacctcgaagaaattccttggacagatctacatccctgacatcaactggatccttctggttctctgcattgctgtgactgctggattcaagaaccaaagccagataggaaacgcatacggtactgcggtggttatagtcatgctagtcacgacattcctcatggtgccaataatgctgctggtatggaagagccactggatcctcgtg

SEQ ID NO: 20027 - DNA, 1846 bp, Zea Mays
tgggaacaacaggggaactcgaatccctggccacgggcacggccgccactcagcagtacacaggagtagagtagtctggagtcaggacccaggagacgatgcaggacaatgacgcgcatagagaatggcatacgttcctttgagctctggcgcttactcaaggaaaaaaccaacttgccacaagtattgtgcatcggtggagcttacttggaaaccatgccgactagttggatatcgggattttcgactgaaagagctagcttgccaacaattggcccatggagtggatgaacaatatcctgtgaaaagtagcactgtggagcaagctcaggaccgccagccctgtctgccacaaggtgatgcttacttcgctggcctgtcgaagaaagaaatcgagagaaggcggaagattggcgctgccaacaaggggaaggttccctggacaaaaggcaggaaatggagtgaagagcacaagaaggtcatcaggcaacggactgctgaagctctgagagatcccaaggaagaaaatgttagggcaccgtcagctacatagacaaacaagcaaagacaagataagtgcggcgctgaggacggtctgggagaggcggatcgtttctgtccgatccagacagaaggttctgcagatctggtccaacagtatagctgaagcagcaaagaacggtggtcacggccaagatatgcttggctgggacagctacgagaggatcaagtcagagatggtatctacgttcctgtggatcaaggagaggggacgtatggtgaagaagcttgaaagggccgtggcaaaaatagctgccaagaggcttcaagtggtacggagaagggaagaacaggccacaaggatgaagaagctgaaacctgactgtcagacgttgctgcaaaacgcggaccgtcaaccagcaagagtggtagtatctgcaaggccaaagcttaaggagaggctagctaagtggcacggtcgaaagaaagagctcgagacagtgataagttcacgggcaaggaaaagaggattgcgaaatccaccacgaaggcaaatggcagcagaaagcctcgaggctctgtcaacttcggctgcaggagcaccataggaaggatgggcatgtaccctagctactgagcagctgggagctcgtagtcgccttatagagaagcagaagcccatgcctaatgaccaattcattaggcaggcacggggttttttgtttgcgttgctgaaactacgtgtagtaatttttgttttatagccttattaggctttctgtcaaaggaacatgtttatgctccctccaatgaaactacgtgtaacatgatttatgggtacaaaaaataaatgtactagaaaaatacagttaaaaaacatttgaataccactactcgtacacttacacttacgttaattgtcgaaatgaactgattactgccattttgggctgggcgtgccatacaacaatcatggggcaacatgtaacgtacgtctagtctaatcagcgcttcccaaacttaattaaagctggtaccaaaccaaggtggtagctgctacattcacaacgttgatgcgccaaacaagctggtccaatagctacctaactgcatcacacatatacacagctacaacaataggccagaatatccataacacaacaagaactatcctgtctgcgttagcatctgcctgcactgcacaagaggaaaaggaggaacagtgtaagcatcaaccaacatgtgctggactggaggatgctagagtagaaagtcacgtacgatcaatcaatacacagcagcagcagcagcagcagcagcctcagctagcattgtacgtctgatc

SEQ ID NO: 20028 - DNA, 82 bp, Zea Mays
ccggaaatcgtcatcgcccttacacatatcgatttgatttatgacatggatcagtacaaagacgatatcaagtatgaagagg

SEQ ID NO: 20029 - DNA, 3473 bp, Zea Mays
cgaggctgcgtctctcgaagtccaaaacgccccgccctggaaccctaaccctacctttcctctcccgccaccgcccgccccaatggcgaagccgatgaagtacgacgatgaggaggagatctcgtcctccgccgaggaggaggaccagtccgacgccgccggctccgtatctggcgaggaaggggatgacgacgacgaggatgctgcggcgccgcccgcggaggaagctgagggcgaggggcagcaggaggaggaggtcgacgaggaagagatcgaagccgtcactaccggcgctggagctgaggacgaggaggacgccggtgccgttaccgccgctgaaggcgacgacgagtcccagtccaccgaggacgacgagcccgtcgcgagggacaaggacgatgacgacgagactgatgcagtggttgggaagcgagagaaagcaaggctaaaagaactccagaagatgaagaaacataaaatccaagaaatattagatactcaaaatgccgccattgatgctgacatgaacaataaagggaagggacggttgaagtaccttcttcagcagacagaaatatttgctcactttgcaaaaggaagtcagtccaacgagaaaaagccacgcgggaggggacgccatgcatcaaagatgactgaagaagaggaagatgaagaatacctcaaagaggaagaagatgcccttgctggtgcagggggaacacgtttagtttcacagccttcatgcatcaagggaaagatgcgtgattatcaattagctggacttaattggcttatacgattgtatgagaatggtatcaatgggatattagctgatgagatgggacttgggaaaacacttcaaactatttcattgctgggctatctgcatgagttcagaggtataactggtcctcacatggtggttgcgccgaagtccacccttggcaactggatgaaggaaatccaacgtttttgccctatcctacgtgctgtgaagttcttgggcaatccagaagagcggaaccatataagggacgatttgctacagcctggaaaatttgatgtgtgcgtgactagttttgaaatggcaatcaaagaaaaatctgcgttgaggcgcttcagttggcgctacataattattgatgaagctcaccggataaaaaatgagaattctcttctatcgaagactatgaggatttacaacactaattatcgtctcctcatcacaggcactccactccagaataatctccatgagctctgggctctcctcaatttcttgctccctgaaatatttagctctgcggaaacctttgatgaatggtttcaaatttctggggaaaatgatcaacaggaggtggtccagcagcttcataaggttcttcgcccatttcttcttaggaggctcaagtctgatgtagaaaagggtctacctccgaagaaggaaaccatacttaaagttggaatgtctcagatgcaaaagcagtactatcgcgctctgcttcagaaggatttggaggttattaatgccggtggtgaacgcaagcgattgcttaacattgccatgcagctgcgcaagtgctgcaaccatccatatttgttccaaggagctgaacctggcccaccctacacaactggtgaacatctagttgagaatgcaggaaaaatggttctactagataaattgctgcccaagctaaaggagcgtgattccagagtcctaattttttcacagatgaccaggcttttggatatcttggaagattatcttatgtatagaggttatcagtattgtcgaattgacggaaatacaggtggagaagatcgtgatgcatccattgaagccttcaataagccaggaagtgaaaagtttgttttcttactttcaactagggcaggtggccttggtatcaacttggccactgctgatgttgtggttctttatgacagcgattggaatccacaagctgatctgcaagctcaggaccgtgcacataggataggtcaaaagaaagaagttcaagtgttccgcttttgcactgagataatgcaaacgaaattacagtacactatcgaggaaaaggtgattgagagagcatataagaagctagcattggatgctttagttattcagcaaggacgattggcagagcagaaaactgtcaataaggatgaccttctgcaaatggtgcggtttggtgctgaaatggttttcagttctaaggacagcacaataactgatgaggacattgaccgtattatagctaaaggagaggagacaacagctgaacttgatgcaaaaatgaaaaagttcacagaggacgccattaaatttaagatggatgataatgccgaactgtatgattttgatgatgagaaggatgaaaacaaggttgatttcaagaaacttgttagtgataactggatcgagccacctagaagagaaaggaagagaaactactctgagtctgattactttaagcaagcgcttcgccaaggtgcaccagcgaagcctagggagccaaggattccaagaatgccgcacttgcatgatttccagtttttcaataaccaaaggctaaatgaattgtacgaaaaggaagtgcggtacctcatgcaagcaaaccagaagaaagataccattgatggtgaagacgaagatcaattggagcctttaacagcagaggagcaggaagagaaggagcagttattagaagagggttttgcatcatggacaaggagagacttcaacacatttattcgtgcatgtgagaaatatggtcgcaatgatattaaaagtatatcctctgaaatggagggtaagacagaagaggaagttcaacgctatgctaaagttttcaaggagagatacaaggagctgactgattatgatagaattataaaaaatattgaaaggggggaagcaagaatatcccgcaaggatgagattatgaaggctattgggaagaagttagaccgctacaagaacccatggttagagttgaaaattcaatatggccaaaataaagggaagttctataatgaggaatgtgaccgctttatgaatacgactccaacaaagagagcagcactaaggaattcagagggtgagagtgctccgttgagctcattcaagaggcgacggcagtctcttatggacgattatgtgggctcgggaaggcgaaagagagggtgatgtgatgtttgacatcctgcctttggagctctcagcgagatgcagtctctgcaatgctttaagcccgtacgtgctgtgcttagtttcttgtgcacgtgagttgaatgcctcaagggctggtgactttgtagttgctgtagattcggacttcgcaattgcaactgttgctacacttttgattcactttttcatcgtggccctaacactcattccaaattataagattagagattttaacttaacactagagttcgatcaaatttatgcaataaaataa

SEQ ID NO: 20030 - DNA, 703 bp, Zea Mays
gaagaatcatgtttttttttattccaggttctcgtttgataagactgtgtatagttcaattgaaaacttacagtttgttcataatgttcatgactctgggagcctgattgcgctgcttcacagagttcatcattcttggcaaaccttccacggacacggggcctgctatccgccaaggtttttctacatgcgtactgcatttcgttgtatgtcaggctgtcagcacagctgaatacgtaagatgtccatgcggaggcgacaagcggacgaccttaaacgtggagtcttccagtactgatagttccgtcggagcctggaagaactgctccagtttgctgatacatggctccatccagacccatgaaccctccagctgctacggctgccatgaagcactcatcatagtctgtagcgagcggcatcaaggcagatgcactgctgctcatctgcactggaggaggcacctgctcgtctaaggtctctggaagtcccatctggtcgaactgccctatgctggcctcatcggtggcagttggatagtatgctgctacctctgataggccatcgatctgcgggaggaacccggcgtcaaggccatggtgctgctcttcctccaggagggctgtgagagtggtgtcgaaggatgtcaacggggtgtaggctgtggctccaccagcagctgcggtgtcttcactgtagccgc

SEQ ID NO: 20031 - DNA, 1751 bp, Zea Mays
cacttcccgagaccgcgagcgaatccaccaccaccatgtgagcagacaaaggttggctacacaaacaggaaaagaatagtatatccgcccccatattgatcctccccacgtcgccgtgctcgttttgcgcgtccaccagcccgccccccaaccccacccagcgcgacgaagccggggggcgatcgctccagcgccgccggcgacctcgccccgggagccgccggcggtaccccgctctctgtcccgcctcaacgaaccctcaggtccaagtagttcgtttcgtgagttatccaaagttgcgccgcaaagatgagtactgctaatcgctaccaacacatcaagtcaactaagcctgttgcaaagcaagaaaattgaaggatctcatgataaaaagtgacaataggatatgtgctgactgtggtgcacctgatcccaaatgggcatctgctaatattggagtgtttctttgcttaaaatgtggagatgttcatagggcacttggacctgacatctcaaaggttttatctgtaactttggatgattggtctgatagtgatatcgactccatggttgaggttggtggaaactcatatgcaaattcaatttatgaggcttttcttccaaaagatcacccaaaacccaaaccagattcaacgatggaatataggacaaaatttataagagctaagtatgagacacaagattttttgaagccaagtttgcgcatttcatcaagatcatcttttaaatctaccacttctgtgaagagtgtagatagcaatttctctagcacttcaaggaaggatgtctttgaagatacaagagaatttgttggagagttgaatatcacactggtcaaaggcaccaacttggccgttagagacatgctaacaagtgatccatatgttgttttaacgctcggagggcagaaagttcaatcaacggttaaaaaaagtgatctgaatccggtatggaatgaagtgcttaagatatctgttcctcgaaattatggacctctaaaacttgaagtgtatgaccatgatatgttctcagctgatgatatcatgggtgaagcagagatagatctccagccaatgatcacagccgccatggcctttggagatacttcacgtcttggtgacatgcaaattgggaggtggttcatgaccaaagacaacgccctgatgaaagatagcacggtgaatgttgtggcaggtaaggtaaaacaggaggtgcacttaaagctacagaacgtagaatcaggtgagttggagttggagctagaatgggttccgatcctctagactaatgataactcccctgatctttgtctaaaaatctatactcaagatgcatcgatgtttccaagctgtccacttgatggtcttggacatttttgctggatggtttgaatttgttaaaaatgtcactgtagaatatcatggtgtaactgtcggttgtactcgcgcctttcacccccctcccggtaactggttatcatgccttgtaagcactcgctgtctcttgattgttgttgcattgtcccattgaaaggacctgtgtcttgtaagagatggcaattatagccagtgaactctttgtgctgatgccatgttggcgctgtagtagctaatcgggttgttggttctcctggagctttgcttagatgagtctagcccgttcagttttttcgttggagaagctgctgcaccggttactgacaaatgacattttgctgacactttgttctt

SEQ ID NO: 20032 - DNA, 415 bp, Zea Mays
ctcggttctacccctggaaccgggtgtgacattgacctcctgcgcgtgtatttttgtatataatactggggggagtacatgatctatcaaggatatctggaaaggcagagacatcacacacacacgacacatgcatgcattttactagcagctagcagtactccgagtccaccccaagctagtcaatgacaaaccaaacctccccaaatctttacacgttttatgttactaggaaccacatgttttctgttatagtcttggatttgatttgactagagactaaccggtgcttttcttgctctgccacccaaattgttcgttccctccccctcgctagcagctcacgcccaccaagtgacgacgagagggagacgggacacgcactttctgttgccgtgctctcaccaaacttgca

SEQ ID NO: 20033 - DNA, 1591 bp, Zea Mays
acacgagtatgaacagacgggggctcttgggtgggtctgggcagggcatctccggactcccacacagctcctcttggtggcgccctctgacatctcctttttcctcgccttcgatcggtggccgccgccctcctcgacttccgtcccgccgccatgaagggacccggcctcttctccgacatcggcaagaaggaaggatctactcacctacgactagaagctgtccatctccaccgccagcgcctctggagtggcgcccagacccggcaatccgttagaatccgttcgtcgcagaggccatgagctcggcgcaggatccgttctacatcgtccgggaggagatccaggagtcgattgataaattgcaaagtaccttccaccgctgggagcaaactgcttcaaacacaggagaatatgttcatctgacaaaggagcttctgatcagctgtgaaagtatcgagtggcaggtagatgagctagaaaagacaatctcagttgcatcaagggatccggcatactatggacttgatgaagttgagctttccagacgaagaaactggactggttcttctcataagcaggtcggtacagtcaagagagctattgaaaagggcaagagcaatgcagcaacttcaaaataccaggatacaagcaggaccaaccactattctgcccaagataatgatgactttctttcttcagaatcagatagacagcttctactcatgaggcagcaggatgaagaacttgatgagctcagtgaaagtgtccaaaggattggtggcgtgggactaaccatacacgaagagctgtctggacaggaaaggatcctaaacgacctaagcttggagatggagactacttccaacagacttgatttcgtgcagaaaagagtggccatggtgataaagaaggccggcatcaagggtcagatcatgctgatcgtgttcctgattgttctgttcatcattcttttcgttttggtgttcttgacatagccaagtgcaccagggtcctcggttttctctctcatttgttgtgcctccctagtacgaacactagtaaattggtcgcgctccgcgtgagttgttgcttgatgtgcttacataagatgtagaatcttgttgctataggcatgtatcaacaggtgctagcagcttgcagttctcctaacagaaacaggtcgaagcagattttttgttctccaagtgatcagtttgtccaaggttgttaggctttccgtaatcgcttcgagtttgcttttcaagatcatcattcacatgttgcttgttagactttggctcaacataaggaggcagcatggttagtgccctgtccaggtctccttgtcctttttgcactggatatctgtcatggtcgggcgcacgtatgtgaggcgacatcgtgcccgtgacgtgcgccgcgccctagagcaagcagcggccaggcaggacagctaagggataggataggatagcctgctgttatccagttccttagattgtggagtgctgttattcagttccttagattagggagttccttagattatggagtttgttgctcctttcggttgggcctctggccatat

SEQ ID NO: 20034 - DNA, 1687 bp, Zea Mays
gtaaaaacctgagtgctgcatctgccttgcgtagtacggggagaaggaggaggttcggcagctgccgtgcacacacgtgtttcatctcaagtgcatatacaggtggctcaggatcatctcctcttgccctctctgcaagcaagagctcaagtgaactttatattcattacacacatgacattctcgcttattctttggatcaaggtgttagtatcctagacacaacagatattttccagctaacaagggaaatcaaggaagaattgatctttatattagcaggcggatgcaatcactaatcaaaaccacgatgcaaggtaacctaaatggattttaaattttattttggattgttaaatctttatttctgactactattgttttatgtcgtggatgccctcgtgaggttctacgccgacgccttcaggagggattcacagaggccatggtgaggatggccagcttgagtcggctcaccgggagcagcgcgagatccgctacaactaaatgataggaggcgattcccatttctcagtgatgtcgatgtcctgtactcctgtatatttggattcaacaatatgccattagtatgctgtcaagcgtcctatttgcaagagataaatggcttacgcccgaggggcttattcttccttatcatggtcggtcgtgactttggttatccactgaaaagatatgcttggtggtgctttcttgtgttgaagaacaagtatcccacggaaccacaaccgtttgtattatctggtgatttcctacattattagctggcctaactaaaccatgcgctcagaccctaaaccagctgtaagtctgtaacttaaaagcacagtgcactagcggaatggggttccttgctttttggagcgtttccccagtcagatcggcggcagggcaggtcacgtggacggggctccttgttgctggaactaaataccgtggagagtttgaagtgagactaaagaaacttatggaggaaattaagcaaaatgaagacattattctctttattgattaagtgcacacactgattggagcagtgcattggtgccacaacactggatgagtataggaagcatatagagaaagatcctgccttggaaagaaggtttcaaccagttaaggttccagagcctactatggatgaaacaatacagatcttaagaggacttcgtgagagatatgaacttcatcacaaactgagatacacagatgatgctttaattgctgctgcacagctgtcttatcagtatatcagcgatcgttttctgcctgacaaagccattgacttgattgatgaagctggatctcgtgttaggctgaggcatgcgcagctccctgatgaagccaaagagctggacaaagagctgcggcagataagcaagcagaaaaatgaggctgtacgtggccaagattttgagaaggtatactgttgtttggcacagcggtgacaaagccgatccgctcccacctctctagcaacgtcgatatggttaataccaagcattatgttgtttccttttgagataaatattttgttactgattttaccttttgtctcctcttcttgttttttgttctagaatctgtagcaaatggctaacgatgaggatatccattactttgtttatgacaataaaactgatatgttcaagattccgtagcaacgcac

SEQ ID NO: 20035 - DNA, 806 bp, Zea Mays
gaacttgattgcttgactatgttttatgtaagaaggcggttatcaagatggatgaatctgggtattttcatattaagaacactggaaaatgtccaatctttgttaatagcaaggaaataccaagctgcaaacgcatcaacctaagctcagactcattaatcgagataaaggacatgaggtttattttccatgtaaaccaagaggctgtgaggcagtacattgatcgtgacctgaagccagaacgctaatttcccctggctttccagtcagcagcagcctgtgagtgactgcctcattaacagcaatagaagtagcatagcagtaaatttgagtaagcattgctcgtttaggatgttccttcatatgatgttaacaagttaggttcacttggctccggtctgtaaatggttgtagtttgttgcgttttctgtctgtttggcgggcataaatcatgcatataaccagcgcatttgcttccagtttgtacctacactcccaggaatgatttcatttgtaatactggcaccctagattgtggtgactgccgccaagagcaagaggcaaccaatgcaataaagtgcggaaaagaatcaatagaagggtagattctagggtagaacaggaggagggtgcacttgtgcaagaaaccattcggttcttgcgacgctataagcataaactttattggtttttatttatataccctgatgatcttgaagcacgaactctgaatcagctctcggggcttgacggtggtggcctggtgggttttacacatttgcagatgttggaaaagcaatgcgctg

SEQ ID NO: 20036 - DNA, 2140 bp, Zea Mays
actgagagtctgagactttactggaaatgtctcccgttcacaaaaaagaaggacatgagaagtggggggtggtgactctggctccaaaagaccaaagtttgagcaggatggagcaggagatattgttatggagccacacttaaccgaggataaacctgtgcggatagaccaagaatcatcgtcaacatctaatagggatgctgaggcaagcacatctactagcatgaaacctgttaaaactgaagaagcaggagcagatcttcttcccaaagagatgaatattatgacaattagcgacgataaagctgatggccataatgataaggaaggtgagggtgttacacttgatgggactggaacagagacagggcagataattgtgacaacaataggaggtcacaatgggaagccaaagcagaaggtctcatacatggcagaattggttgttggtactggttcgtttggtattgttttccaggcgaaatgcttggaaactgacgagacggtggcgataaaaaaggtgttacaagataagcgctacaagaatagagagctccagactatgcagttacatgaccacccgaatgtagttcagctgaagcatcacttcttttcaacaactcaaaagggagaagtttacctcaaccttgtacttgaatttgtatccgagacagtttatcgtgttgccaaatactacaaccggatgaaccagcgtgtacccataatatatgttaagttgtatgcatatcagatgtgccgtgcgcttgcttacatccatcgagttgtcggtgtgtgtcatcgtgatattaaacctcaaaatctactggtaagttcccagatccacttttcctcgaagcagtttgtgtggttgttagtgttgcaagtattctgttattcccattttggaccattttgctaccatcttgcttgtaagttgtaacacctgtcaacgcagaaatactgtgtaagtgcacatctgcaggtttgtcatgcaaaatgtctcttaaatctttggagtattttttttgttcagttttacgctaactgctgaaaatgttccttattgcaacttgattaaccttccaggtcaatcctcatacacatcaacttaagatttgtgattttgggagcgctaaaaaattggtccctggtgagcctaacatatcgtacatttgctcgcggtattatagggctcctgaactaatatttggagctacggagtataccactgcgatcgatatctggtctgttggctgtgtagtggctgagcttctgattggtcagcctttgtttcctggtgaaagtggtgttgaccaactggtggaaataataaagattttgggtactccaacaagagaggagatcaggtgcatgaatccaaattattccgaattcaagttccctcagataaaagcccatccatggcacaagctttttggtaagcgcatgccacccgaggctgtcgatctcgtgtcaaggctgctccagtactcaccgaacctgcgctgcactgctgtcgacgcctgtgcccatccgttcttcgatgagctgcgggaccccaaggcttgcctgccgaacggacggccaatgccaccgttgttcgacttcacagcagccgaactcgaagggctccccgccgagcttgtccaccggatcgttcctgaacacatgaggaaggaagtgaattaggtggacggacgtactggggcaaaaaaaaaaaaaaaactccctgtttctctgttggttctgagagatgtgtgagggcacggatatggaggagcggtggtgtattgtaattgtaaagagggctgaaagaaaggtccctctggttgggcgtgtcaccaaagagtggccctagaggcaaaccttacgtttgctcgttgcccttggtgtgtacccagatgtgtatcgatgacataggctggctgctgtatcatcatcagggttgacgctgaacaagagaaattcaagcagggtgctgctagctcgcttcctcccgtagctggaaaccccagaatgccagtttccatcactgcacgtcgtcgcgctgtccactggtgtcccgtaagcatatagagctctgccggctccgctattggcttgcgtgtgtctatcgataatgacttctacggacgctacc

SEQ ID NO: 20037 - DNA, 2071 bp, Zea Mays
ggttgtccatggcaccagccgtactcgaaaatatcaaccagctttgcactaaggaatcagttaccaagtcggctccaagatcagatgatctcacatcttagcttgaagttcagaacagattcagaaggtcttcaacaacaagagacccttgatgcgcttcccaaggctataagatcaggcatttctcagtatctgtttttcaatcttgtccaaaaagtttacttgtttgaaggggtgtccaatgacctaatttttcaactggtttctgagatgaaagctgaatattttccacctagggaagatgtgatactgcagaatgaagcacccacagacttctatattttagttactggtagcgcggagttgatagagttgcgaaatggcggggaacagatggctggagtggctaaggcaggagatgttgtcggagaaattggggttctttgctataggccccaactattcacagttcgaacaaaatcattatgccagcttctgcgtatgaatcgcactgcctttctcagccttgttcaatccaatgttgcagatggaacaataataatgaacaaccttatgcagttactaaaacagcagaaagacaacagtgtaatggtgggtgttcttaaggagattgagaacatgctagcgcggggtcgtctggacttgccaattaccctctgttttgcggtaaataaaggagacgatttaatgttacatcaacttctgaagcgtggtttggatccaaatgaatcagataacaatgggcatacagcactgcatatagctgcttccaaaggagacgaacaatgtgtcaagcttcttctagactacggagctgatccaaatgctagagactctgaaggaaaagtgcctctatgggaggctttatgtgaaaagcacaatgcagtgatagagctgttagtagagagtggtgcagagctatcatctggagacacggccttgtatgcttgcatcgctgttgaggaaaatgatgctgagctgcttgagaacgttatccgttatggtggcaacataaacaacccaacgaaagacggaaccacaccgctgcatcgtgcggtctgtgatggaaatgttcagatggttgagttgttgctggaacacggagctgacgtcgacaagcaggacagtaatggctggtcgccaagagatctagctgatcagcaaggccatgatgacattcaggctctcttcaaatcacgaaaagcacacaggaagcatgcctcaaatggcagagtggcacctatgctgatagggagattcaacagtgagccctcgatgccagatatgagccatgaaaacgccagagtacgcagcgaagttgttccgcagaagctcctccgaaagagggtgagtttccagaattctcttttcggcgtcatctcttcgtcccacgcccaccaggacaccggccgtctgctctcgaaaggcctcgctggaacagagggtccaaattgccgtcacgactccctcatcagggtgacaatcagctgccccgagaagggggggaacgccgcagggaagctcgtgcgcctaccgcggtcgatggccgagcttctcgaactaggtgcaaagaagttcggcatcaagcctggcaaggtcctgacagttgggggtgctgagattgatgaggtggagcttatcagagacggtgatcatattcttctcgtcagtgatgaatgggtgccagatgttgagcaaattaggccttaacaataagtgagccagctgtggtgctcttattgcaatttgacatgatatggggaaacatgcccctgtgaccctgtgtgcatcagtgcatgtcccccatttaaactgaagtgtagcttatgatggttttgaagctgtaggatgtatccagcttggaaatgaatttgtagtcagctggtctgtatgtagtttcgtcatctctttccatgggaagggattcacaaaatgtaattacatgatttcttttttttcctgtctttagatcaagctttctctggaagtgagaaatattcgtgagtcatgaattttgagatattgatcctatcagttcattttagttgct

SEQ ID NO: 20038 - DNA, 2263 bp, Zea Mays
aaagcataaagattagtggcccggaacctttgcggctttaccctcctggcctcctgtcctgccctgcctttccccccgcatgctctcgctcgctctctcgttctcgtggttctcccgagtcccgtgccgctcgagtgcgccgtctgcgtctctagtggcgacgactgggcgaccgccgccgccgccctacgcaaggtgcccagctctccattttcggtcccttcgccggacacgagcacccgccaggataatatgttgtccacgcatgaggcaaatgctgatcagtttgatcttctttcttatgtttcttctgagaacttcggctcctcttgtctgcctggcgagagctatcaatctgccacagtagatcatgaaaaacgacctctttctgatgtcaagacatgccaaattgcttgcaaacgtccaaagcaaacagatcactgtacctggttatattcctttgaggaacaccctttgaccagtgaagtgggaatatcttctccagctttatatgatggattggttgagatcaaacaaccaaatgacattcctgcaattaatggtgccacaacctgcagtggtagttcagtgatcccttgccgtaatcatgatcaatcaattttagtggaaaacttagacatacctgattgggcgacttccttccctggttattttgaagactgtgggccagttgttacatatagccatgttgatgacattggttcgcctagaaagggtgtgccaattggacctgagcaccaggctgacattccagaatggaggcccctaaactctatgattgtacctggtgcttcagagttttgtgctaatctggattgtagttctgcttccacttcagagtctgttcccagaggtgatgactatgtaagtgacaagtggatcaggtactgtgttgttccggtgacatgctgctcatctcctgttgactgggctggagacagcaaaatagattgcaactgcagtgacgagggttctatgaggtgttccagacagcatattattgaagcaagggataaccttaaaatgatcttgggacaggacaggtttcgtgagttaggtctttgtgaaatgggagaggatgttgctctgagatggactgatgaggaggagaagctattccaaagagttgttttcttaaatcctgtctccttgggcaagaacttttgggaccaccttccggatgcatttcctaataaaactagccaggagtttgttagctactattttaacgttttcatgctcaggaaaagggctcagcagaacaggtctgacgtgttggctgtggacagtgatgatgatgaactgcatggtgaacctctagctgagcgggtggaaggggatcctgcagttgagtcctctacacatgaacattctgtcagcaattctctgcccatggatgatgaccataaagagtttgaaggagcacagtttgatggatctttgtgtgagaagtcagtatacaatgcagtcgagtgcagacatctaccaaatcagatgcctgcagattcaaatacggtgaacactgcactagatgtttgtgaccaagataatggagctcagtgttcagagtttcacatgtcactgccgagcgatacttcaaacagtcttggggatcaaagtgcatctgtataggagatgttgtgtggacaaggctctttggccgtcgagatgtccaaccaagaccatgaacaacaatgaaatggataacacattcagtttggatctgacatctacttcagatgggtgctgttttgccatggcttggagttgtaaattcagcttcatctggagttgatagttcatgaagttgtacattcttcaactactatgtacttttcgcggcattttgttagcacacttggaactcaactgagcttccacggggttttgctgcccccaccccctaccccccatccccattcgagaaatcaaccttgttgtatgtaccatctgttgtattttcatcgctgtatgtccattcgagaaactgaacatgtagattgtaagagttgccactgtctggattacccgcggtggttttcgtttgcagaccgagtgctttcggaatcgattcatgcaaataatgtgctaccgacagactccagttgaatccatttgatgtgatacgtttgtcacgactgcattcttttgttttaaagacagccagtgtaaggaatgtttggagtgtttggtttgaggaatgatgtagtccatcatcttttcactccttactttttttgtt

SEQ ID NO: 20039 - DNA, 4167 bp, Zea Mays
ggcctctctcgctccctctagccagatttcccgctcgaagtttcaccccaaacaatcagcttccctcgtctccccgcctcgtcgctgcctctcctcccattttcccgaccccgagctcgtcgaccccgcgtctacgcttctcggcctgctggtctcccttatcgattgggcacagccgccgccgcagccaccagatcgctttagggccttaggggggaggggagagggtgtgtctgtgcaccgccggtagctggggtaactgccccacccgccgtaggagcttcagcgagcgatggaaccgaggcggcgccagcagcagcagtcgatcctctcatttctccagaagcagccgccgtcatggagggatccctccggggagggcacgcctcccgagaagccaccgcggccccctatggggtccgtcgccgggatcatggagaggctagtgcgccctcctcctcctccgcaggccagtcacggatgggcgcgaaatcaatacgattcccaggttagacattcagaggggaaaaacttgcctgtggaaaatcaagttctctcaaatgagtgcttaggtgcattgttctcaagacctatttacggcgaacacagcagaacaatcctttccccagaaggaggtgcagatatgtctccctctcaggagccccaaaagcactcactgaggtcttccactgatgaatctacaagagcaaccaaagaagttattctggagcatccaaagaagttattctcagagtctcatactaattgcattcatgctacagccttaaatgagaactttggtgtgcaaactccttcccaggttgcctcaaagaaaatcttcccagggcttgctcatggtgctgatacacctttaactggatatggttcagaacaaactcttttgcagcattcatcaaagaagttctcattggtttctgctaatggtaaatacactagagcagcggtgacaccgtttgagcaaaattcaaataatacccgtgcagaggaactttcaaagatgcgctcagggtcttcagacatgttgtatcttaaaccaacaaatttgtctgcagaactcgagacaaatggaaccccattgaagaatcactcaaagaattcctccttgcttatggacgcaatgcaggcagctattcctcgcctgaagcgagttcaggaagaccaaggtgtggatgccaacaaccaatgccctcctttgtgggccatgaacaagaagatgaaatcagctcattgttctattgaaaagaaggatcatgatgaaatggctggtagcgcgcgtagcaaatttgagtggctgaattcatttgccatcagagatgcaaataaaaggcggccaaatgatccactttatgacaagagtacccttttcattccacctgatgcattgagaaaaatgtcaacatctcaaaagcaatactggaatattaagtgcaaatatatggatgttgtcctctttttcaaagtggggaaattttatgagctctatgagctagatgctgagattggccaaaaagaacttgactggaaaatgactgttagtggggtgggcaagtgcagacaggttggtatttcagaaagtggtatagatgatgctgttgataagcttatagctcgggggtataaagttggaagaatagaacaaatggaatctgcaaaccaggccaaagctagaggagtacattctgttattgaaagaaagttggttcatgtgtccacaccatcaaccgcggttgataacattggtactgatgctgttcaccttctggcactgaaagaggtgaccctagcttctagcggtttccaggtctttggatttgctttcctagactatgctgcccttaaaatttgggtgggttcagtccaagatgatgactcgtctgcagctttgggtgctttgttgatgcaggtttctcctagagaattaatctatgaaacctcaggcatctcaaaagaaactcaaaggacaataagaaaatatgcctcagcaggatctgtgaagatgcagctgacccccctctccgggatagatttctctgatgctgcacagattcgaaatttaatacattctaaagggttctttaatgcatcaacagagtcatggttatctgctttggattgcacaatgaatcaagatgtagttatttgtgcacttggtggacttattggccatttgactaggctcatgttacatgatgccctgaaaaatggggaagtcttaccataccatgtgtacaaaacatgtttaaggatggatggccagactcttgtgaacctcgagattttcagcaacaatttcaatggtggttcatctggtactttatataagcaccttaatcactgtgtcacagcatctggtaagcggatgctaagaaggtggatttgtcatccacttaaagacattgatgctatcaataaaaggcttgatgttgttgaggggtttatccaaaactgtggactaggccctacaacacttgggtatctccagaaaattcctgatcttgagagattattaggacaagttagatccactgttgggttatcatctttgcttcaactgccctttattggagaaaaaataataaagaaacggattaaaacatttataatgcttatcaatggcctccgcaatggtattgacttgctaaatgatttacaaagagcggaccatggtatcttggcgctttataagattgtggatattccatcattgagctatcttcctgagttaatccataagtttgaagagagaatgcaaaatgagtttccatgtggccaggtttctgatgtcaatgccaatggtgccaacgatttggctgctctgatggacgtttttatcggaaaggcttctgaatggtctttggtgatcaatgccgtcagcactattgatgtgcttaggtcctttgctgcaatgacattgtcatcatttggtgccatgtgcagaccacaagttctgctgaaagatgatgtgcctgtacttcgtatgaagggtctgtggcatccctacgcttttgcgggaaatgcaaatagtctggtaccaaatgatttaacccttggtcaggatttatctggtctcaatcgttttgcattgctgttaactggtccaaatatgggtgggaaatccacaatcatgcgtgccacctgcctggctgttgtacttgctcagcttggctgttatgtcccctgcacgtcatgtgagttgacccttgcggattccatctttacgcgcctcggtgcaacagatcggattatgactggggaaagtacttttctcgttgaatgtactgagactgcctctgttcttcagaaagcaactgtggactcgcttgtcttgcttgatgagcttggcagaggaactagcacatttgatggatatgcaatcgcatatgctgtgtttcgccacctagtggagcgagtgcgatgccgtcagctctttgctacccactaccattctcttacaaaggagttcgcctcgcaccctcacgtgagcctccagcacatggcctgcatgttcaagccaaggagcgacggcaacggccagaaggagctgaccttcctataccggctgacctcgggggcctgtccagaaagctacggcctgcaggtcgccgcaatggcagggatcccgaagtcgatagtggagaaggcgtctgtcgcgggccaggtgatgagggctaagatcgccgggaacttcaagtcgagcgaacagcgagctgagttctcgaccctccacgaggaatggctgagggcggccctggcggtgagcgcgatggacggacaaccggacgacgacgacgtcatggacacgctgttctgcatccagcaagagctgaagtctcacttcaggaaggcgagatgagcattcgccgccgccgctgatcgcgtacgtgggagtactaattatcaatgcctagattcttcagtgatgtcgtatctttacaaccatggtagatataatgtaatccgcgttttttttccatggcacgaatcctgtactttaaacaaagtatcttgtgtatatatgttctgtgctatgtcttgtttgcattgggcagcaaggaccactatccttaatcacttccaccgtttatgtgcatcatatacatttgtgtttggtttgaggaataaaatagtttattatcttttcacttt

SEQ ID NO: 20040 - DNA, 2333 bp, Zea Mays
cctttcaattcgtagtactcgaacccgggagagccaccacctaccagacagaggttggaagcgacggcgctgccggagatggagacggagacggaggcggcagcggcgaggcgggcgaaggagtctctggagctggctttccagatgtcccagatcctagacaccggcctcgaccgccacaccctgtcgctgctcatggcgctttgcgaccgcggagccaaccccgaggcattggccgccctcgtccgcgagctctcctctgctgctcccccaacctccgccgcggcttcctcccccgtgagcaacggcgccgcggggccggcctcggcaattgcgcccacgttctcctccggccttcgccgtccctagggtaaaagaagaaattgagtcggcttttgcaaaccatgcctctatgatggcaaggagtgtcacagacagtgttccatctgtgtcaaagaatttgcagctgcagttcatgaccagactttctcttccaatatttactggatccaagattgaaggagagggctccttaagtataactattgctctagtcgacgctttgacaagacaaattgtagcaccaggcaaagagttccagataaaggtcgagattgtagttctggagggggattttgaaagtggagaagatgatgactggacagctcaggagtttaacaataacattgttaaagaaagagaaggcaaaaggcccttgatttctggggatgcattcattgccctcgtcgatggcattggaacagtaggggaactttcattcacagataactccagctggacacggagccgaaagttcaggctaggagcaagaacagaggatggttctttcaatggtgtaagagtacgggaagcaaaaactgaatcatttgtggttaaggaccatcgaggagaattgtacaagaagcaccacccaccatttcttgaagatgaagtctggcgcctagagaaaattggcaaggaaggtgcttttcacaagcgtttgaatagggagaacatttgcactgtcaaagattttctcaccttgttaaatcttgatgcttctaggcttcgaaagatattaggtggtggcatgtcaacaaagatgtgggaggccactgtggaacatgcaaaaacatgtgttctaactgacaaagtgcatcactactatcctgatggtctaaacaaagctggtgttgtattcaatgtagttggagaagtaagagggttaatatctgataaatatgtttttgttgatgactttactgaaaaggagaaggccgaagcacgtgcagcagtgaagcaagcatatgaacactggaaggatgtccatacttgtgacaatgaaacgcttgtggaaaacccttcacatccattcaatttgggatctccatctttgcatgaaaatcagtataaccagttgcccacacaagtttctactgatggttttagtttgagcaattcggccatactatcacccaacattttctcaatggagccatcgagtgctttagacccttgtagtatattggagactgaagaaagcagtgctaatcaatttcagtcggtgttgcccccagttggtggccatgaagtgccccgagaacctcagacgctggataagttctccaactcgttggtatatgatgactgcagcgcccatccctcattcagtgaaagctattacagcactgtagatccaagcatgtccttcgacacacaagatcttggagctgcactgaaaggcttcattgcaaccatatcgaagcctaaggcggcatatagaggatggagaacattgtcttatgtgctaggatggattttctataccaagagaattgttgcaaggagaaagaaacatgggaaataagtgaacacaagtctttgtgtagttaaatgcgaatataagcttagagaatgagagattatgtacattagtttgtttcttgtcacagctggtaagctctgctggtttcttcagctgtacatgggctgtcagctatggttcgctatgcggctgtaaataatcaaatgaagtttgtacagggtgagggatgcgcatagcatttctgatgttttggatggatgccggagcttgctttttgatgcggcccgtgtattatctatgtagtagtatgcagtatgctgcttaattctgcagtattttcgacatttggaatctatatgtcgcatggtaacaagtttaattctgcttattttcgtacacagataatactgcagaattaccatgccgcaaactgatttttatgtagacagtaatgtgtttatggatatggttgacacttaaataaaaagctgggcagcgtgcacatgcc

SEQ ID NO: 20041 - DNA, 160 bp, Zea Mays
gtggctgagcatagcccctgcactcgcccttcctctgctgcaacagcagtagcccgttccacggtgtcgtcgacctttgctagttgtcaacaccacgcctcgcgcggatcgtccggtggtaagcgatttaggaagatggtagtactatgtttgaataagc

SEQ ID NO: 20042 - DNA, 3437 bp, Zea Mays
ggtgtaattttttattattctaatttttattataatttctatcatgcgtgtatatgttctaataaatagaaaagtgtgaacatgtggcagagtctaagtaatgccttgtacgctatgtcgtggacctatgattgaattagagaaataaagtccaaccctagaaaactctcgcatcgtcactccaaatcagccgctagggctgcattcatccacctcgtgcttatcgcctactccaacgccgactcctgctcgtcggtcgtcgcctcgtccagctctctccgcccctccagcctagcctagcccctcctgctcactgcgtcgtctccagaatccggcctacgaccgttggcggctggtgcccccaccggcaatcggtggtcatggtctgtccctgctcactccattcagatccgctatgcgcgaggcgcaactggatctatcgtattcctggttgctctctccctctccgcgggcgatgcgcctctctaggttctaccggcgtccgtccaaccggtgttcagcgtgccttcgcaggcccccttctctgccttcgatgagtgcatttggtgagtggtgacacaactgggcggagtggtgaactagtgattgatgcgcttgccggcgacttgcaaactaagtcagaatcggcttctcatcttcctatccctttgtgtgatactactactctgtatgtggaaaaaataattattccctggtttaatattatttgttcttaagtctgaaaattcactcatatagttcatttgtgcagtgttttttagtccttagctattagagaatgatgcctggtaatacctgaatcggccactgcattttattatcctgttgttattaaatttggctattagataatgccagcgttttttattatcctgaatcggccactgcattttttagtccttagctattagagaatgatgtctgaaaattcactcgtatagataaggaacgttgtctagcaacaagagagatcatgtcacaaaaaatcctcaagctaaaacaagaacatgttacactatattttattatcctgttgttattaaatttggctcggggcttcggtaatacctgaatcggccactgcatagagtagtaaacctaaaaaaaatcagactcttattgttatataatttccatggtttcttcctctatgaataggagagaaaaattgatcctagattgcagtctactaagatgcatgcaatgcgttatctccttatacagttactgttacaagttcttctccatccagatcagtattgggaggctgcacttgatgtgactatatgttggaagaaatcctttcttgtcattgctcgaggtgataactccagtgactatattgtcgaccttcacttctcgctacaacaaagatgcggtccttcttaccatccttttactatctgatttccctaaaataattttgtttgactattcaaatcatgcttggagaggatcatggcgtgggatcagaaagagcaccaacaattttctacatgttgtacaatggggttatgattacttgaattttgtcatttgttttagtaattatgtgatctgcaattgatctagcacaagcacattcaaattgaccaatttctactagtgctataactttattccgaatggatggcttccttccggaaagactaaactgaataattatgtcaaagttgtttcactagtttggcctaataggtattgatctatggtatctagactacatattgtactatatggttgattgttctgatttcgggcttggttaatctgacgtttctagcatccaaacatatagatatatgtcagctacctgtgtaccatgcacgaataatcctataaattcaggttgaatattttctgcatgtaacctaaaacttctacgctatggtctttcacttacaggttgttaaagaagagcagatgtgctattttggttggtctaaaatcaggggtggaccaacagggggtccaggggggccacggcacaccctaggccagcccagcaaggaccccacccctttgtcgcccagccgctagcacgtagctaccacgactagtgcccaggtcaccaccgccatgcctagcgccaagccaccactcacccgcacccaacaccaagtcgccgcaatcctagtgcccattgtacatgtgaacatataaagctaccatgatcatggaggtagcaggtgcagagacacccatcaaggtttcttcgtctctagtcatttgttacgcaaattcaaatacaggtaaaagtagcattgtataaggtgcagattgatttgtacagatgaggttgcttctgaaaattgacaggaaaattccttggtatacttgtatgcaggcttttggaaagttgaggcctatttgtgcacaatagtatactaaccattgaagattattactctcatctattgcaggtacattattctgaaactcagttcatgaaatggaatgagttcagtttcaatatagcagaatagcatgctagcagcaaacatgcacgtgcccagacttcattcaggtgacatctttcattgtctcttctcaatcatttatagtgtcatttcgagttttcatggcttgtattgtgctatgagtttttagtgcttcatggtgggcttagttgcatgaagggttctcagctttgagattaattaccaatgcaccttttgagagctcaaaagatggtcttcgcattgagctaggtgacgtctatggtgttgtgctgcgggcaaggcccacacaatgtgatcgggctgcacgccaatgttcaacatgtgccccaaccagaatgtgtatgctactactaatataacattcgtcattggttggttcaccccaagaggtttgctgcatgttcatggagctggtggataataaattttagttgttctttttgtggtttattagatgacatcaattagtgttcaattgagccttagagtaggatgaatacaactgtcttaagtttctttgttccagcagattgtttgggggcaaggttacctatgaacttcaagaattggtcttatgatattgttagtttgtacaacttagtgttaggttgctcgacttcttcatgaatgaggtgttagacattggtcgatcatgcagggttgaaggtgcttcatataactaaatctaccatgactttctaggaaaagatggaatggaactcaatttttggtggccgtacaagtgtggaaacttgaattcatatatacttacaatcaacattagcgcaaacagttgaccaagtttttcaattagtattttagtttgaatttagtgtgcaataatgtatgagttatttaacaatgcttattcatgacatattgaatgatacttatatttattatatcaattatgatgttattaaatatatgtgtgcatgtatatttctctttaaa

SEQ ID NO: 20043 - DNA, 962 bp, Zea Mays
tcaagatatctgaagagtaccaggttgttaatgttagtctgaaggctgatgcttggagaacagagtgttcttccaaaggttcgtttaaatggaggctccacttagttgggcaaaccgaaggcattgcatgttccttagtccaggacgactccctgctttgtgatttccttcctttcttgagtgcagaagccaaggatgaaagagcattggctattctatatctccaatcaaattccttacatagtgtattgtgtacctcaatgattttttggtggataatgttttacatgcttaacaatgcatggttactatttctttaaatggaagcactcttaactgtatttggtaactaatgatcctaactggcagctttttgcggagggcgttgatccaaggcatcaaacattttcttatcgctcaaggtttaagaagcgtagacgatcaaagaacacaatggagaaaatcaggcatgtacactcacatattatggaatcaggttcacctgaagatgaggcaggatctgaggacaactttgtgcaaggggagaatgggacttctgtagcaaatgcttcgattgatcctgctcaatctttacatggcagcaatctttcaccaccaacagtactacagtttgggaagacaaggaagctatctgagagatctgaccctagaaatcggcaactcctgcaaaaacgacagttcttccattctcacagggcgcagccaatgcaactggagcaagtgttctcggaccgtgatagtgaagatgaagttgatgatgatattgctgacttcgaggatagaagaatgcttgatgattttgttgatgttacgaaagatgaaaaacttattatgcatatgtggaattcatttgttcgaaaacaaagatggtgctatgtcacaatacacaagggtggcatgacaagatgagcagtggtggtccactcgcaaagaagatggcg

SEQ ID NO: 20044 - DNA, 2157 bp, Zea Mays
aacacaccggaggcgcgaccgcctcgtccgcgtctgcttctgcatctgcttctgcttgtgctgctgctgacatcgaatcaaagctgctaaacctcggtccatccatcacccgcggcgcgacacacccaaaggcctctccctcccgtcccgtgtcccgatcgcaccgctccccacgatggcgtcgcacatcatcctgccgccggacgacgccgacgagaaccacaaccaccaggcggcggcggcggcggaggaggaggaggaagagcgggacgagctggggcgcgacgacgacgacgacgagcacggggtgccaccggcgctgccgcccaaggcggcgctgccgttctcggccacgtgcgtgcggatctcccgcgactcgtaccccaacctccgcgcgctccgcaacgcctcctccgtcagcctcgctgacgccgcctacgtcaagatctccgaggccgactttggatacgtcctcgacgacgtgccgcacttcaccgactacctccccgacatcccgacttatcctaatccactacaagatcatccagcctattcaactgtcaagcagtattttgtcaatgaagatgacaccgttcctcaaaaggttgttgttcagaagaacagtcggcgtggtgttcacttccgtcgtgctgggcctcgtcagagggtttattttggcaccgatgaagtgaaagcctgcattgtaacttgtggaggcctgtgccctgggcttaacactgttatcagggaactggtgtgtggcttgtcacacatgtacaatgtcagcagcatttttggaatacagaatgggtacaagggtttctattctagcaactaccttcccctgacaccaaagagcgtcaatgacatccacaaaaggggtggtacagttcttggaacatcacgcggtggccatgataccaaaaagattgttgataacattcaagatcgtggaatcaaccaggtgtatatcattggaggagatggaactcagaagggagcatatgagatcttcaaggaaatccggaagcgtggcctcaaagtttctgttgctggagttccaaagacaatagataatgacattgcgggttcattgcgatgtatgctactcttgctagtcgagatgtggactgctgtttgattccagagtctccattttatctggatggagagggtggattgcttcaatatgtagagaagaggctgaaagagaacaagcacatggttattgttgttgctgagggagcagggcaggatcttatcgcgaaaagtttagccacatcagatcaacaagatgcgtctggaaataagctgcttcttgatattggtctttggctgactcacaagataaaggactacttcaaaagcaaaaagatggagatgacgattaaatacatagatcctacatacatggtccgtgctattccaagcaatgcatcagacaatgtctactgtacacttctagcccacagtgctatccatggtgcaatggcggggtacagcttcactgttgggatggtcaacggaagacatacctatatacctttctacagggtgacatccacaaggaacaaggttaaagtcactgacaggatgtgggcaaggcttctgtcgtccaccaaccagccaagtttcctgagtcagaaggatatcgacgaagcgagtgaggcggataggctggcaaacaggccaccactgccaacgggtgccagctctcgcgtggtgaggtctttcgatcaatcttcgtcgtgttcttccaatggagagatctaagtgattgctggtgcaccgcaattgtgtacagaacctacttactatcgttctgagctctggtgcttgggcagcttcgccacgcaacgagttttgctcttgttgttagtcgttatgcatatgccttgagttgtgtaggaggacacgcggatgtgggccctgttagcacgcgtaataaagaaacaccattgatgaagctacttactagaggctctccatctatcatgtatttgctgcagttattatgcaatcggctggtgttctatctgtcttcgcctatctgtactaccgtgcattttcctttggcaccgtgaaatttgtaaggacaattctacatatgccattttaattttatcttctagtatcttatttgtcgtctttctatac

SEQ ID NO: 20045 - DNA, 1858 bp, Zea Mays
catggtaaactgagcagaatttaggatttctctttgtaggtgtaataggtgcatcagattatttaaacttctgattgtgatttgtgaagttttgttgaaaacatgaagcaatgcaacatttgtctcaagagtttgaatatggagtttacatctttagttacctatgggattcctcctaacatgttggctttgttgggaagttagctaatgtaaaagaagcatattgcacaaatctccagtcaatattaagtttatgctcaccattcctaggttttatgcaaaatattgcctgtgaagcttgtaattgtaatggagactacctatttgacactcttcgaccaatttcagttttttcagcctagaccaacgtactgcagtataagcagtatgaactgcctgtgtaccagctattacattagcacatgttctgtacctatactttcccctttctgtagctccagttaacttttgtatgcttgccagtcaggatctgatgaaaggactattcctgggaatactattgctgttcaagctgacatgccttttagcggtcttacaacatttgggactgcatttttatccaagtttgagtgctctcagatgcgacatccactgctagagcatatcacatttgttgacacacctggtgttctttctggtgaaaagcaacgcacacagcgcagctatgatttcactggtgtgacatcatggtttgctgcgaagtgtgatcttatccttctcctgtttgatcctcataagctcgatatcagtgatgagttcaaacgtgtcattggatcattacgtggccatgatgacaaaatacgcgtagttttgaacaaggcagaccaagtagacactcaacagcttatgagagtttatggtgcattgatgtggtctctcgggaaagtattgaatacacctgaggtttcacgtgtttatattggatcattcaatgacaaaccagtaaatgaatcagctgttggtccacttggaaaggaactatttgagagagagcaagatgatcttctttctgatctcaaagatatccccaagaaagcctgtgaccgccggatcaatgaatttgttaaacgtgctagagctgccaagatccatgcttatataataggtcatctaaagaaggagatgcctacaatgatgggcaaagcaaaagcccaacaacgactcatagacaatctgcctgatgagtttgcaaaggtgcaacgggaataccatcttccgtcgggagattttccttacgtggagcacttcaaagaggtgttgagcgggtacagctttgacaagtttgagaaggtgaagcccaagatggtacaggccgtggatgatatgcttggatatgacattcctgaacttctcaagaacttcagaaacccatacgagtgaacccatacaggcggttgaaagatgacttcgatctgcaacagaatgagggattgattgtcaggcgatgtgaatcatagtggtcaatgtctcttggggcgttcattgccatccatgcttagccattgttatataactttatgcataagaatcatagagccattgctcaagctttcaccagacatctgattatgtaaaatcgacaaaatagtgatgttagtgttaaagaatatactgtgatgttgtttcttcaaatgagtatttattcgtttggaacagctggagaatgtgggtttgtcaattatcagcccatgaagaatatttggaccaccgtggggtgttgtcctgagcatggctccttgttttgattttataatgtcatgtatgttgtggcgctgcaaaatctgctgtgatatgttgcaaatatatttttgaaagacgaacttttgagaaattaatt

SEQ ID NO: 20046 - DNA, 2644 bp, Zea Mays
tgttgcgcggcttcttctgctttgcaattcaagtgtatcaccgttgttacttccataacgtgctaacagtcaaatttgtcaagctactgttgatgctccagatatagtagaaaaccatgggagaagttagtgatgataattccaacatgtcctttctaaaaagaatcgctacaagtgacgtgccactgttgaaagagtatggtgtgaatggagttgttgtcgccctgcttctggctgtagttactcctgtcctgctttccatgatgtttggcaagaagacaaagcaaagggcggtgcgagctgatgtgggtggagaggagggatttgcaatgcggaacaacaggttttcctccttagttgaagtcccatgggagggcgccacgacaatgtcagctctgttcgagatggccagcaaaaagtactctcgacagaggtgtcttggcacgaggaagctaattaagagggaatttatggaatcttctgatggtaggaagtttgagaaactgcaccttggtgaatatgaatgggatacctacactgaggcatttaatcgtgcatgtaatttttcttctggacttatcaagatgggccacgacctagatagtcatgctgctatcttctctgatacaagagctgagtggatcattgctgctcagggatgcttccgacaaaatttaacggttgtaacaatatatgcatctcttggtgaggatgcattggtgcattcactaaatgagacacaggtttcaactctgatatgtgattcgaagcaacttaagaagatacctgcaatcagctataaattgcagagtcttaggcgtattatctatattgaggatgaacctgtcgaggctgagacactgaaccaagtgaagcatttgacaacattgtctttcactgaagtagaggagcttggcaagacatctcatgttgatgcaaggttaccttcaggctctgatactgcagttatcatgtatacaagcggaagtactggtcttcccaagggtgtaatgatcacacatggcaacatggtggccacaactgcagcagtcatgacaatagtcccaaaccttggcatgaatgatgtttatctggcttatcttccattggctcatgtctttgaactagcaggggagactgtcatgttagcttctggcagtgccattggatatggttcagcattaactatgactgatacatcgaacaagattaaaaagggaacaaaaggagatgtttctgtactgaatcctactcttatgatttcagttcctgcaattttggatcgtatcaaagatgcagtatttaagaaagttggtgagaagggtggcctgacaaaaaagctgtcttgattttttcatataagcgaaatattgcagcaattgaagggagttggtttggatcttgggcaccagagaggatgttatgggatcacattatttataaaccaatacgggcaatgcttggaggacgtctaagatttgttctttgtggtggtgcacctctgtcaagtgacacacaaagatttatgaatatatgtctaggtgtcccagtgggtcaaggctatggattgactgaaacttgtgctggagcagctttcactgaatgggatgatacaagtgtgggtcgtgttggtccaccacttccttgttgctatgtgaagcttgtctcatgggaagaaggtggttacaagatttctgattctccaatgccgagaggagaggtcgcggttggtggacacagtataacaaaaggttatttcaacaatgaagcaaagacgaacgaagtatacaaggttgatgagaggggcatacgctggttctacactggtgatattggtcagttccatcctgatgggtgccttgagattattgacaggaaaaaagatatagtaaagcttcagcatggagaatatgtgtctcttggcaaggttgaatcggctctagcaacaagcaactatgtggagaacatcatggtttatgccgatccatttcataactactgtgttgccctggttgttccagcgcaccaggccttggagaagtgggctcagaattccgggatgaactatgaaggctttggagagctttgccaaaacgaccgagcaattaaggaggttcagcaatcgctatcaaaggccgcaaaagcagcgaggctcgagaaattcgaggtgccagcgaagatcgtgctgttgcctgaaccgtggacgccggagtccgggctggtgaccgcagcgcttaaactgaagagggagcaaataaaggccaaattcaaaggcgatctggacaagctctaccactgaagaagcgacagaggacggtttaatttgcacctactgcttccagacgcttgcggtgccaaaagctgcctggatggaacttttactgacctgcacgagtggtgtgtgtgtgtgtatcccagctgctgatacacaggagcttcgttcttctgtgactgtgactgagggaaaataaacccagtgttggaatgatcttgatttgtaatagcttcacgtcatgggattttaattttgtcatagcacagaggatgctcaatttcacgtccgttacgggtcagttatgacactaagcatattgtaaatgatgtttttttatatagacacaataaataggccctgggcacatca

SEQ ID NO: 20047 - DNA, 1022 bp, Zea Mays
ggcaagccagccacgccaatcacctgtccagctgtcctattcctacctccagccacaaagacgagctccacgattccacccacaccgaatcttgacggaacgattccaccaagaaccgcgggcaacaattcacaccgcgcttctcttctccagcgatgcagacgacggcggcggcggctgtggcatgggcgcctggcccatcggcgtccacctcgtcatcgtcctcgccgtccaccttcagggtgggggttgcgtcgacggccgtgcgggcttgttccgcgcccaggcttgttgcgtcctccgcgcccctgggctgtcgacggctgcgacaagtggttcaagctgttgccaatccagaccctgcgatcgagcttccattgactgctgaaaatgttgagatggtgttggatgaagtaaggccgtatcttatggcagacggaggcaatgttgcgttgcatgagattgatgggaacgtggtaaggttaaagctgcaaggagcatgtggttcatgcccggcttcagtaacaacgatgaagatgggtattgaacggcgcttgatggagaaaataccagagattgttgcagttgagcccattgctgatgaggaaactggccttgagttgaaccaagagaacattgaaaaggtacttgacgagattaggccataccttgctggcacaggaggtggcgagctcgagtttgtcacaatcgaggagcctattgtcaaggttaggcttacaggcccagctgctggtgtgatgactgtccgagtagcattgactcagaagctccgtgaaaaaatccctaaaattgcagctgtccagcttttgccataagattagaatcttttagaagccaggcaccagtcacagttgataatgtaaatgcactaccgcaataaatttaaggagttgtaatgtgtagcctgctgagcatttagctcctcttcagcgatattatgatcatcgatacacaatgttcaagtaaaggtgttggttggatttgtaaccagaaaaaaccaa

SEQ ID NO: 20048 - DNA, 1353 bp, Zea Mays
ccttccccggtctctattccccaattgcccctcacctccattaccttccccgtctccctcgtacattcgacattccccttcccctgccattcggtcccgctcccgccgcctccgccgcgattccactctcccttccgcctccgccgcgattccactctcccttccgcctccgccgcgattcttgtctcccttccgcctccgccgcttaccgccgcggccacgccgcaagcgtttcgtctcgggatccccacttcgtctcgctcgagcggtagagccacgctcccaccgcccaggcgtccgccgcggaggcgtcggtggcctatctgagcaggctctcctcgtcgggcttttttgctttagagggagagacttcctggtcggcgcgccgcgagaagagcaccagccatgtcgcaaactaactgggaggcggacaagatgctggatgtatacatatatgattattttatgaagagaaatttgcaggcaactgcaaaggccttccaagcagagggaaaggtctcttcggatccagttgcaattgacgcacctggtggatttcttttcgagtggtggtcggttttttgggatatattcatagcaagaactaatgagaagcattcagatgttgcagcctcatatattgagactcagctcatgaaagccagggagcaacaacatcaacagcagcaacagatccctcaacagaggcagcagcagccacagcatatacaaatgcaacaaatgctgttgcaaagagctgtgcagcagcagcagcagcagcagcaacaacaacaacaacaacaacaacaacaacaacaacaacaacaacaacaacaacctcagcagcagcagcagcagcagctgcaacagcaacagctgcaacagcagcgtagagatggttctcatcttctcaatggttctgcaaatggaatttctggaaacaatcctttaatgcggcaaaaccaaagtactgcaaatgttatggcaacaaaaatgtacgaggaaaggttaaaggtaccttccgagagagactctttggaagaggcatcattgaagcaaaggtacggagagaatgctgggcaactacttgattcaaatgaagcatcattgttgaaagcagcttcaagcgcgcaatcctcagggcaaattttgcatggaactgttggtggcttgtcaggcactctgcaacaagttcaggccaggagccctcaacttcctggtcctgctcagggtatcaagacagagattaatcccattctgacccccagagctgcaggcccagaagggtcatttataggtgctcaagtaaaaaaatgtgcttggcgtattcaaccttgtcacatgatagtcttc

SEQ ID NO: 20049 - DNA, 690 bp, Zea Mays
cacgagcaggtttcctgcaacgcagcgcgtcgagcagaccagacccgcccggcctggttgtggtcgaggaggagactggaggaggacgggatagcagacgagaggagaggacgcgcacgccatgtcaggtccaccaccaaagccttgggagcgatctggaactgaaggaacttcaggtccagcacctttcaagcccccatctggtggaagcaccagtgatgttgttgaagcttctggtaccgctaaacccagcgaaaatgttactgcgatggaggggaatgccgctcctaatgtaaatagcactgtttcaaggcctatgccacagcggccttggcagcagacaggttatggaaacacctatggagggtatggtggatccaacatgtatagttcatatggtggatttggcaacacttatggtaccggtggactcggaaatagcatgtactcgagttacggaggaggttatggtggtggcatgtacggcggtggcatgtatggaggaggcatgtatggtgggatgggaggttatggtggttacggcatgggcggaatgggtggtatgggcatgggtccatacggtaatcaggatccaaattcgatgggccctcctgcatccccgccaggtttctgggtgtccttcctccgagtgtattcgaatcaaacgagtcactcatccctgtactaaaa

SEQ ID NO: 20050 - DNA, 1679 bp, Zea Mays
tacagagtggttgctgcttatatgtgccatattaggttgttgctggtttgagcctatatgcagttcagcttaggattgtctaggaagacgtttaggtccgcgccttcttggtaggggaaacgatggttccatgaggcttgtgagggatttatatgtgatgcttgataaagtaaattctgaggaagcacctcttgacttgaaggttccagaaacttttgatgaatttatctgggacatgaagaataatgattatgatttaaggtcatttgcttttaagctgaaggctacgatggagagcatggataaggaattgaggtcatcaaggctatcagagcagttgaacaagcactatgctgcaattgctattcctaaaggcctttattgcctttcattgcgtttaactgatgaatactcctcaaatgcccttgcaaggaaacaattaccgcccccagatcctgctattgttgaggtgaaaggtgttcatcaatttgattggttaacacaagaaaatgttcctgtacttgaatcaatagaaactcagcgcgctgccagagatcgttaccatggaagtcgccgcccaataaccagtgctaatgatagcccaagggtttttgctgccaagcttcaggcaggaagtccaacatatactaatgtgctcaatcatattcgaatatacatgcctgagttgttcccaagcctcaacaaagtcgtatttcttgatgatgatgttgttgtccagcatgacctatcaccactttgggatattgatctatctgggaaggttaatggcgctgttgagacttgcagaggtggagatagttgggtgatgtctaagaggttcaggaattatttaaacttttctcatcccctcattgcaaaaaactttgatccttcagagtgtgcttgggcatatggtatgaatatttttgacctgaatgcatggaggaagacaacaatcaaagacaaataccatcattgggtcaaggagaacctgaagtcaaacttcacactttggaggctgggaacattaccaccaggccttatagcatttaaaggccatgttcacccaattgatccatcatggcatctgttaggtttggggtatcaggaaaagacagatatcagtagtgttgaacaagcagcagttatacattataacgggcaaagtaaaccatggctggagattggttttaaacatcttcagccattttggacaaaatatgtgaactactcaaatgaattcttaagaaactgccatataatggagccacagttgtagattgtcgtgacaaaataaataaaaagcatatatcaagtgaaattaaattcgttattttggaagtcaacatcagagagtttatgaagggtaactggggagctcagtaacccccctccatggtcatatgcgttgatggtgaatatccaatgaacagagcatctttcccctcataggaccccttcccttttaatttattccatttgtatcatagctcatgaaattatgatattgtttaggatggttcttttgtattcgatggagcaatatatgagttgaattgatggtagtcccatcattattgtaattgattaagagtatacacagttcatgtgaaaagcatggattttgattatgcaaagcaaaccttgtatacttgttacttatttttagattctctcaa

SEQ ID NO: 20051 - DNA, 1753 bp, Zea Mays
ttcttcttttgttgttgttttgatcaatatttatgacagagttgggagccaaacgaaggagccggctctttgtcaaccagttcagtcggtgtggaagtagaaaaatatagaaatctgtacactatcaaggccttgcctttaagtgatgtacgcttcatccgtaagtacaccccaacgtttggactggactacgtaataatcgttctctcatcaggcctggctttccctccattctatttctacaacggtggaattcgtgaattgtttgcaacactgaaacaacatgtattcatcatcaggtcggatgacgatcctaatgtttttctcgtcaacgactttcaagatccccttcagaaaagcttgtcatccttggagcttccaggagtagcctcagtagcaaatgccatgtcaagacaaaattcactcagttttactgggtcaattgatgagtccaggcatggggataatgttagacatggggcaacttctagcatgtctcagtatagctcaaagcaaaatcacaaatcaaatgatccaggtcgtgatctttcaattcaagtcttggagaaattctcattggttactaaatttgcacgagatactacatcaagcctttttcgagacaatagtggtgctcatgcttatggacgccaacaacatcaatacattttggataataaatcaactaataaacataaaaatcagtatgtaacaccagaaaaggcttcggcaccctcagcaacactcgagtcagatccattacctctcgtatggggaaaacaacgagatcacccgttaagtgtcgaagagtggacatctttcttagatcgtgaaggtaggattatggattcaaaggcactgaggaaaaaggttttctatgggggagttgatcatgctttgagaaaagaggtctggaaattcttgttggggtatcatgaatatgattcaacatatgctgagagggaataccttgctgtcatgaaacgagcagaatatgaagtcataaaatctcagtggaagagtatctcagccacccaagctaaaagattcaccaagtttagggaaagaaaaggcctaattgacaaagatgtggtgagaacagataggtccattccctattatgaaggagatgacaatcagaatgttgtagttttacgtgatattctgttaacatattccttctacaatttcgaccttggttattgccaaggaatgagtgactttttggctcccatactttatgtcatggaggatgagtctgaatcattttggtgctttgcttccctgatggaacgtctaggtgccaattttaatcgtgaccagaatggcatgcatgctcagctacttgcattatccaagggagttcagtttcgaccagatcatgcttttatgggaagttctgtggtcccattatttgtcagaacatttccacttgtacttgtgcgtagcaatcttgaaaaaatatcgtcagcggataattggggagcagatggacttcgataccctccttaagttcatcaatgagctcagtggtcagatcaatcttgaccgggctatccaggacgcggaggcattgtgtactattgcaggagaaaatggggcttcctgcattccacctggaaccccaccttcaatgcccgtcgagaccgatggtggcatgtacgtgcaagaagacgaggtcttgtgagatatcggtcaccctagaaaataattgcatagaagcatcgcaagtttttatccagtagtgcccatg

SEQ ID NO: 20052 - DNA, 2558 bp, Zea Mays
gagcagagctccatcccatccagacctgccaaagtgattctgcagaagtattcattctactggcgtgctgagcaggtgcaggagctctaataagcctagtgcgcacttcagtcatcagccaagtgattgaaaagggcaagtcagctgaaatattggttccgagggctctgtagttgcttatccacgctcgcctatgcctttgcgctgatcttgacaactcaaagcttggatatggctacttattactcgagccctggcagtgaaagagattcacaaacaatgtactcagcagagtcaggcaatgtatcatatcccgtgccatcagccctagggaactttctttatacgaacaatgcatcttctggaccttatacagaatttagtggaattgtccagcctcagcagaatttcatggaacttactggccatccttcagcaatgtcacatgattcgtcatccaatgaagctaccaacatgggcagttcactcactgaacagcgctcttttggtcctttgaaagatatgagaaatgagatgttgatgcatttgatggatggagcacacagcagtggcagtgatctcatccacaatgatgctcatagcactgtacagctcgaatttggcatgttaaacaaccacaactcaacaagtgttccattagcaccaggccaagggctgtctctgagcctcaatacacatatcttggcgccttcctatccacactggtctgcaaagcaagacttactaacaccaaattcttaccagggtgatgacaacagaatgaagaatatgcagtctgaggcctcacaggcaatccggaactctaagtatctgaaggcagcacaggagttacttgatgagattgtcagtgtttggaagtgtgttaaacagaaaacagataaaggccctgctgaagcaggaaaggctgatggaaaagagactgatggggggattaaaagtgagggggtatcttccaatccgcaagagtctggtgccaatgcagcagctgagctttcaactgctgagaaacaagagctccagaataagatggcaaaacttatgactatgttggacgaggtggataggaagtacaaacactattatcatcagatgcaacttgtaatgtcatcgtttaatatggttgctggtgctggagctgccaagccttatactgcagttgccctccagacaatctcacggcatttccgatgtctaaaggatgctatcaatgatcaaattagtgttatccggaagaaacttggagaggatgacaatacatccggcaaagagggcaaactaacccgccttcgttatattgatcagcaaataaggcaacagcgagctttccaacagtatggtatgctacagcaaaacgcttggaggccacagagaggactacctgaaaattcagtctcgattctccgggcttggctttttgaacatttccttcacccgtatccaaaagattctgaaaagctaatgttatcgagacaaactgggttgacaagaagtcagatttcaaactggttcatcaatgcccgtgtccggctgtggaagccaatgatcgaagacatgtacaaagaagagattggtgaagcggagctagactccaactcttcctccgacaacgggcagcgaaacaaggacaaagcaccatctcccgaagaaaatgaggacctgcagaccccaacaagccaggcttgccaaaccagccagctcggccagtccaaagccatcgttggtggagtgatgggctttagtggagtgctagccggcggcttccacaccgaggccaaccccgacgacagcttcatgagcctgatgctaaaggcccagagacctggtgaaaccgaaggcaccggtctcctccacgatgccgtcgctcaccactcggacgacggcgcccggttcatggcctaccacctggcagagttcgggaggtacgggaacagcagcaacgtctcactgacgctgggcttgcagcacgccgagaacagcctcgcagtcccaccaaacactcagccaggcttccccggcgtcagagaccaagacatgtacaacgccacggctcctcctctcaacgtcgcctccacatcttcagagtatgattcggcgagccaaattgatcagcaacagcaacggcagcggttcgagccgtcacctctgatgcatgatttcgtggcctgaatttcagctcgcccactggaaaacgtgggggaaaactactgccaatttgtagtgtgtgccaggacgaataacttgcctggactgaattttcaggcgtgggactgttagctgtagttaacgattggggatttggggggtacagtacaggaggtatatagcgtaaatgtgatgtaaatttagtgggggtgatagcggtaaagaaatcctgtaaagatggaatgcatttatacgtgtatttaagggccatgctgtaaaaatagatttacctgtaatgagtacttatgatccagtatatatactgtgcacgttgttgaaaccaaaaaaaaaaaaagaagaggggggtgggggtaaactgaaatggattgcaggag

SEQ ID NO: 20053 - DNA, 1920 bp, Zea Mays
gaattccccaatccccgccttcctcggttccctcaccgcgaaccctaaccctagtccaccccgctcccatggacgaggatgctggcggcgcctcgccgccgccggtgccactggctcacgtgccccctcttcagcaacccaccaccgccgccccctcgcatcgggacatggcggcgtcccccaccagctcgcgctccgtgacggagacggtgaacggctcccaccgcttcgtgatccagggctactcgctcgccaagggcatgggcgtggggaagcacatcgccagcgagaccttctccgtgggcggataccagtgggcggtctacttctaccccgacgggaagaaccccgaggacaactccgtctacgtctccgtcttcatcgccctcgcttccgatggcaccgacgtgcgtgccctcttcgagctcacgctccttgatcagagcggcaagggcaagcacaaggtccactcccactttgaccgctccatggagtccgggccgtacaccctcaagtaccgcggatccatgtggggttacaaacgattctttcggcgaactgcccttgaattatcagactatctcaaagatgattgtctgaaaataaattgcactgtgggagttgtagtgtcaactatcgattactccataccgcactctatccatgttccagactcagacatcggctatgattttggttcactgttggacagtcaggagggtgctgatgtcattcttaatgtgggaggagagaggtttcatgcccataagttagtgttggctgcacggtctcatgtattcggatctcaattttttgatgatgaatctgatggagagaagagtgaggttaatgagactgatgaactaaaagagttttctattgatgatatggagccaaatgttttcaaggcaatgcttcacttcatctatagagatacccttgttgatgatgatgagttgggcgcgtcaagctctgatggttctatctttgatactccggcagctaagttgttggctgcagccgataagtatcacttagcaagactaaagtcgctatgtgaatcttacctgtgcaagggcatatcagtggcctcagttgcgagtacgttagcattggctgataggcaccatgccatggagcttaaagctgtttgcctaaaatttgctgctgaaaatctttcagctgtaatgcggagtgagggtttcatttacctcaaggacaactgcccatctctccagtcagagatactgaaaactgttgcagggtgtgaggaccagtgcagcagtgttgggaagagccagagcgtttgtgggcagctctcggacggtggcgattccagttgccgcagggttaggcaaagaacctgaggtcaacccagaactgacatggttagccagctcttgctctgtaaatgacgatggcaatcatctgtatgtgaagaaaaaacaatttgaaggagctttactgaatcgatgtgtagacagccctgcaaatgctcacgagtcaacgataaacatggtggccttgtgtcttggcaactggtgtttgcagcaggcgggccagcagctgtctgctactaatatggatccgttgattttgttgtattcttctttcgactggaaggtatcataagtcaattaggaggtgattcttatatgtattcgttatgctgcaaaagtgaaggtgacaatatttttggtttattggcaagtacatggaatttacatttttgttgagatggttcgtagatggagtaattttgctgtaaagatatagtggtgacaagttttttttgtttgtttggattttttacatttctgttcgcaagtatcgtcatctgtcaatgttgagaggtgatgatatataggattgtcctttggtggcctccacgagaggtttgtttttttccttgtattttgg

SEQ ID NO: 20054 - DNA, 1998 bp, Zea Mays
atgacatatttgatagcgggccgcaggctaagccattccttctaactgcaactgctgctcctctttgtctcccccgttccgttctccactgaactcctcgccctcgtcgacccgtgacccgtgagcctcttccactgccgccgtcgacgagagctgcgttagccgctaggtgatttcggctgcttccctcatggcgaccgcgctcaagtcgttcttgaacagccccgttggccccaagaccacccacttctggggccctgttgccaactggggcttcgtcgtcgcgggcttggttgacatgaacaagcctcctgaaatgatatctggcaacatgacagcagccatgtgcgtgtattctggactgttcatgaggtttgcatggatggtacagccccggaattatttgcttctagcatgccatgcttccaacgagagtgttcagctctatcagctgtctcgctgggctagggctcaggggtacctggagaagaaagagccagagacacaacagtaaagaggaagttggagcacaagttgctggacaatttcttctctgtgctgtcatgtgttgtctccgtgcccttctacacgggattcctccctctcctgttctggagtggacacggcaggctggctaggcagatgaccctcctcatggctttctgtgactacctcggcaactctgtcaaggatatggtgtcagcccctcggccatgctctccacccattagaagagtgacggctacagaagatgagaaggaaaatgccatggaatatgggctaccgtcatcgcatgctctcaacactgtttgtttgacgggatatttgttacattatgtcctcacatacggagaacatggcagtcttacagttgctgcgggtttatctctagctctcttacttgttatgctagttggcattgcgaggatatatctgggtatgcacagcttgaccgacgttgtcgctggaattggtttcggcatcgtcatcctcgcattctggctggctgttcatgaccatgtcgacgcctttgttgtctccgggcaaaacgttgcaaccttctgggcaggccttgctctactgatgtgctttgcgtatcccaagccagaattccctaccccgagctttgaattccacacagcattcaacggggtcgctttcggaatcgtgtacggcatccagcaaacctacttccacttccacgcccccgacgcgccgatcgtcttcagcgccgagctgcccttcctcgcgttcgcggggcgcgtcctcgtcgggatcccgaccatcctggccgtgaaatcgtgcagcaaggcgctctccaggtggctgctgcccgtgatgtgcagcaccctgggcatccccatcgtgtcgtcctgctacgtccccgccctgaaaatcgacggcggcagcagcaagagcaggcaggccgccggcgggcacctccagcgccttctctctcacttcccccagaaggcgtacgacgtggacaccggcatcaggttcgtccagtacgccagcctcgcgtggtccgtggttgacttggtgccggccatcttcgcccatttggatttgtagccagctacttaaaatttcagtttcgtttttttttctggaggtctcaataaggccctcctactcgtaagacatgtgtcatcttatgaggctgtaaatccgatgatctggccctttcttctttttttgtattgtattgtgtgtatgaatggacgaatggttccctagctgttttcatcagggtgttcagtaagtagaaatcagtggtacatttcttattctttaaattagatatggttattgtcttatatactaggttagagagggtattgatttgtagctatgagactatcgatattgttcggttccatgataagcaccactaagggtctatttggttttgctagaaaaaaagttgaaacaaacacaacttgcactggactggattatcttattcttggcatcgaagaaatgccttttcttgcc

SEQ ID NO: 20055 - DNA, 953 bp, Zea Mays
aataatgaaagtagaaacatatgagacatggaaaacaacctaaataatcatataatattatcaggacatttttattataatatcatgaatgaatatgaacaatatcgaattacatttataccttcatcttgacagaaaggtaaaaggctcgagagtgacgtgcaaagcgaatacaagtcaacgtgaacaatacagtgctactgttcatctatttataggcacaagacgcagcctgggtaaattacattcatgcccttgacatttactattgacctagggataatctatcaaggactagacaaccttttcccctttaggtcggttccattttttgctgttaagccgaagcttctccacaggtagcttcggaactggttcatccttctcccgatccctgctttttatatcatgtatagcttcatcccaaggccgaaggtccctgtatatatatttgaacttgggaaacatgttagtcgtgtttttgaggaccttcagaagacgaaggccccaacaggggtgaataagcgaaacctgaaatttataaacttaaacatgcactaaggtcgagggttagcgttagagttaaacttcaagtcacaaagagagggaaaacaaatcaaccaagaaataaggagagtgagcatggtgatttgttttaccgagattcagttccaaagaacctagtccccgttgaggaggtcacaaagactgggtatattccaaccctttccctctctcaaacggtcacttagaccgagtgagccttcttccttaatctcacaggtcactaagaccccgcaagaccaccacacacttggtgtctcttgcctcgcttacagagcacttgagaataagaatatgaaaataagaaagccaatccaagcaacaagaactcaaatgaacacaaaaatctctctctcacaagccactaagtgttttggagtggattttgg

SEQ ID NO: 20056 - DNA, 379 bp, Zea Mays
tgtatcacattttagtcccagaggattggggcgttacaataacagagtgtatagagataaatatcacaataacatcatagtacttattacatagcggaagtcttacacaataaaagataaatataaaacgaactaaagtccatccttggcgccataaagtcaactaggagacgccacctagatcaagtcgaactcctcgttgtgttgctcctcctgaaccacctgttcttctcctgtggtgggtgtgatgcagcttcatatcctcggagaaatgaaggcagaagtcattactgcatctgtagccatgtgcactcatgagagaggtgtggaatttattatgtggatgtggatagtgtggatttttacattgtcattcttc

SEQ ID NO: 20057 - DNA, 1296 bp, Zea Mays
atggttgttagaacatttagggagaaaggaattccttgtgatgttgtctggatggatattgactatatggatggttttaggtgcttcacgtttgatagtatccgattcccagatccaaaatcactggtggacgatcttcattccattggttgcaaagcagtctggatgcttgatccaggcatcaagaaggagaagggtttcttcgtttttgatagtggctcaaaaaatgatgtttgggttcaaaaggcagatggcagcccgttcgttggggaggtgtggcctggtgattgtgttttccctgattttacatctgaaaaggcacgagcttggtgggctagtttggtaaaggacttcatctccaatggtgttgatggaatatggaatgatatgaatgaacctgctgtttctaaaactgtcacaaagacaatgcctgaaagcaatatccataggggagatgctgatattggtggtgttcaaaatcattcatactatcacaatgtctatggaatgctaatgacaagatctacttataaaggaatggaaatggccaatgcagctaaaaggccatttgttcttacacgagctggttttataggaagccagcgttatgctgcaacatggactggtgataatctttcaacttgggaacatctacacatgagtctaccaatgattcttcagttgggtctcagtggtcaaccattgtcaggtcctgatattggtggttttggtggaaatgctactccaaaactttttggaagatggatgggtttgggtgcattgtttccattttcacgcggccatacagaaactggaagcatcgaccatgagccatggtcctttggtgaagagtgtgaggaagtctgtcgccttgcactactaagacggtaccggctactaccacatatctacactcttttttaccactcacatacaaagggtattccagttgctgctccagttttctttgctgatccacaagaccctgaactgaggaaagttgagacttcctttctcctcggaccactcttagtctgtgcaagcactttacctaataaaggagctcatgaatgtgcacataagttaccaaagggcatatggttgccttttgattttgctgattcacatcctgatctgccactgctgtatctacaaggtggagcaattcttcctgtaggtcttcctattaagcatgtcggtgaagcaagtttggaagatgatctgtcactaattatcgcattgaatgaaaatgccttggtaacagtaacagtaactcgtgacagcaaagcagagtag

SEQ ID NO: 20058 - DNA, 1795 bp, Zea Mays
cttgattcgtatagcacctcacatccaaatatgcaacacatagataaggagaaggtgggaggcacaagaacgaggagatcaagttgcctctgtgcttgatgttggagaagttggtccccgagcagcatgtcgttgccaggtcgttagaagtgttggcccatggtcagcaggaacagctcaaatcgaaggaagcatccataatgcctatttttctcttattgaaaaggcagaacattttgtttacatcgagaatcagtttttcatttcaggtctttcaggggatgacacaattaagaatcgtgtattagaagcactatataggcgcatacttagagcagaaaaagagaaaaggcgcttccgggttattattgtcataccacttttacctggttttcagggtggcattgatgatggtggagctgcgtctgtgagggcaattatgcattggcaataccgaactatttgtagaggacctaattcaattcttaaaaatctgtatgatgtggttggctcgaaggcggatgattatatctcattttatgggcttagagcacatggaagatcagatgatgggggtcctctggtcaccaatcagatatatgtgcacagtaaattgatgattattgatgatcgcatggcattgattggctcagccaacataaatgatagaagcttgcttggatctagggattctgagattggtataattattgaagataaagaggttgtcagttctataatggatggaagaccttgggaagctggaaagttctccctcagcctacgactttctctatgggcagaacaccttggtcttcttccaggagaggttagttgcattatggatcctgtggatgattcagcgtacaaaaacatctggatggccactgctaaggagaataccgtgatctaccatcaagtattctcatgtgttcccaacgatcacatccattctaggtatcaatttcgccaaagttttgctcatcgtaaggagaaaattggccacacaaccatagacttgggtgttgccttagaaaacctggaaacgcaacaggagggagacctggcatgtgccaaaccaatggaacggttgcaggacgttcggggtcatattgtttgcttccctttggagttcatgtgccaagaggacttgagacctttcttcagtgagagcgagtattatacatctccacaagttttccattagggcttgttcggttatttcaatttcatgtggattggtgtgtattggagtgaattaggatgaattttgacttgctatggatttaaactgactcaataccatctaatccacatggattaatgttgaaacgaacaagcccttagtgtttattttcccgcttttggcgaaagtccgcccataggtacatgttatagggttattatacttgtatatgcctagatcgtgtctcgtgcctggatgaataggaaaaacaaaaacaaaggaacaaccatatccttgctagtttcgggtatataggatatgacggccaagatttgtacagatcgtttatcagagttagttcgggcagcagatgttgccctattagatgaattcttttatgcaaaataaaatgcacttaaagctgaatttgatgccttgtagtcttgtacattgagcattggcagattctgttgaaatttgttatctgatcattattgtggatgtggtactttggaagtttctgtgaggcagtgagggcacatttggtatattgttttatctaatgtaatcattgttttataggcaattaaatgtacatgctgagacgaa

SEQ ID NO: 20059 - DNA, 5345 bp, Zea Mays
cgcgcgctttgcttgtcgtccttccgcagcctccccagtccccaccggccaccggcatcaaggcatcaccaccaatctttcggaagttcccacgctgctctgagtgctctctcgtctcccctccccaaacccccaccccgacgcccagatctaccctccccatttacagcttcctctccggccccgcgccctagggcacggcgtcgcctgaacctgtcggcgccggcgcgatgcgagtaccatgctgctcgttatgcaacgtcagatatgacgaggaggagcggacgccgctgctcctccactgcggacatggattctgccgcgcgtgcctctcccgcatgctagcggcagcccccggagccacgctgccgtgcccgcgatgccgccatctgaccgccgtaggcaactcggtctctgcgctgcggaagaacttccccattctctctctcctctccacatccccctcatccccgtctttcctccactccgactcggggtcatcctctgacggctccgaagacgaggacgacttcttcgcgcgccccagtcgccgccccgcgcccgcgcccgctgccgcaccgcccggatgcagcttcttcgacctcgcctcgcacccggacctcaagctcgcccgtcgcatcgggagcggcccgcccgggcccgccgggcaggaggtgtgggccggcacgctgtctcgtggcggtggggtcaagcggtgcaagcaccaggtggcagtgaagagggtgcccctggccgcaggggacgggctcgaggttgttcaagaggaggtggagcggctgaggcgcgcctccacatggtgtcggaacgtgtgcacattccatggtgctgtgagggtgggcggccacctctgtttcgtgatggatcgctatgtggggtctgtgcaggcggagatgcggcagaatggtggacgccttacgctggagcagattctcaggtatggagcagatattgctcgtggaatagcagaactccatgcagcgggtattgtttgtatgagcataaagccgtcaaacattcttttggatgcacatggacatgcattcgtttcggattacggtctttcagcaattctgaagaaccttactagtaggagagtacctgatgactccagtgctggcattgatgctacactgcttagccccaattatacagctcctgaggcatggggaccactgaagaagtcactgaatatgttttgggatagtgcaaacggtatatcaccagagtcagatgcatggagttttggttgcacgcttgtggaaatgtgtactggtgctgttccatgggctggactgagtgcagaggaaatatgtaagtctgttgtaaaagaaaagaagccaccgcctcaatattcaagagtagtaggtgtaggacttcctggggagctgtggaagatgattggtgaatgcttgcaattccgagcttcaagaagaccatccttccaggacatgctgaaaacttttcttcggcatcttctggacataccacggagcccacctgctagtcccgaaattgattttgcaaatgaaaacttgcccaatggcatgcaacctccaacaacctccatcttagagatggttcatgataatccaaatgccttgcatcatcttgtatgcgaaggagatgctgctggtgttagggatctacttgcaaaagctgcatcagagagaaacgatagtttaatccgttctctcttagaagcacaaaatacagatgggctcactgccctacatttagcatgccgccgaggctcggcagagcttgtggaagctattgttgcttaccaagagaatgtagatatattagataaggatgaagaccctcctatagtatttgctttggctgctggctctccacgatgtgttcgtgcacttgtaggcaggtctgctagtataaattctaggcttagagaaggcctgggtcctactcttgcccatgtctgtgctcatcatggtcagccggagtgcatgcaggagctgctgatggctggagctgatcctaacgcagtagacggggaaggtgaatctgtgctgcatattgccgtggccaggagatataccgattgtgctattgttatactggaaaatggaggctgcagatcgatgggcatatcaaattctcaacataaaacgccattgcatttatgtattgagacatggaacacagctgtggtaagaagatgggttgaagttgcatctttagaggatatagcagaaacgattgatgtacccagccctgttggtacagctttatgcatggcagcagctcttaaaaaggagcatgagaaagagggtcgagagttagtaagaatattgcttgctgctggtgctgattctacggcacaagatgatccacactgtagaactgcattacatactgcagcaatgatcgatgatgtggagctggttaagattatactggaagcaggagttgatgttaatataagaaatgctcaaaatacaaccccactgcatgttgcacttaatagaggtgcaaactcatgtgttggcttgcttttagcagctggtgcaaactgcaacatacaggatgatgatggtgacaatgcttttcacatagctgctgatgcagcaaaaatgatacgtgaaaacctggcttggattgctcaaatgctactacagccgtcacctgctgttgatgtgagaaaccaccgaggttggacactacgagactttcttgagaggcttccacgagaatggatttatgaagaattgatggaaacacttgaagataaaggagtccatctctcaccaaccatatatgaggttgcagattgggtgaaatttagaagaactgttacttcacctgcttttggctggcaaggtgcaggacctagaagcattggttttgtccagtctgttgttgacaatgaccaccttgctgtgtcattttgtactggagaagcccatgttttgacaagtgaagttatcaaagttattccattaaataggggccaacatgtgcaactcaagcctggtgtttcggaacctagatttggatggcgcggtcaatcacgggatagcattgggacagttctctgtgttgatgacgatggaatcttgagggttggtttcccaggagcttctaggggatggagagctgatcctgctgaaattgaaagggttgaagaatataaggttggtaactgggttcggattcgtccctcactgacggttgctgtacatggcatggagtcgattactcctggaagtgttgggattgtatactccatcagaccagatagcagtcttctattgggcctttgctatttgtccaatccatggctgtgtgaaccagaggaggttgaacacgtcgacccattcaagattggggaccaagtatgtgtaaagaggtctgttgcagagcccagatatgcatggggtggtgagactcatcacagtgttgggaaaataattgacatcgagagtgatggtctgctcatcattgatattcctaatcgggctgcgccatggcaagcagatccatcggacatggaaaagattgagaactttaaggttggcgattggattagagtcaaagcaacagttccttcacccaaatatggttgggaggatgtgactcgtaatagtattgggattgttcatagtctacaagatgatggggatgttggtgttgctttctgcttcagaagcaggctttttctttgctcggttgcagatgtcgagaaggcacagccatttgaagtaggggagaaggttcatgtgtcaccttccatatctgagccacgcctcgggtggttaagtgaaactgcagctactattggagccatatcaaggattgacatggatgggactttaaatatcaaggtttctggccgaaaaggcttgtggaaggttgctcctggtgacgctgagaggctttcagcatttgaagttggagattgggtccgcctgaaaccaagtattgggagcaggcctacctatgactggaatagtgttgggagaataagcattgcagtagtccatagcattcaggactctggttacttggagttagcaggttgtttcaggaatgggaaatggttaacccataatacagacattgagaaagtgcagaccttaaaaattggtcagcatgttcgattccgtgctggaatttcagagcctagatggggatggagagatgcgaaccctgattctagaggcgtcatcgctggtgtacatgctgatggagaggtaagggttgccttctttggtgtgcctggattgtggagaggcgaccctgcagatcttgaaattgagaatatctttgaggttggagagtgggttaggctgacgaacgatgtggaacaatggagatcgctcaaacctggtagcattggtgtggtgcatggggtgggatatcaaggtgatgcttgggatggaaccattcatgttgctttttgtggtgagcaggaaaggtggattgggccttctagccagcttgaaggagttagcaagtttgttgttgggcagcgtgttcgaatcagaggctgtatccgccagccaagatttggttggtccaaccataatcattcaagtatagggacaatctcatctattgacgcagatgggaagctgaggattcatacaccagctggtgccagggcttggttgatagacccagcagaggtggaagaagtggaggaggaggaagtctgtgttggggattgggtaaaggttaaggactccgttggaaccccagtttatcaatggggtgatgtgaaccacagcagcataggggtggtccaccgggctgatgatggagagctctggattgctttctgcttctgcgagaggctatggttatgcaaagcatgggaggtggaaaaagtgaggcccttcagacaaggtgacaaagtaaggatacgacctggtcttgtatcccccagatggggttgggggatggagacctacgcgagcaaaggcgaggttgtaggtgtggatgcaaatggaaagctgaggataaagtttcggtggagggatagactttggattggggaccctgctgatattgttcttgatgatgtccacttattgacggaggcttctaatggcttggctttttgttcataggcttgtggtattctttcgataccatatctgatatattgcacccatccattttgcagcatttcaaatttagcaaaatcttaacctgcagtggacttgcaagttgcacataactatcatcgcatcggcatgccagggtgtatttcatgttgataaccggggaatgagaagacaacgatagtgtagagctggtgcaccactggcgtcaaaccccgggcttgtcgtgccctcagg

SEQ ID NO: 20060 - DNA, 1827 bp, Zea Mays
tatcagttcttcttgtatcagttgcttcgaggtttgaaatacatacacacagcttattgcagcaaatgtattccatcgagatctcaaaccaaaaaatattctggcaaatgctgattgtaagctcaaaatatgtgattttggcctagcaagagtagctttcagtgatactccaaccgcgatcttttggacagattatgttgcaactaggtggtaccgagcaccggagctgtgtggatcatttttctcaaagtatacaccagcgatagatatatggagtattggttgtatatttgcggaactattaactggaaaaccgcttttcccggggaaaaatgtggtacatcaacttgatataattacagatctcatgggaacaccttctccagaagcaatatcgaggattcgtaatgagaaggccaggcgctacttgagtaatatgaggcggaaaaagcccataccttttacacagaagttcccaaatgcagatccacttgcattaggtttgttagagcgaatgctagcttttgagccaaaagacaggccaagtgctgaagaggctcttgctcatccttattttaagaatatagccaatgtggatagagagccttctgcacaagctgtcacaaagctcgaatttgagttcgagagacggagagtcactaaagatgacataagggaacttatatatagagaaattcttgagtatcatccaaagatgttgaaagaatttattgagggaactgagtcaagtggtttcatgtacccaagtgcagtagataattttaaaaagcagtttgcataccttgaggaacattatgccaagggatctacgggaactccacctgagaggcaacataactcattgccacggccttctgttgtctattcagacaaccaatcacaaagcacggccaatataacagaggatctttccaagtgtataatcagagaaaatgcacagaagtcacagcaatataatgcttcagttgcaaataaatttccatcccatgttcctcaaggtgctgctgcaaggcctggtaaagcagttggttcggtgctgcagtacaacctctctcaagcatctgctgctgagcaatatgagcagcgaagggttgctaggcacccagcagttgccccaaacaacatcccttctggaagctcataccccagaagaaatcagacctgcaagagcgagacaggcgacactgagaggatggacgtgaaccaagctgggcagccgaagtcctatgcagcaaacaaactacctgcaactgttgatggtcgcggcggccattggtagatctccgcgttgtgtaacacgttatcagcatctgttacttgtgctaagcgctacattattctgacaaattcagaaatgtagttctgtacagatccgtattctttccccggattcctaagtactgtagaacggtgctcgaaatcgctgggtttccacctcctgtcgctattcattcactgaaagatctgctggctggtggagatttgtcagactgaagtatactggaagctcactggcagcagcgggaactcaagcaagcagagttcttgactgacgttgtcatttgttcttcagcctggtaggtctaacgagctgaatactgttagttcctgtgaatcatctacacgtcaggtgcagaattctgttgagctagctaggaggtgcaagcatgttgtacgctgaatatcaaagtcattgatcctttactcatgttatcttggttaaacgtgagatatatgctagcgtgtagtatccctgtttcccaacaatatacttactcaccacattgttcacgtatagctgatact

SEQ ID NO: 20061 - DNA, 2601 bp, Zea Mays
cccatctccatcttcctcgcagcttcgacgctccatcttccgctccctcccttacccgcggtcggcacgcaggcgacgccggcggcgctcaggctcgggctctcatctactgcgtcagcagcttcccctcccgcatctcgccagtcgcctcgcgctctcacctccggtcttccgcacactggccggtgaccctgccttataatattctgccacatcactctgggtgaagcaagattggtgctctttaaatttggaacttggaacatggagcatgtgctgattagtagaaggtttccaactgatcctgctctctaaatttggaacatggagcatgtgctgagtagtagaaggtttccaactgatcccaatgagtataagttatatgaggaaattggagatggtgttagtgccacagtataccgagctctttgtgtcccacttgacatcttggttgccatcaaagtgcttgaccttgagaaatgtaacaatgacctggatgggataagacgggaagtgcaaactatgagtttgattgatcacccaaatcttcttcgtgcatattgctcatttacaaatgggcaccagctttgggttgtcatgccttacatggctgctggatctgctctccacattatgaaaacttcttttccagaagggtttgatgagccagtcattgctactcttttgcgtgaagttttgaaagctcttgtctacctacattctcaaggacatattcacagagatgtcaaggctggaaacatcttaatagatacaaatggggctgttaagctaggagactttggtgtgtcagcctgtatgttcgatactggaaataggcaaagagcaagaaatacatttgtagggacgccttgctggatggctcctgaagtcatgcaacaactgcatggttatgattacaaagctgacatttggtcctttggaataacggcattagaactagcacatggtcatgctccattttcgaagtaccctccaatgaaggtgttgcttatgaccttgcaaaatgcaccaccaggtttagattatgagagggacaagcggttttcaaagtctttcaaggatttggttgctacatgcttagtcaaggatccacgcaagcgtccttcgtctgaaaagctgctgaagcattctttctttaagcatgctcgctcagctgaatatctggcacggagtattcttgatggcctccctccattgggtgaacgctttagggaactgaagagcaaagaggctgagttgcttctcaataacaaacttggtcaggagagcaaggagcagctatcacagaaagagtacataaggggcatcagtggctggaacttcaatctagaggacttgaaaaatgcagctgcccttatgtcagggagaacagagttaaggatgactcacaagaagcttacaatggtccagaacatatttaccaggaaaggctcaaccatgttgcttctagaaggcctgaagaggatgagatacaagaagttgaagccttgaatgatgctgtctcctcttcgttttcaagccgctcccttgaggcactaaaatcttgctttgatgtttgtggtgttgatgatccgagcccaactgctactgattcaagagcgcaaccaagtgtcggaactttacctttccagcagttgcaaaaatttgagcattgtaaaagtggcgactgcaatggtgaaagcttggaaagaagcgtttctgtacctacgaatctggtcactagtggataccacaagcattcaagtggttctcttatacctgagcaagttctttctccctacttgagcagtgatttggaaagggatggatttcgtcagaaaaacttaagcagcaggaactgtagtggccctttattgttccgccaaatgaaggattcacgcacacatcaatctgttgcgccagacgagtcgtcggaaggaaaaattatccgtcgaagggggcgcttccaggttacatcagatagtatttctgaaaaggtagctacatcatcctgcaacagcagcaggataaatctaccaattgatgcagcacgttcaagtcccaagttgtctgcaattcttccaactttgcaattcttgatgaagcagaatactatgcaaaaggaagtactcagtaggctgatttcttcaattgaggaaacatctgatgattctgaagcaaccggaagcagttcatatcagtcttctggagggcctgcccgagaaaaggaattgcatttgtatgttctccaattgcagcgaagtgtcaccgaacttgctgaggaagtgcaaagattaaagctccaaaacaataagcttgagcatcagatcaatatattgtcaagaaaagatgaaaggtcgtcaacgcaagataactgacaatgatgatatgccccttctaccacattgtaattcgattacccaattttgctttgttagaaagttatttttattccctgcagtcagagttgtatcattgtaagttgtaagtatttagcgaagtgtgaaatcatagtaattttgatctgtacagctttgtttggttaaccatgaagatatagttcttgtgttataagtaatgtgctgataatattgttttgcg

SEQ ID NO: 20062 - DNA, 1900 bp, Zea Mays
aacgactcgactgtccccaatccagtatcgcgagaagcgctacgcggccggcgaggcgctccccccaatatgccgtggccgttctgcacgctctcgtcctcgcccgccgccggcgcgcccagcgccgcggtgaagggggaggaggttgcgttggacaagcaccttacccggtgcgcggcggcaggcatagcaccgttgcgggtggcggtgctggtgagcggcggggtggatagcagcgtggcgcttcgcctcctccacgccgccggccatcgctgcaccgcgttctacctgaagatttggttccagatttcaggaatttctggtccgagtgcccatgggacgaggatttgaagtatgcacaagctgtttgtgacaagattgatgtgccattggaggtggtccacctatccgatgaatactggaaccatgtggtatcacatatgatcaatgagtatcgctgtggtcgtacaccaaatcccgatgttctgtgcaacacgagaataaagttcgggtctttcttagaagccattgaaaatttaggatttgactacatagcttcaggacactatgcacacgtagtacatccttccgctgaaaataccgaagcgccatccgtactacaattatcaaaggacaagatcaaggatcaaacctatttcctctcacatctatctcaatctcagcttagaaggcttcttttcccactaggatgtattacaaaggatgaggttcgcagactggctactcaaatgggccttcctaaccaaggtaggaaagactcacaagggatatgctttcttggaaaggtcaagtttagtgagtttgttgaaagacatataggagaaaaggaaggaatcatactggaagctgagtccggagattacctagggatacaccgtgggttttggttttatacaattggtcagcggcaaggattacggcttcctggaggaccttggtacgttgtagagaaagatgttcaaaacaatgtggtttttgtatcaaggaattattattcattggataagcggaggcgcacatttcgtgttggatcactaaactggtttgataattgtggacctggaaacaatgagcaactcaaatgcaaggtgcgacatagccctgaatttcatgattgcactttggtaaaagagcgtagtgaagaaaatggggatgctttggtggtgcatctggctgaagatgaccagggcttggcagctggtcagtttgcagcgttctatagtgaaaatgtatgcctggggtcaggcataattttggattcatgggacaagatgagcttccctgtctgctcaagggcactcgaaatcgcaaagttggcggacaagtcgagcttagggaagccaataagaatcgtgaacctggaacatatcgtgaaacctgaacaacaggaggaaatcaaagttgcctgacagattggtgccgtaaccttctcctagctccgccagctgcccccttcaaatcaattcatcaatcaaccgtatcgcaggccctggaaatcgaaggatgaggggtcttctagaatctaccgatatatacccccagttggaaactccaggtccttcttggaaggatgatatagtggaatatggcatgacttggtgcgctcgtgttgcagaggaacgatgaagcttcgtgcgtggatagggttgatctgaattaactgttgacagtgattttacgatctcgcgggaaagcaacacaatagtttgggcacgtcctctcctgagtggaatgatctggattcagtagtagtcagtggcacttcattaaaactaatacagggaaatcgtgacgttgtatgatagtggtaagatattgtattgtgaattttgacgataatatcggtgcgtgattgtgccactggatttgttcatcagta

SEQ ID NO: 20063 - DNA, 1174 bp, Zea Mays
tagttggagcagcagtagccacagcaccctcccccaggggaagagataaagctggaagacctctctgattgtgaaatcaaacgattccgtcaagctctggcctcaggtgagctcagtaagatgattgaaccgtggacaccttggtggaaaaaaccctcagccagatctatttcccttggcccggatggaagccagcttatcagacaagtaaacgcagaagacactgctgtaccatatccagatgcaaatactgaccaagaggctagcatcaacgaaatccctgaagggccagaatctcctctcccgtcactgaaacagttaacaaggacagagccatctcctttgcttgctgtccacttggttgacattctgtacagttactgcttcacacttcggctctacaacggtgattggcactcagatcctttgggtgcttccactgtcgccctgtcgatgtcgaaagtcatgggccaggatgctaaacctgagactgtacctgaagcactcgcagcctgcatcgaggagacatgctcaccagcttacaggcatactggtggtttcaggtttgctattggactcgtggacgatatcatcgccattctctccttgggacagaacgcacttatttgtgccctatgcgacttccatcgactcgttgaagttggtaagagcatgctcaaagtggagaaggtgggcaagacggagagggcacagggctctccaaagcttcgcagtgcagctaggaagctattcttcatgacttgttgggtccatgagcagccagatgaggcgtggccatctttagctcacatcgtccaggtgcagaaagcatctatggaggagttggagaccgggaattggaaggcggatagaaagagcaaaccacaatccgcggttcttatcgaggagctgtaggcatatggatgtaccactggaaactggatcgcgaagctctgtacccttgtgtatcgctcaggatgaatccaacgagagaccttgtccttgtaatgcagttagttgcttttgtgtacacttttttttttgaaaaaaattgtatttgttgaaatcctggttgaagcgatcctgctttactttgcttgttaagttgcgggctgatttaatccatgcgttggagcttatgcagttcagatattcttatgattgcaagtttgtg

SEQ ID NO: 20064 - DNA, 152 bp, Zea Mays
gggggcagcgccgggttgaccgcggcctcggccgccgcctggttcgactccgctccaggccgcgtgctgttcaaagctccgaagtcctccacgttctcggcacgcgccgcctgcaacacaacactccgattcagcaagcccacatataaccc

SEQ ID NO: 20065 - DNA, 2780 bp, Zea Mays
aaacttggccgcagtgaagggaggggaggagaaagggttttggaattaggcatcggccgccgttgcgttggtgtgagcaagtgaaccaggccgaaaccgaagctaccgccaccaccaccccgccctcgtctccctgtccccgagtcccagtaggggatcccggcggtgaggatgagcggcggcggagctggagggaagggggcggcggcgcctgttccgcccgggtcgaggaagctggtgcagggccttaaggagatcgtgaaccgccccgaggcggagatctacgccgcactgcgcgagtgcggcatggaccccgacgagacggtcagccgcctcctctcccaagatactttccaagaggtaaagagcaagcgcgacaagaagaaagagattaaagaggttcctgagacaagatatcgatcagcaaatagttctactaatcgaggccttagaagtggtgtagatcgtggtggacggaacaattctatgcactccagctctactgataacatgacctcaaggccaccagggtctggtactgcatcaggtacttccagtcagaggcaaacagttgcaagtccttctgcaaacaaacatatggttgctgatggaccagctgcatcattgcaatcatcgtctgggtttcagcatggtggttggtctgggacacctggtcagttgtcgatggctgacattgtgaaaatgggccggcctcagggaaagacttctatcaaacctgtggtcacagctgacagaggttatgctggacagtacccatctttgccaagcacaaaccagaatctgaaacaatctggaagcatggttcccccaacagagcttgacaaggggttacaacctgcccaagattcggttcaggttaaggatcatgatcattctactgctgacagcaagctcccatatggtactgactggtctccacaagatggcccgacatttgcgaaccaatcttcccttcctgagccatctggtgatccgtccttgtatgaggcatcgtttcagtcatctacattggttactgatgtagttaattcacatgaaaattcacacttggatgaaaacgacacctttgcaatgggaccagcacctgcctctgagagacacctggatcctagtgacggtatttctgagtacaatgatgtaatattgaacaactcaagttcctatcagcctcataattactcttacacagaacaacaagaagttgaggattccagtgctgatgtatcagcagcagcagcaaacttccagagtttaagcctacataatgatgagttagctgcaaaaaagtctgcagaagataaccctgcagtgataattcctgaccacttgcaagttacaaatacagaatgtgtcaagttgagctttggcagttttggatctggtgcattttctgggttactcccacaaaataccactgatagcaatgtggaattccctgctcgagaggaatctgcaccagtagatcaaatagatgccaggaatcaagattactatgaaagtggtgctgtaacttcaccagcagacgaaaatcttgaggccatgcttggagctaacatggagaatgtagatgcgccttctgtttcacaggctaatgagctcaggcaggacgtacttgatccttctgaacttcaatatgacgtcccatcagttccaagtcatgcttattcaaacacggacactttacagcctagcacaattgaggagccacaaggaaacaaccaagcacatactctttcccatttgtcaaacttaatgcaagcaaatcctttgagcaccagcagcctattggggtcaaatcaaaatcatgcaactcttcatggcttagagtttgatttaccgccttatctgggagcaaaatataacgcaggctcaactacaaatcctagaccacccatatccatgcagcaggaggcactgaaagcaggggttttctccaacgcccagtctacacagagtcttccaagtactagcattcagacggggcttcctctgccacagcaattagcacatcacccttactctcagccaactttaccaatcacacattttccaaatatggttgggtatccgtatttgccacaaaactatgctacttacctatcttcaggcaccttccagcaagcatacccgagtagcggaccattccatcagtctgctgctgctgctttgctggcatctggtatgaagtactcgactccagagtataagaacaacctgtctgccacaggcttacaacagcaacatcagccacaaccacaaccactttcatcagtcatctctggttatggaggctttggaagctcaagtaatatacaaggaaattttacccttagtcagagtaccggctctgcatcagctcttgggtttgatgaagcattgagcagacagtacaaaaacaccagtcaatacatggctctccagcagggcgacaactctggaatgtgggttcatggctctggttcaagagcggcctcgacgcttccgcctaaccacttctatggttaccagggacagagtcagctgggtggctttgctcgggcgcagcagccacagccttcccaatttggaggccatgggtacccaactgtctaccagtctcagggacaggagcacccccagaaccttgctgagggcagcctgaacggcttccaggtcacaccgtctcagccatctcatccgagctggcagcatcagcacacttttggtcatgattttactgcttcaaaaacatttccaattccaccatattggcatcgcgt

SEQ ID NO: 20066 - DNA, 1078 bp, Zea Mays
tcgtgcatggtttatctgaagtatttcctgcatgaaagatctttccacctcatgagaagatagagaacataaatgatcagtactggacattacgagctgaggagatcccagaggaagagaagaatcttggcccacatgatcgattgattcatgtttaccatttcatgaaagaccctaaccagaatcaacaaattcaaaattttggagatccttttttgatggttattcgggaaggtgagactgctgcagaggtaatggagcgcatccagagaaaacttagagttcctgatgatgagttctccaagtggaagcttgcattcatatccatgaaccggccagagtacctccaggacactgacgttgtatcagcacgttttcagcggagagatgtatatggtgcttgggaacaataccttggcttggagcacactgatacaacatcgaaacggtcttacacatccaatcagaatcggcacacctatgagaagcccgtaaaaatttataattgagaaaccttcatcaaagttcaatccattgtcaaaggcgtcgacagcagcatgcccaaggtgatacgacgcttcaaacagaaaaatctggtatagtatttgcctgtgctaaggcctgcaaggcgcaagcccaccaggccaccaatgctgcttccaaccttcattgttccaagcaaccaagcatgtgtttggtttttcttcgtcgtgtcgagtatgacggcccctgacaggctgtgggaacaatggcagagattgtataatgggtttggtataattcttcgtgctgttgagaaacgtacgaggataacccgatcagatagtagagttttgagacctgtcaaacagaaccttttgaaactaacctacccgttataccagaagggccgtttgcaagtcttctattatacatagtttttattatatatatatatatatatgcatctagaaaataagaacaatttagaatttagaatggagtagaatacatttctacccttatttagaaatagaactatcccctgtggagagatagaacaccagctagggacaaagctgccaagacttgttacaat

SEQ ID NO: 20067 - DNA, 3473 bp, Zea Mays
gcggttgtcattatcctcggcgtgagcgtgagggcgcctccgtcgccttcgtcttctccaatctccacacacactcccactgcgcaaagcgagcgggcgggcgggcaaccaaccaaccaaccccactcgcctccctctccctcgccgttgccgccgagcaccgcgccgcggggtccccgtcgccatggagagcgcccacaagagcggaggcggaagcgcgcccggagcgggagccggaggggagggcgtcctgtgccacgcgtgcgggtaccagtacccgaacgggcacccgagcgccaagcagcggcgcgcgcaccggaagcactgcggcaagccggcgtccgccgcggcggcggcggagggctccggggagcacgaggccagcgagctgcttctaggtgaggtcggagccggcgcggcggaatgcggcggcggttcgcctggatctgcgcacgagcacggggacgcggcggagggaggggacagcgcaggtaatggtgctgggcatcgagtcgttggagacacatctgctgaagattgcctcatcagtggcagtagcgttctttctgaaatcacatctgagtccagcaggactgatgatggtactctgactacagtggctacacagtactctgaaaaaggatcatctactgaggatggggatccatctgatccagcagttggttctgaacagatccaggacgttcctacgtctgttgttccagcagagcctgaagaccgtgctaaattcagttctgaaatctctgaatctgaaatacagaacccgagtattgtgcgtccggaatcagacgcagctggaggtggaacttctgaactgacggatgatgtagccagacagcaggatgaggttgccgtgactggggaagatgctgtgttcgacgccatagatggaagcaaatctagtgaaaggaattctgtgcaaggtgatgagcttaatctctcctgtcaagatatactacaaacggagactggtggggggcacagtagcactgtagtggaggaagattcaggtagcaaggatcctactgcaagtgacggccaagaaatcctgatcgaagaaactgaaccaaatcagcagagcaagcatgcgttaactggctcatttgagaaagtccctgacattgagtctgttgggtcttctgctgagaaatctgtcggtacaggtgatgacttgcttcaatctggtaaaggtgcttgccactcagaaataccagtcgatatcatagctcagctgcaacttgaccctacctctggaacggcagatcatccggcaatctccaaaggggcagacaattttgaaggacaacattatcatacaacagatgaaagcatcggagcaataccaagtacatttgaacctgctgttggtgccaaagttgtatcagttgatgtcactgctgaccttacagaggatgtttgttcgtctgacataacaatagatgacggcatgcaggaaaatgtgacaagtggtactattgtaccatctcaagttgatatactggattcgagtccttccgctacagcacatgaagtcaacattgtcggtagcataaacgatgatgacgaaaagagtcaggatggaaaaagcagtgcagatcttgcttcatacgaggtaaaagagatggttgtcaaggataactttgaagaaaagcagcagaccaaagaggtcattgtagatcccactccacatgaagccaacaactttcccagtaccgataatcacgaggaaaatgagcagaacaaagaaattgttgcagacaccacttcacacaagataagtgctgtacaaagcatgggtagtactgaagaaaaggaacatattgaagatttcattgcgaaactggcttctgaagagatcatttttacaagtaacagagatattgtcgagcagcaggatgagactgatatgaaaacaaactatgaaatagacagggcacgcaacttagaagctactgaagaaattgctgctggtggtgagagtaacacgggaaccatcacagatgttgttgaagacaaattccctaatgaagaaattactttaggcactatctctcttaacatggcagacagcagcgttaaggaggaaaagatgcatgacgaagaagtgaacgaggatctagattctcgtgatgatattatggtacatggtcctgataatgtcaaagagaagatgtgtgaggagaccatgtcaggtcccaccttagacaagttcagtttgcctacatctactgacagtcctgaagagggtaataaggacgaaagcacgcgtgcagaccctatgtcgcacgagaccaatgtggcgcaaaccagcgatggtgctgatgaagagaagaagatcagggagcttgctgttgaccctacttccagcattggtaccatgggcaacataggcaacgctgaagacaagaagccgagtgaagaaactacaacagatcctagacctgttgagaacaccacaacacaaggcacagaggacgcgacagatcctaaacctgttgagaacaccacaccacaaggcacagaagacgcggatagcagcaagcagaatgaaaacactgcgagcgtaggtggcgttgaaggcaagaagcagggtgaagaaactacagcggatcctagatccgtcgaaaacaccacagttgaaggcaagaagcagggtgaagaaactacagcggatcctagatccgtcgaaaacaccacagcacagggcacagaggatgcagaaagcagcaagcagaatgagaacacaaatgtcatggaagaagaaagggtgacggtggaagatacaacctcaagggagatcagcgccatagaaagcacagatgacctgaagggcaaggctaccaacgagaacgaagagatagccgacaaggaaatggtcaccgactcagacaagaaccatgtctcgctgaaggtcctcctcgcggacaagaacgtggaagcgaaagagaaggagaagaaggcgactagcgccaaggaccgggtgctgtcgttcaggcgccgggtatccaaggacaacgtgtcgccgccggtgaagccaggctcgccaaccaaagacaaagatggctcagggcagcaggactggaactccccggccaggttgcccgtcgagaagaaacccaaggggaggaaacagcaatgggtaccgtttatttgctgctcgtcggtacagtaatccgtttgccagcatcagcttggggcatccattgttgtgtttgtacttgtacgctgatggtagtagattgagtaggaccttcgttccaggattggaccttggcagctttgctactctacttggattgtgaacccggctctgccgtttttgtatgttataaatatctgccttgatggaggggaggagggtatgccccaaactctggtaaagtaggaaggttatgataggactgacgagttaacttttaaacctagctattttaattaaaatgaaacccgaa

SEQ ID NO: 20068 - DNA, 4123 bp, Zea Mays
gcggccagattcatatgcagaagcattgttgatgtaaagactcacaaattccactcccgcatttcaaagaggaagtgctacttgaggaactcactgtcggagtgtgacaggaccatccacagtggtagatggttggagtttcggagacacaagggagtcttccagagaactagaaggatggttcacattattccattggcttctgatggtgatggcaaccatatatctgttaatggagctctgcaagttggttctacaagcaacattgatgaaataaagttgaaattgaataaagcattgcagagtgaagatatcagcaatggactcgtccagtcgatacatgatgctgcaagatctattgagttggctctcatagagcacagcaaattgccaaagagctcttggtttccaaagacatggctaggcgttgagaacaatgcttggataaaatcactgtcttaccaggctgctgtagactcattgttgaaagcagttatcgatgtttcatctcgtgggaatgacagagatagagatattaatgtgtttgttcaaaggagtttgtcccgcctgctcaccccccttgagagtgttatcaagaatgaattatctaagagggaacctgcattgtatgaatggtattcatccgatcaaaatcctttggtggtgagacaatttgtaaacatttttgaaaatgatccaatgttttactctgctacagcaatatgccttgaaggcgagccgatgaatactagtgaaagtgatctttctctgcttatgctaggtttgatctgtcttgctgcaatcacaaagtttggatcagcaaaagtttcttgtcagcaattctcttcaatggtgcctgatattattggtcgattcatggatatgcttcttgagtttgcccctctaagtaaagcatataacttggcgaaagatattggtcttcggagagaatttttgtataattttggtcctcgtgctgctgttcctaaacttggcaatgaccatggacttgaaatatcattttggattgaactggtgcagaagcaattactctgggctcttgatcgtgaaaagatatggtcaagactgacaacaagtgaaagcattgaggttctggaaaaggatcttgcaatatttggtttttttgttgctttgggtagaagcacacaaggatatttgtctttcaagggtttgactgatttggatgattcactgaatggtattgtaaggtatcttatcggtgggagtgtactatattatccacagctgtcctcgattagttcatatcaactgtatgtggaggtagtctgtgaagagctcgagtggcttcctttttacaatgatgatgttttaagtgcaaaaactgatactgaaggtagagaagaagtgcctaaaggagaagtcatatcaagagtcctaaatgtgtgctcttactggatgactagttttacaaagtacagctcatggcttgagaacccttcaaatgtgaaggctgcaaagttcctttctaaggggtttgtaattatttggtcacgacaatgcgtatctatctcttgtttgcagatagggatttgtttttgtttttctaaaaagcagatacggatttgtgagtactgattaattttctactgcatgttaataattgtagacatgtcatgttgagtgactgcatgaaggagcttgacatatcaagaaatatgtcaaacgacagtggcttcctagaacctgaagaagaattggatactggaacagaattagcttcctttgacaagtcgcttgaaaatgttgaagaagctctggttaagttagaaaatttgcttcaagaattacatgtttccagttcgcactctggtaaggaggatctgaaggctgcatgctctgatcttgaaatgataagaagactgaagaaagaagctgagcttcttgaggcatcctttctagcaaaagcagaatatctggaggccgatgcaagtagcggatcactatctcctgcagaggaaggacctgtaaagacaagtagcaggacgaacgatacatcagcaccacaaaaaacaggaagcagggtggataataaacgtcgcccattttgggacttctttggtcggtctttgaaagttgatccagctcttgcagatcaggatctgatcactgtcgccaatgtggagaaggaaggcatggagtcaaatgacatcctccgcttcgaacagttaagacgtgagctgattgagttagaaaagagagtgcagaagagtgcggatgaagctcaaaaggaggaggagatggttgtcgcagaaaaaacaactgcaccatcgcctggatcatcagtttcttctcgtcagactaccaagaaagaaaatgtcataactaaatcagtggagaaggtcaaagagactacaacgactgtgttgcaggggacacaactattagcaattgatacaggagctgctatgggtttgctaaaaagagctcttattggggatgaactaactcagaaggaaaagcaggctcttcaaagaacattgacagatttggcgtctgtcgttcctataggaatactcatgcttttgccacttaccgccgttggtcatgctgctattttggctttcatccagagatatgtgccatcgatgatcccgtccacatatgcccccggtaggttggatctccttaggcagattgagaaggttaaggaaatggaagttgctgaaggcagcagtgaagatatattggaggaactgaacaaatgaaataagctgggcatgtacagatggacatgattatactgcttagcttacggtctttcctgtaaagttgttttggaacaagacatttgagggggtttgttttatctaaagattctttgaatggcatacccgctggaaacagaagtgcaaggccctaggaataagtaaccaatcattgtgtcgacaaatgttccacgtctgcaggctggtgtatacataaaacatactccacattatacattacatgggcggctcacggtgcccttcaacatagtagaggatgaatgtccaagttcctcctggacagtgttctgtgtagggtagtggttttgatagaggattgtatatctagttggtatgttggtgatcacctttgttttgttttttaggaaccaagcctactacatgcattattgtctgtacccaaatgccaagttcagtgatctcctacgggattgagtggtgcgggcattttctaataataagccaagcccgtgagcaagatgtaggcgtgaacagtgttcgtcagtcgccgccaccgtctcccctcctgatccaatccaatggcgcgcctccacctcgtagccgtggcaatgggcttgctcttggccttgacgacggcgcaggcaccgggcgcgtccacgatgcccgcgcccatggcgcagcctccggcgacctcggcgcctcctcgtcccgcgccatccccgacccagaagaccgctccagctccggcgcccaatgccacggtacccgcccccgcctcgccgccggcgccgagctctatcgggcagacgccgaccgaggcgccgtcctcccctccgccgcccagcgccgcgtccagcgttgcctccgccttgtacgtggccgccgctatggcggctgtcgtgtttttcttctgaggtcggtactcggcgccgatggatccgccgcctatggtatggtacggtgcggtgtggatttgacacgatggctcccgctaccgctggtcgagtttgcttattaggatactagtagttaattaatagttgggttgatcagatcagatctagcgtttttgttgagtggggatattatttcttctacggatctgcacactagggttatgtcactatggttgccattgttattagggaaggtgcaaacttctaatttgaatcacatgatgttgatccaagggacgcataagggacgccaagcttattaaaacgataaaacgatggaacgctcatgggtgaaattttgacttttaaacgtttaaactttgtttaaacatagttttaaacaacataggaaaaataccaatatatcataatttcagacaataatatgaagttaaatactccctccgtcccaggatataaggcgtaactactttttat

SEQ ID NO: 20069 - DNA, 1485 bp, Zea Mays
ttttttaccttaaaaaggtttagtaaaccctgctgtctgctggtcttcagttttcacggcgggttgtcgtggcctgtggctgggagcctgggtggctgtgggcaggagtatgccaagatgatcgagacaccaacaaaccaaacaccatccgccacgaccacgactccacgagagagcggaggaggagggggagcaatggcagagccgggccagcagttgctgcggtcgttcgtggaggtggcagcgggctcgcacttccctatccagaacctgcccttcggggtcttccgccggcgggggtcgccaccgcaggctccgctccccccggtggccatcggggacttcgcgctcgacctcgccaccgtcgccgacgcgggtctcttcgacgggcccgcgctctccggctccccgtgcttccaccaggagacgctcaacatgttcttggggatgggccgaccggcgtggagggaggcgcgcgccacgctacaaaaaatcctctcagccgacgagccagtcttgcgtgacaacgaagccctgaggaataaatgtcttattccaatgagtgatatcgagatggttctaccaatcacggttggaggttacacagatttcttttgttctgtgcaccatgcaaggaactgcggattcatcttccgagggccgcagactccagttaatccaaattggttttatcttccaataggatacaatggacgagcatcatctatagttgtgtctggaaccgatgtaattaggcccagaggacaaggacatccaacaggaaactccgctccttattttggtccctctcagaagcttgattttgagcttgagatggctgccattgttggtccaggaaatgaattaggcaaaccaattgatatcaatgatgctgaagaacatatttttggcctaactttgatgaatgattggagcgccagagatattcaggcttgggagactatacctcttggacctttccttgggaaaagcttcagtaccaccatatcaccatggattgttactcttgatgctttgaagcctttcatgtgtgaggctcctaagcaggaacccgaacctttaccatacctagctgaaaagaatcacataaactatgacattcctcttgaagtcttgattaagcctaaagatcaaaatgttgcactaattgtcacaaaaactaatttcaagcatctgtattggacggtgacgcagcagctaacacaccacactatcaatggatgcaacatgaggccgggggatatatttgcaactggcacactcagtggacctgaaccggactccctcggatgtctattggagctaacatggaacgggcagaaggagataccagtgggcaatttgacccgcaagtttctagaagatggagatgaggtcatcttgacaggatgctgcaagatgatagggggtggcaacatggtggtccataccaagatctgtgagacaccttcggaaccgttgttg

SEQ ID NO: 20070 - DNA, 141 bp, Zea Mays
agcggaagacttattacaaagtaaaagaataaatgtaaaacgaactaaggatcgtcggcgccaatgtcgactgagaaacaccacctagatcaagtcgaatgcctcagtgttaggcggctcctcttcgaccacctgttcttc

SEQ ID NO: 20071 - DNA, 2373 bp, Zea Mays
cgtaaacagccccggaaaaattactcttgtgggttcccacctggcgactgtttttcttctccagtacacctcgccagcgcgataacttaactgcggcggcagccgccggcccgccgcccagctgcgcaggtcttcgtcgcgccggccactagaacgcagcacataaggttcttcgttacggagtaagatcaattttagccatggtgctggcgcagctcgtttttctgaagtttcgggacttcaattgaacccttgagtggacagccacaaaaccatggctgcggttgccggcgtgtcggaaccgccaatggtggagcaagtgatcactgaattcttcgccaagagcctccacgtcatcctggagtcgcgctcaccctatgattcgtcgcggaacttcacactgccctccccaccgtcgtcgccactggctggcagccagccacgtgaccggtggttcaaccttgctctccgggactgccctgccgcgcttgagaattttgacctgtggaggcagagcaacctcgagcctctggtcattgacattgtcctcctgcaacgtgacaacaccagaaccgccagtgtcgaggccagcaggatcatcgagaggtgggtaattaagtacgaaactagcaggtctggcaatgttatcaagaacactgacaagaacgctagaagcagctgttctcaggatcatagcttgtacaggagggcgtacattggctcgacagtgttgttccggtcattgtatctggttgtcaggctcttgccagcataccatcttttcgaggagctcaattcatctggaaggatctgtccgttaagcctcttgcacaggatttcatcatttgttgagccattcacccgcgcagaggatgcagagatgaaacactttgcatttgctccgattgaaactctgcttggttccttaagcttgtcagtttcgtatgtacctgtgttggagttggctgcagtcccagagcagtccacaccaatgccacctgaacttataaaggattatgtcggaagccccacaacagattttcttaggaagcttgattccctaccttcagatggcattgcacctgcatgttttccagtgaccaggcggcacagttggagcactgggcatggagttagaccaccggcatcaccatttcttatgagttcagaaccccatggacgcctacagccatgtatgcctaccgataattctccgacagcatacatacatccacatattacatcatcatctgagaaaaagagaaatacagtaaatgaagagtgttattcatcgccacctctgtctccatcaccatctcatccgccttctagctacccaagaaatcctttcttcagatatgggagtgctccattaagtattcccacagtgagggctggcggaggtggtagcaggctgcctccttctccacgaaggaaggataaacagcaatgctcatctcaaaatgagaatctgacacattctcccaatgataaatcaatagtatcaaaggatttggtcaagcttagtgagtttcataatgcgaagtatttgcaaaaggttttatcgtttggtaatgatgatttaatgtattttcgtggactaaagttgacccatacctccagcaaacttttcatcatggatgaactggatgaacgggagttggtttttgcatgggaagataaagacaccatcattgatcagcttaacaggattgatctctctgactgggaggaccatgaatcgagccaggaacttggaggctcgttaacgagatctccagatgcagcgatcggtattcttatgcgcgtcctaaagaacgccccaggcctcagggaaaggctactgacagtccccagtgctggcacagttcctcaagaaccttcttcactccagagggtagtgactgaggaacatggcagcggagcatcaagctctgcggtggtgccttctgctcttctgaggtcaaggacagcggcggacgcgctgcaggagctgaacaggtacaagcagattagagaatcgatactgagccgcagcagagggcatccctgcagcaccgagctggaggagaaccccgcggatggagacccatagcatacagtatgacgacgaaagcgagctgtatataagtagagaaggctagaagctagctggctgtcttttaagttgctggtggctgctgagatgattttggaaattaggtagctgctaggaactgaccaactctctatatctgctatacatgtataagctacggcagacatatatatctgggatgatggcccacttgctgggttgtgtaaagtcgagacgtttaactgaagttcatgccgtgaaaatgtggttgaccttggctctgttctgtcaagaaa

SEQ ID NO: 20072 - DNA, 1221 bp, Zea Mays
attccctcggacgccgtgccgcgtggtgtcgtgtcgcctattcttcctcttgcaccgcagtgttcttgccgccggcaactcggctcggctcaacaagccacgcaaccttccgccgtcgagactcgtgaggcgtcgtcgcccctgccctctctgccgacaggggacagggtggagagttgcccgggctcgggttgactcgtgtgggcgcctctttcacgcgttcggcatgctcaaagggacgatcgctgttgcctgccaagttccgtgagcggaatccgcaaagagtctgtgatgcttgttatgataggcttgatccattgcagaacttattgattaattctgtcagcaatgcctcacaaactgcaaagcatgatgtcatggattggacttgtgcaagagggtggttaaattttcccattggattaacaatggagcatgagatatacaaggcagcgaataccttgacaagttacagccaggtggcaagaataaaccctgagaagtctattccccatgcagttcttagtggagcaagtgggcttgccatattgacagttgtaaaagctggtgctattcttacttacaaacttggaactggcctagtagttgctcgaagatctgatggatcatggtctgcaccatctgctatactttctgctggttttggatggggagcacaggttggtggtgagcttatggatttcatcatagtgcttcgtggcccagaagctgtccaaactttctgcagtcgaatgcatttttcacttggggcaggtgtaagtgctgcagcaggacctgtgggcagagtagcagaagcagacctgagagctggtgataaaggatcaggagtttgctatacatacagctgcagcaaaggtgcatttattggtgtctcattagaagggaatctagttgccacacggatggatgctaatctgcggttttatggtgacccatatctaacaaccagcgacattctcacggggaatgtggaacagccaaatgctgccaaatttctttacactgcactggataatctatactcagggctggattggtagtgtacatatgtactttgaatttttttttcgattgtaaaagttgtatatatccacaaaatgctttcgtttgttcggcgtggcaaaataattaatgaaatgctctgtattaatgaacttccgtgcgactgtccgttgatgatgatttaatatgatgttgatg

SEQ ID NO: 20073 - DNA, 908 bp, Zea Mays
gcagtactgcagcggatcccgatcccatggcacacggtcgtttgaggcattgcgagtcccgagtcgactctctcccgtttcccggccgtccccttcaccaatccaatccaactccaattcgtcctccggtcctccccctcgaggcctacgcacaatagattcgatctcgagtcctcgaatcctgccttttcctctggtcaggaaagcatgagcttgatttccggcgcttctcgccgtcgagctcgaaccagaagataagaagaatccgctaggggcgagccccatagaagatggccccgcacccgcaggaggacaaatcagatcggcacagcagcggcgccggtgcgtcgagggagcaggaacggcggccgtccaaggcatggggaatcctcatcttcggcctcatcggcgtcaccaccgccagtttcgctattactcaagttcgcaaaagcatggactggttctacactcagttgaataaagtgcagtcaacatcatcttggacttggaggtatacaagtaataactcaagtcgtggaagcttcagtgaggaagctaagaaaagatattatcagcgaatgcagcaggaatatgaagaggaacaagagagagttcaaagaataaggcatatgcagagtgtcttcaacagagagaggaataaatttggacgaggttatgaaagctggagggagaatggccctcctcgtggctacaattacatccctcgggatgattggtattggcagaccgatacttctcactcagaacataaaaataggcggacgtacacaccggcaggacctagggtttatcctatgtcgcatcactatgcagttctaggtcttgacagatcacgagcgacaccatatacagatgcagaagtgaagtttataacggagctgattatg

SEQ ID NO: 20074 - DNA, 1818 bp, Zea Mays
aaactactctattccggacatcaaacaaatagtgaggagaagattagggaggttttccccaaaccaaacaccccccatatagttgctaaaagcagcgggacttttttgtggaagataatgggtgaaagagtaattgttgaaggttcagtccaacacaaccccctgaatgagggttcaattctctggataacagaaagtaggatgccgcttggtatagttgatgagttgtttggacctgttaagaacccgtactaccttgtgcggtacaactctgaggaagaggtacctgctgggatcagtgcaggaaccgatgtctgttttgtagcggagtttgcagaccacatcctgaatatgaaggagctctatgcaaaaggctatgatgaatctgattctgtagacaaagatgcagaagatttacctgatttctctgatgatgaaaaggaggctgagtacaaacggtcattacgtcaagcaaaaaggcagactgatagacagcacgagcctatgaagacttcttgttacatgaagggatcacagcctagaggtagcggaatacggaagcccatgccgccaaggaacctggatacatcaacacgaggtcatcagccacaacctcattttcgccgctcagatatggctcctgcaggtactgaaaatacagcacgttcattgggtcctcaaaatgcacctatgattgctccaacaatgttgcagcctggcccaatgaaccctgctgtgccaccacctgttcctcttgcaaatcagatgggtggctgcttcatgaacctggcacagcagcagctcttaccgcagcagcctaatatggtttggcctggtggatttccacagcctcctcttcccaacatgggggtagatggagctgcactcgccgccaacatcatgcagaacctcctcgcaggagccagccaattccagcatcagtttcagaacctgaacttcagtggcgcaggagccaaccagttcccgcagcagtttcagaaccagaacttcagtggcggcacaggagccaaccagttcccgcagcagtttcagaaccagaacttgagtggcccagggaccaaccaattccagcagcagtttccgaaccagaacttcagtggcttcccaaaccaaatgcccatgccctttcttcagaccatgcaccagaccggaatgcctgcaaatccaatgccgttcggtggcagaccaccagcgaaccctccatctggtccagcgtctattgcccctatggggcaaggcaactttggtcagcctccaaatccacaaggatttacgattccggcgccacccggtgaagatgggaaacaaggctcgcctccgcagttcagttccaggcagtttcatcaagggagctcgtcatcctttggccggggaaggacgcagcaccgcggtggccggcattcctatggcagaggtggcagaggcggccggcaccccagataggtatctggagcgttgcccccggtgtagattcagtatgagtgttccagtcataatcgagacactaaagattatgtaataccagaagtatgtttcttgtaatgttgcttgctgagtggattggacatcccgtcgaatgacagcgtgttgtaatacacttcctgcgcccagtatgcgtatctctggctccatgtcaccatgatctagtggaaagaggataatttttcttctcatgcaaaggaaattggagtgcaaagaaactcttctatttataatggtgtgacaggttattgtcgtgctatcgtagtgcgttttttttgtggtggtggcattgcacataattattctgtttttttt

SEQ ID NO: 20075 - DNA, 434 bp, Zea Mays
gcttcaaccattctctttggtaagccttacacttcacgtgagctcccacctttggcgagttcatgcacattattccccacaacttgttgagcgatgaacgtatgtgagctcactcttgctgtctcacaccccccacaggtcaagaacaggtaccacaggatgaggcgcttggaggatgttgtaatgagttcgtgagtggtctaggccgtcgtctcccagtcaactttgggttgctggaccgttgtctccttataatgtaattatttattttgtatagaattcatgttatgtagtaaagatgtgacattcgatcctgtgccatgattcatcatatgtgtgagacttggtcccagcacacctggtgattatgttcacgtccgggctttagacccctaaaacccgggtgttacagttagtcccaaaatgtgttctcc

SEQ ID NO: 20076 - DNA, 1686 bp, Zea Mays
cttgactagtgtgttgtggattactattggccgcccgacagccatgcatgcaacatctgtattacctggttcggaccgattcccagggtggtgatcacggaggcagagttagtcagagacatcctatcgaacaagtttggccacttcgagaagttcacgaacaagagtctcgggaagatgatcgccctcggggtggcgagctacgacggcgagaaatgggccaaacacaggaggatcctgaaccccgcgttccatctcgagaagctcaaggttggttggtttcgttgtccaacttccttcagttcaaggcgtatagagatgtgtgcgtgcttactactagagtgggtttttgcagcgcatgcagccggcgttcttgacgtgctgcaccgagctcattgatcgctgggacaaggaggtcgctggtggttccgacgggtcattcgagctggacgtctggccggagttccagagcctcaccggcgacgtgatctcccgcacggcgttcggcagcagcttcatggaagggcggaggatcttccagctccaggccgagcaagcggagcgagtgatcaaggctttccagtacatatacatcccaggcttcgtgttcttcccgacacccaacaaccggaggatgaaggagatcaacagggagatcgaagggactctgagaggcatgatcgagaagagggagcgcgcgatcgagaacggcgaagcgagcggcgacgacctgctcggcctgctgctgcagtccaacatggagagcgggaaaggcggcctgaggatgagcacggaggacgtggtcgaggagtgcaagctcttctacttcgccggcatggagaccacgtcggtgctgctcacctggacgctcgtcatcctaggcatgcaccccgagtggcaggaccgcgccagggaggaggtcttcagcgtcttcggcagggacaagcgccccgatttcgacggcatcagtcggctcaaaacggttacgatgatactgtacgaggtgctcaggctgtacccgccggcggtgacgctgaaccgaagaacgttcaaagacatgcagatcggaggcatcacgtaccctgcgggggtgatcctggagctccccgtgatcgtcgtccaccacgaccccgacgtctggggcaaggacgcgcacgagttcaggccggagaggttcgccgaggggatctccaaggcgaccaaggaccagcagccggcgttcttcccgttcggctgggggccgaggatctgcatcggccagaacttcgcgctgctcgaggccaagatggccctcagcatgatcctccagcgcttccagttccggctgtccccttcctacacgcatgcgccgtacaccgtccttctgctgcatcctcagcatggcgctccaattattttcgacaggatctgactgcccttgcatgacatcgtcgatcgttgtcagtatgtcacagtgcaaataaactcgtatgaataatattgtgttagggagagtctagttctgtgtatccgattttgaaggtggaaccaaaacataagggtgtaaggctatgtcccggaaaatgagtcgcatgcgagctcgcaaacaccaacagagtccacatgcggatatacatatagaactgtgaagaagaataatgtgctttggaagaaactttacatcaacatgatcttgttattatcact

SEQ ID NO: 20077 - DNA, 3169 bp, Zea Mays
atggcgccgccgccaccaccgccgccgccgccgccgcatgcgcggcaccatcagggggcagccaagggcggccacgcggagcggaggaagcaaccgctgcagagcagcgtgacgcagcccaaggcggaaccggcggcggcggcggcggcggccgtgctgccggagggaggcaagaggtgcggaggaggcggcgggaggcgccgcggcgggcgcggccgggccaaggcaccacctggtgagcctcgcgtcgcgctagcgctggcgcctccgccgcgcacggtcattggcccgcccgtgccgagcaaggggctgtcgttctgccgccgccccggattcgggaccgtgggcgcgcgctgcgtcgtcaaggccaaccacttcctcgccgagctcccggacaaggacctcatccagtatgatgtgaagatcacgccggaggtgagctcgcggaccgtgaaccgggccataatggctgagctggtccgcctctaccgctcgtccgacctggggatgcggctcccggcctacgacggccgcaagaatctctacaccgccgggaccctcccgttcgacgctcgcgagttcgtcgtgcggctcaccgatgaggacgacggcaccggcgtcccgcctcgggagagggagtacagggtcgccatcaagttcgccgcgcgcgccgacctccaccacctcaggcagttcatcgccggacggcaggcggacgcgccgcaggaagccctacaggtactcgacatcgtgctccgcgagctcgccaaccagaggtacgtgtccatagggcggtccttctactcgccggacatcaggaagccgcagcggctcggcgacggcctgcagtcatggtgtgggttctaccagagcatccggccgacccagatgggattgtcactcaacatcgacatgtcgtccacggcgtttattgaacccctgccggtgatcgagttcgtggcccagatattaggaaaggatgtcatatcaaggccattggccgatgctaaccgaatcaagatcaagaaggcattacggggcgtaaaagttgaggtcacgcaccgggggaatgtaaggcgcaagtatcgcatatctgggctcacaacacagccaactcatgaactgattttcccaattgatgaacaaatgaatatgaaatctgtcgtggagtacttcaaggaaatgtatggtttcaccattcagcatcctcatcttccttgccttcaggttggaaaccaaaagaaggcgaactatttaccaatggaggcctgcaagatcgttgaaggccagagatacacgaagaggttgaatgaaaaacagatcacatcgttgctaaagattattctttattttcagacagttcatcaaaatggatatgagcaagatccatatgcgaaggaatttgggatcaacattagtgagaagctaacctatgttgaagcccgagtccttcctgcaccttggctgaagtatcatgacactggaaaagagaaagagtgcttaccacaggttggtcagtggaacatggtaaacaagaaagtgataaacggatgcaaggtgagccactgggcatgtataaacttctcaaggagtgttccagaagccacagctcggggattttgccaggaattggcacaaatgtgtcaaatttcgggcatggaatttaacagtgagcccgtgatgccaatatattcagctagaccagatcaagtagtgaaggcacttaaaagtgtgtataatattgcactgaacaaactcaagggtaaagaacttgaacttcttctggctatactccccgacaacaatggtccgttatatggtgacatcaaacgtatttgtgaaactgatttgggattgatatcacaatgttgcttaaccaagcatgtttttaagatcagcaaacagtacttggcaaatgtctcactgaaaattaatgttaagatgggaggaagaaacactgtgctcctggacgcaataagttggagcattcctttggtcagtgacatcccaactattatatttggtgcagatgtaacacaccctgaaaccggggaggactcaagtccatcaatcgctgccgttgttgcttctcaagattggccagaagttacaaagtatgctggattggtttgtgctcaggcacaccggcaagagctcattcaggacctttacaaaacatggcacgatcctcagagaggcactgtaacaggcggcatgatcagggagctgttaatatccttcaggaaggccactgggcagaagccattgagaataatattctacagggacggtgttagtgaaggccagttctatcaagttctcctttacgagttagatgccatccgtaaggcatgcgcatccctagaaccaaattaccagcctcctgtaacatttgtggtggttcaaaaacgtcatcatacgagactatttacaaacaatcacaaagacagaagtagcatggacaagagtggaaatattttgccaggaactgttgttgattctaagatatgccacccaacagagtttgatttctacctctgtagtcatgctggaatccagggaacaagtaggcccgctcactaccatgtcctctgggatgagaacaatttcacagcagacgaaatgcaaacactgacaaacaacctttgctacacttatgcccggtgcacacgctcggtttctgttgtccctcctgcatactacgcacacctggcagcattccgggcgcggttctacatggaaccagagatgtcggagaaccagacgtcgaagagctccaatggcacgaacggaggcttggtgaagcccctgcctgctgtgaaggagaaggtgaaaagggtgatgttctactgctgacgaggtgaccgctttaacaaccattcacatgctgtagctaacttggtagggttcagtaggggattagattagctttctccaggaacgaagaggaaacgggatgcgtatttggatcatgaacaatcaatctgttagcgatcgctgtaaaatactcggaaatgcctgtataatagttcttgttggttcagatgcatgcatccaatgttccagtgtactatgaaaagggggtgtagaagaaaccttctggtgttttctaggttgaattcaatcaattcattaacatcacgctggagtacaatctctgatgtttctg

SEQ ID NO: 20078 - DNA, 2438 bp, Zea Mays
agtttaaaacccgtccccgtctccgtcagacagactcgactcgtcagcaagcagttcgaaacaaggatcgatccaggagcttccagaaggcgaggaggaagagggagaagggcgcgcgcgcgcgcagcgttcaagtggtgctggtgtcggccatggatcgggttcgtggatccgcgttcctgctcggcgtcctgctcgcaggatccctgttcgcgttttcagttgctaaggaggagaccaagaagctcggcaccgtgatcggtatcgatctcggaaccacctactcctgtgtgggtgtgtacaagaacggacatgtcgagatcatcgccaatgaccagggtaaccgtatcacaccctcatgggttgccttcaccgatagcgagaggctcatcggtgaggctgccaagaaccaggcagctgtcaaccctgagaggaccatctttgacgtcaagcgtctcatcggaagaaagtttcaggataaggaagtccagagggacatgaaacttgtcccctacaagattattaacaaggatggcaagccatacattcaggtcaagatcaaggatggggagaacaaggtcttcagccctgaggagatcagtgccatgattcttggcaagatgaaggatactgctgaggcgtaccttggcaagaagatcaacgatgctgtcgtcactgtccctgaggcaggcaaccaaggatgctggtgtcattgccggcctcaatgttgctaggatcatcaatgagccaactgctgctgctattgcctatggtttggacaagaagggtggcgagaagaacatccttgtctttgaccttggtggtggtacttttgatgtcagtatcttgaccattgataacggtgtgtttgaggtgctggccaccaatggtgacacccatcttggaggtgaggattttgaccagaggatcatggaatacttcatcaagttgatcaagaagaagtacagcaaggacatcggcaaggacaaccgtgctcttggaaagctgaggagggaagctgagcgtgccaagagagcccttagcaaccagcaccaggtccgagttgagatcgagtccctctttgacgggaccgacttctcggagccgctgacccgtgccaggtttgaggagctgaacaacgatctgttccgcaagactatgggccctgtcaagaaggccatggaggacgctggccttgagaagagccagatccacgagatcgtcctggttggtggaagcaccaggattcccaaggtccagcagctcctgaaggactacttcaatggcaaggagcccaacaagggtgtgaaccctgatgaggctgttgcctttggtgccgcggtgcagggaagcatcttgagcggcgagggtggtgacgagacaaaagatatcctcctccttgatgtggctcctctcaccctgggtattgagaccgtcggtggagtcatgaccaagttgatcccgaggaacactgtcatcccgaccaagaagtcgcaggtgttcaccacctaccaggaccagcagaccactgtctccatccaggtctttgagggtgagcgcagcatgaccaaggactgccgtcttctgggcaagttcgacctcaatggcattccgtcagctccgaggggcacaccccagatcgaggtgaccttcgaggtggacgccaacggtatcctgaacgtgaaggcggaggacaagggcacgggcaagtcggagaagatcacgatcacgaacgagaaggggcggctgagccaggaggagatcgaccgcatggtgcgggaggcggaggagttcgcggaggaggacaagaaggtgaaggagcggatcgacgcccgcaaccagctggagacgtacgtgtacaacatgaagaacacggtgggcgacaaggacaagctcgcggacaagctggaggcggaggagaaggagaaggtggaggaggccctcaaggaggcgctcgagtggctggacgacaaccagtccgccgagaaggaggactacgaggagaagctcaaggaggtggaggccgtgtgcaaccccatcgtgtcggccgtataccagcggtcgggcggcgcccccggtggtgatgccgacggcggcgtcgacgacgaccacgacgagctgtagatggtggtggggagcggtgacgtggagtgcccgggaacccaagccaaattttgtaatggtgtttaggggggagggtggtggacaaaaaaactaatcttggtgctgctctgtcaatagacgggctgagcatagaactttttttccctttctacttccttgtgattgttctttttatagaggattcgcattgcagtgtaatgtaaaaaaaagaagacgcgcttctgaaacttgttactacaagttaataatgaaatggtgcattgcatcacagtgtaatgattgatatgagtacaggacgggaaagcccaaagccg

SEQ ID NO: 20079 - DNA, 1918 bp, Zea Mays
atccctatccggctcctcgcccaccaatctgtacacactccgacgccgacgcgaaatcggaaggaccaccaagctcaaaaaagcgccgcccggcgccgatgttgctgcggcggatgcgatggatgtcggagggggacggccggtgggagctggatgcggagaccccggtgacgatggagggcacggcgcgccccgtcccgggggaccccctgccgctggggctctcacggggctaccgcatcacccgtcccaagcagctagacttcttccaccggttcatggcgtcccctctggtacccaccttctccgccatgcgcgacggcctctctgttaaccacgcccacattttctacatgacagacaactggtcttctaccatcttggagaaaatcaatgttaagaagcttgtgtctgtcgtgaaagagaaattagcaaatcggcaggaagaggcctcttggaccaaagatttaaagaaccacttgcatgatgttatgtctttaggtgtaggcacggagatcttgatcacaccagacaccactttgctgctggagttatttgatatcaagaaaggcaatcgaggaaaagcaatatttcaccacgagcttcctcatcataatattacattccaagcatcttggcctggattatttgttgataagaagggaacatattgggatgtgccattatcattatcggctgaccttgcttcagttggctccagttctggattgagttatcatctattattgcagcagaatagtggggaaccaaaatgttttgggggtgatgaaacagatgatgttcctactgctctgttacctggcctatgtgctaaagtggctatttccatgaagaaaagcattgatgcttggaggaaaaaagaagataagctaaaaaaagttcagccatatgatgtatttctctcggattcacatgtttctttaactggtattgttggtggagtagccagtggatatttgggagactgttcaaggagagtggctatacgagatgaaacacacaagagtaatgcttttataatgtttgacgagaggaataaacgtgctgcctttgcagacctctttgcttctgttactttcactgctcaatacgggaattttcagaggctttttctggatttgactaaggcaagtgcccgatttgatatcacctctggttcattgttcttatgtggtgcttctcgccttgcacaagatttcttcttctctagaagacctgatgtagagacattctgcgatatttgtcctgatgtgacagtttcctttcaacaacagatagttgggcccttcagttttcgtgttgaatcctctgtagccattgaccccagaagccaggaccattttgttcgagtggatgatccgatcttcgcaattgattgggctctcaaagtcctgggttcagcaaaggccacagcgtggtattcacccaagcatcaggaggccatgatggagctccggttctacgaaacctgaagctgttcatcgtgaacgttgtataaaataatgcctggacttcatgattgctatggtcgctgatttcactaggatcagatggtatgaatggctgacgccgtgatggtcaaatgaatcaacccccgtgtaatatctattcatatcctgctttaccggtttgagtcatcagttttttttgcttcaggtgatgtagcttgtgctgttctcggcgttaacagaggaagttaatactgtttgagtctttagtgaacttgctaggtgaaccagtctgagtttctgattgccttttgtcagtgtacaaaaaccatgcccccaccatttttatttctttaaatatatgaattttagggtgagcttattaaataattaatccttttttagacatccatttgttcatctttttgacaaaactcaagacagctgaa

SEQ ID NO: 20080 - DNA, 2621 bp, Zea Mays
gcaacgtgtgggtgttcgacgcccggctggggtcgttccagcgtgcgccgaggctgtacgcgctctgcgtcagcctgctggcctggaacaccgtcgtctactcgctcacgttcctgagtgctgcatctgccttgcgtagtacggggagaaggaggaggttcggcagctgccgtgcacacacgtgtttcatctcaagtgcatatacaggtggctcaggatcatctcctcttgccctctctgcaagcaagagctcaagtgaactttatattcattacacacatgacattctcgcttattctttggatcaaggtgttagtatcctagacacaacagatattttccagctaacaagggaaatcaaggaagaattgatctttatattagcaggcggatgcaatcactaatcaaaaccacgatgcaaggtaacctaaatggattttaaattttattttggattgttaaatctttatttctgactactattgttttatgtcgtggatgccctcgtgaggttctacgccgacgccttcaggagggattcacagaggccatggtgaggatggccagcttgagtcggctcaccgggagcagcgcgagatccgctacaactaaatgataggaggtttcgctgccatttgcagcgactgtgttccagttcgaccgtttggggaaaaggtgagtcctcccatttcatgtagatgcatgggttgataaacatttgggagaaatgtcccctctttaattcgaaaaatagttgtgtatttgttcgacttatctgcggcgatgtacctttgtacgcgtacaaacatctatagacaaaaacaaaatgacacttcatggatgtagcaagagcgggctacgagaaactagcagatcatgcctaaaattcaattagcattagggtcagacaaaatactacattttctggattacaataatgtataggtgcatgaaaaaaacttgattccaatgtgtgacaaagtgtgaagatgaaagtgcactttcacgctgtcataacgcggatttgttttccttgctcatggaatgtgcatttgtgtgtttgcgtctactgtgcggctacaggcaaggaaacaggatctgtcacggaaggtatgtacacattacagtaaacgttgttcgtagaacatgcactttgtggagtggtctttgaatgagatgcgtttagaattaccttttcatgcagatctcttgttcagaacctggttgcttagtccattcttgttttgggttgctactacaaaaaagcggcaatgctttatatgaatcgcctcttactaatatccagggtcaaatggtggtccttcagtgaccagactaatatttgagcattaatcttatttgtttcacagtcatttcttgtttatcaatatgaatgctatttttttgcgagtggacttgttaactaataagctcatagatatttgaacaaaaaatagtgttttgttctaaaactgtcataaagagtgcatacatcatagctatggtttcaactgtgatttgatgtcctataatattgagtgtcctatagtgtgttgttctgaaacagtcacaaagagggcctaagaagctgatggaatcctcattcaccgccgctaaggagtttgagcgggatcggagaggagacgtcagttcttcctcctctgctcaatgcggccattcgccctgtcccccaaccctgaactccacactgccactccgtgctcattttttctgaaggggaaatattcatctccttgttgttttgtaccatggatactttagcatcattctcatactactaggagtgtaggtaaggagtccacacacgagtttgcaaacaccattaagcctattttgcttgattagtgccctgcaacacttcatatgttcaagacaaaatccatacccatgtctattgttgtatgatattatttgcattgaccgttgctgctcttcttgattgcagtcactaacattgcattaatctatgtgatacatttattcaggcgattcccatttctcagtgatgtcgatgtcctgtactcctgtatatttggattcaacaatatgccattagtatgctgtcaagcgtcctatttgcaagagataaatggcttacgcccgaggggcttattcttccttatcatgtgcattggtgccacaacactggatgagtataggaagcatatagagaaagatcctgccttggaaagaaggtttcaaccagttaaggttccagagcctactatggatgaaacaatacagatcttaagaggacttcgtgagagatatgaacttcatcacaaactgagatacacagatgatgctttaattgctgctgcacagctgtcttatcagtatatcagcgatcgttttctgcctgacaaagccattgacttgattgatgaagctggatctcgtgttaggctgaggcatgcgcagctccctgatgaagccaaagagctggacaaagagctgcggcagataagcaagcagaaaaatgaggctgtacgtggccaagattttgagaagaatctgtagcaaatggctaacgatgaggatatccattactttgtttatgacaataaaactgatatgttcaagattccgtagcaacgcac

SEQ ID NO: 20081 - DNA, 209 bp, Zea Mays
tcgaccaaatgaccctctaccattcctccacagggaccctaggcttaaatcccttggatcaatcacaaacaaactccaaagtccatagaaagacactggaccaaaactaaaattactgcatcagacctgcacttcacatgtctgacaaaggcagtttgaacacccttttctccctattccaaacaaggacagctcaagcattcctaaac

SEQ ID NO: 20082 - DNA, 2297 bp, Zea Mays
cccagtccagacgtcgccgtcgtcgccgcccgaacccgatggacatccgccgcgggccgccgccgccgcgcaccgcgtcgggcggggtggagccgcggttccgccaggtgggattcgtcacggccgccgagcccgcgcggggggccgccacgccggcgcccgcgtcgcccgccgcgtccgacggcctctcccccgtcatgatcccgcccccgctcatccccgtccccgtccccgtccctgtcgcgcccgcttccgagtccctcgcgccttcttccccgcccccggactcctcgtctcgccccgacgccgtctccgaccttgacgacgacgacgacatcgacgtgtcctgggcgcgcccacccccgcccgccttcccagaaccaaacaagagacaccttactgaaagaaagaatgagcatgctcctccgactccagtttcgcagaaaccaaagctttctaaagcagagagacgtgccattcaggagtcccagcgtgctgccaaagccgctgccaaggaggcaggtttgaaatcaacagccatggcttctgatgctaacaccaagcaacccaaaacagcaaagatatctctgaagaaagatgtcaaccaagttaactctccagttgcttctgataagaagactggtgaacgaccgcctgacaaagatagaaaaaaagatgctcctcaaccccgcatgcaatttgacgatacacatcgggtggtgaaagcaaagaagcgttcagttgttagacaatcagaagctcaaaacagggtcgaactgttcagacatctgcctcaatatgcacatggcactcaactacctgaccttgagtcaaaattttttcaacctgatctgatgcatccttctgtgtacaaggttggacttcaatatttgtctggtgacatatctggtggcaatgctcgctgtatagcaatgcttcttgcattcagagaggcaataaatgattactccatgccttctgaaaaaattctgaatagagatcttactgctaaaatcagtagctatgtgtcatttctcatcgagtgcagaccactttcaatcagcatgggcaacgcaattagatttttgaagaacaggattaccaagctaccacttgcattttcagagtcagaagctaaagttagtcttcaatctgatattgatcgctttataaatgagaagataatagttgcggataaggtcattgttagtcatgctgtcacaaaaatcagagatggtgatgttctattgacatttgggtcagcctctgtcgttgaaatgatttttgataatgctcatgaacttggaaagaaatttcgtgttgtggtggtcgactctcgtccaaaccatgagggacaaggattgttgcgccgattagttgcaaagggtatcagttgcacatatacacacataaatgctgtatcttacatcatgcatgaggttacaagagtgtttttgggtgcctcttcagtactatcgaatggtactgtctactccagagttgggacagctttggttgcgatggttgcacatgcttttggagttcctgttctagtgtgttgtgaagcgtacaagtttcatgagagggttcaactcgattctatatgctttaatgaacttggtgacccagatgctatttcaagagttcctagggatgaaagtttgagcaatctcaaaaactgggctgagaatgaaaatcttcatcttctgaatcttaagtatgatatcaccccttccgattatgtttcaatgctcataacagattatggaatgctcccacctactagtgtaccagtcattgtaagagagtaccggagggagcacgtttggatatagaagccaccgttttcctttctggttttgtttgagctccagcggaacagttttcgtcagcgatctacctcatgtcatctggtgatgattttatttccttgtagtttgtaatttgttggagttcatcaccggcacagctgatcggtttggactttggaccacttgaacattatggccggtttcaagatcctgccaacaagtattactgttttgactgttcataggacaggatatggagcacaagctcacaagtgcacatatgctaaatccaaggctttatagcaacaatggtatttttttttgcagcccaagtgaaaatagcattttgggtatccaaggaccggttggttggtagtaaccatataatcgttatcctacctcgaacaaggtgaccagacatgaacgcccatgaacccaaccattatcgttttctggaaacgtcggcagtccggccctagttctgtg

SEQ ID NO: 20083 - DNA, 1719 bp, Zea Mays
atttgaactggtttgttgtgttttaaacaacggggaacaatgtgtgtgcatacttttagagatgacgccaattcaactagtattgtaaataattacgaagtcccaaatgccatacagaagtcagtgtatcccagcagaacacgacctctaatgatgtctggaaaccaagagtccaccagtgttgtcaacaaaattgattttccaaatcggcttcatctttcatttgcaaacttcacacatccttgtgaaggtttctcagttcctcctcccctggttgataagaaacgcactggaccccggccatgccctgtttgctatgtttccgtggaccaggcatttgccttgatgcccctacaagcttcaccatcacctgtcctaaaggacttaaactatgtatcagaagatggtgttactgcaaatttatcaaatcagggatctggatttggagggcatccatccctggatcagagaaacgattctttcaacattaatgagtcaatgactgtccactgcggctttgtcagaggaaagaagcctggccaaggtactggattcgatatcaaggatgacgatctgctagagatggagcaatgccacgatctagtcgtagcttctgctatttttggaaattatgatatgattcagcatccgaggaacatcagtgatttttcaaaggcaaatgcatgcttttatatgtttgtagatgaagaaacagaggcttatgtcaagaattctagttctctgtacaacaataataaagttggactgtggaggctggtggttgtccgaaacctcccttatgaagacccaaggcgtacgggaaagattccaaaacttctgctccataggctttttccaaatgtgagattttcagtttggatagatgcaaaacttgagcttgttgtggatccctatctcctgcttgagaggttcctttggaggaagaataccacttttgcaatctctcggcattacaaacgctttgatgtgtttgaagaagcagaagcgaacaaagctgctggaaagtacgacaacgcgtcaatcgattaccaaatagagttctacagaaacgagggcctaacgcattattcttctgctaagcttcccatcacaagcgatgtccccgaaggctgtgtgatcatcagagagcacatccccatcacgaacctgttcacgtgcgtatggttcaatgaggttgatcgcttcacctccagggaccagatcagtttcagcacggtccgggacaaaatcagggctagagttggctggatgcctgagatgttcatggactgcgaaaggcgcaactttgtcgttcaggtataccacagggagctactggagcagatgattgcatctggtaggatgccccctttggcggcggctgtgacgcacgcgaatgtccgggtaggtagcaggaaagctcctccgacaaagaagccctccgtgaaacggaaaagggagaaaaaatcgagctcgcgacggcgtctcccgaaacccatcgcccaggggttggatgccaatgtgacgcaagtttttttctcagtagcagagtctggatagtcccacacaggaacattgttccattaggtctggggcctgtaatcgtgccccggcgagatttgttcatagctattcttcatcattgttgtacataacagcggcaacccaacattcaattttctccattcatattatcttcggttccattgatattatgtt

SEQ ID NO: 20084 - DNA, 1609 bp, Zea Mays
cttctttgaaggttaattaaagagagatgataggtagtgtagaaacacattaataaaagaagcatgtaacttctgataggtagaacgaattactcatctgaatgtgtaagcacattatttcgttctttacaatatatcaaatgattacaagtatacctttggttgtacactcaaacaagtgaaagcaaaggaagtatacaactttgtagtcggagcaactcggatcgctctgatcaaaatgcatgcttatgcatggcaccgttcttctatttatagccacgatgtacaacttcgtctgaaattacaaacatgtcatcaaaccttatacatatgaactacaaatattatgagggtagtattgtacttttccatccatatatcttgttgatcaagccttccacagtctctgccttcttctctgcttcgtaggtcgccacgtatcacccgaagcttcctccttcggcttcagctcttcttgacttcatccatttatcaactttggttcgatgacgaagatgaacgtttttacctgaaacttgcttttcttgacaaagttgatatctcggagcccttcggcgacgaaggccctcccccaacaatgttcatggttgtttgtccatgaaaatgtgtgatatagctcacagaaggccaaaaatagccttatcgacccccagggacaaaaatgtgggtggtggaccggcaatatgaaaattattgtttggccatagaaacgtgtgaagtagctcgcgagaggcaaaacaccgctttatcatgcttcgaggaccaaaatatgggtggcggaacggagacatgaaaatggttgttcaaccatgaaaacatgtgttgtagctcactagaagccaaaaatagacttaccagtctcagggtccaaaacatgggtggtggacgggagacatgaattcgttgttcgacaataaaaacatgtgttataggtcacgatagaccaaaaatagtctttttggcttaagggaccaaaacataggaggcggaccggagacataaaaaatgttgcttggtcatgaagacgtctgttgtaggtcacgagaggccaaaaatagcctcatcgaaatctaaaataacaaactaatcctatgatgggctattgttggtgagatggtctgcgggtgaagcctaaaataataaactagtgtttagatagtgtttgaaatcaaggagattaaagtgacccgaaggaattcaacctctagtcgtggaaccctcattagactgctttggctactcataggagaattggaagcgcgtagacctgaaggtgttggaagcaaagtttcagcaacaacgatgaaaacctttgtgcgaaatgatgatcataagcaacttcaggggagagaaggcgtgtgtggcatggctttgtggtaaaatatcataaatgtacaccctcgaacgtgaaacgttattatgtaaaaagataggtaaagatgtaatttcaaacaaagttatacatgagcttgatcctatgaataaatggacattgtaatcgccaggacaattgtccaattgtggaattagtacttgttgtcactctcgtgtcatctcagagcaatccgaaggtataattccatggttg

SEQ ID NO: 20085 - DNA, 1315 bp, Zea Mays
ttccgttccgtccccggcgccggtaaacgacgtctcactttcaacgcacatccccaatcttcattcccctgaaaccctagccgctccgtccggtcgcgccactcccttcgcctctctaaggttccggcggaagccgtcctctgcgtgactgcgtcggctgcggtggagatggcttcctcgtcggcgtcttcgaggcaccaggtcaccatcaccctcggccgcagcggtcaggttgtcaaaaggagggctatgtctgatgatattaatgacggtgaattgcctttgttggggaaaaagcgatctgtgagggataggttaggaagtaatgtgtctgattctgatttttatgaaagccagcagagaaacaaacggcgacaattagaaagtaatagctcacatggagatgatggttcaggtgatgataaaccttaacttgtcaattctctagggcttgaactgaagatatctggcactacttactctgttgaattggcgtgcaaaatatttgaagaccgcctggttgggaagggtgatctgagactgaaactcatgaggaaaggcttgttgccgaggagcaatggtagtgcagaacagaatgacatagatctccgtgaaaagctttctcgaaaccataagttaccaaattatgattctagaggtcatgctgcagaatcaagggctagttatgatatgagagatgagcctccagagttaagttccagatattcttcgagggaggatgtcctagggtcgaggcactcttctgttgtaagtcgagttccttatgcaagaagtgtggatgatttgttaaagttggattattcaagaaaatcctacccgtcatggacagatgatggtttgaggcacagatcacctgaaaggatgttaaaagttcggagcgatatgtatccacggatagcttatgatcagattaggcccatgccaccccttaggtctgctggttcctcgagacctcaaagttttattacaagagatgctcctgacacgtcaaggagccaaccatatgctggcaaatccaccatttctattgatacagtacagaggactaatggaatcactccatctactgcagctctgcctaaggcccctgttatggatgaagccccgcttacagttactggattgctgaactcgttgggtcttgagaagtatgttgttctctttcaggctgaggaggtggatttgtctgcattgaggcaaatgggagagagcgacctcaaagacatgggggtaccaatggcagaagccaactgttcttaagtatcttcctaaacaagagggcttaatacctctg

SEQ ID NO: 20086 - DNA, 1870 bp, Zea Mays
atattattcagggtgttatcatcctactggcaggtggcccctgcccaatatgtcatcttcactatggatgttcattggtactccacattggatggcaccagaggtcattcaagaaagtcgttatgatggaaaggtagacgtttgggcattaggtgtatctgcaatcgagatggcagagggcatgccaccaagatccactgtgcatccaatgagagttatcttcatgatatctagtgaaccagcacctatgctggaggataaagagaaatggtctctcctcttccatgattttattgcaaagtgtcttactaaagaccccagacttcggcctgctgcaattgagatgctgaagcacaaatttattgagaagtgcaatagtggagcttcgaaaatgttggcaaagatcaaggtagcgaagaagattagagccacactagctgtgcaaaatgagctgtctgaccctgacaatacaacgcaagatgtgccttttcgaataaatgaggactatggggaaactgtccctacaagttctcagcaacacatgaaacatggcacatataatgattgtcaggcaggtgattttggtactatgattgttcatactgaagatggggacgaagtgacagaatcacccattttcccaagaacagaattcatacccggccttggtagcatcaattctttcacacatgatccaaagagagcagaacttatttcaagtttttgggcggagaacataggtgatagtgatgccaataaagaccgagatacagattatggtcctgacatgcaggaatcaaaagtgatctcacctttaactggaacagtgaagaagaatattggtgcagaagggactataaggtgccatgataatcaaattaacttgtcaccaggacttgcaaacacaacaactaaattgaacaacagcccaagccgtaaagcgttttcagttcaggataagctctggtcaatttatgctgccggcaacactgtaccaataccatttcttaaggcaattgacatttcaccactagctctagtatcagaaaatgaatcaggaaatggcctggctgggtcaagtacaaatgatgctttggaggcagttagggagctgttcagtggtgatgggcaggcaaagaaaggacggaaagggcaaaacgaagtccctcttcctccgggtgtgcatcacaggctgacgacaagccccacattgatgaacctggcccaagctctagcttatcataaaacgtgctatgaggacatgccgctacaagattcacaagcgacgcaagagcagcaaacgatacaaaatctttgtgacacacttcgcacaatactgaggttgtagatctgcaagagtgaaggctgcaacctttggagttccgaagcctgcatggagccaagggtgaacgtggcactgatcctgctcgtggtggagaactgaggatcgaaggaacgcatgacatgtgcctaccgtggagcaggcctaatggcttctgcgttttagcctgtggacgctttggtcactggaagctgggttgacacaggaatctctacggaagtggaaatttctgtccctgttaatagcctcttggagtttcactatgtagagacggcatcaaattttgctaatcagattttgtggcactaacgcatattgtagcctggttttgtatcgttgtcaatgcatttgttctccaaataaagagaaatagttaagcagaaataaacgaaaagttatttatgttggctattcgaaatcatgggaggcgtgatttctgctgtcttgaccccgtattccttgtgtctggccattgtacgccatgcttcgtgttgttaagtgtcagttttttttagcgcgcgtgtgaat

SEQ ID NO: 20087 - DNA, 2127 bp, Zea Mays
gactaaacaaaccattcaccattctaaaaaaaatccccgatctactacctttctcctcctctctcacggtctcacctctagtttccaggatgacaaaatatgggatcagattcgattcgtgagcctgtagaacaaggatgctcctccaatccatactaaattgaacccacgcagcagacatccgcgcgcagtacgtccccttcgcgaagcaccgccatcctcaccacgccgccgagtcgggcggcgcatgcgccatggcgttcctattcggcgcattcctgggcctggtggtgggcgtggccgtcgtgatggcgttcgcgcgattcgagaacagccgcgccgagcagcgccgtgagctggctgctacagctgcagctttctcgaagttgactgtacaggatttgaggaagctcatcccacccgagttttatccatcatgggtttcattcacacaaaagcagaagcttaaatggctgaatcaagagctgacaaaaatctggccatttgtcaatgaggctgcatcagagttgatcaaaacttctgtggagcctatttttgagcagtacaagtcattcatcctggcctccctccatttctcaaagttgacacttggtactgttgctcctcagtttactggtgtttcaatcttggagagtgatgattctgccatcatcatggaacttgagttgcaatgggatggcaatcccaatatagtacttgacatccaaacaacacttggaatttctcttcctgtacaggtgaaaaatattggattcacaggagtacttcggctcatatttaaaccgctggtgtctgaattcccctgttttggagctgtttgctgttctttaagggagaagagcaaggtggaatttaccctcaaggttattggtggcgaaatgactgctattccaggaatttctgatgcaattgaggggacaatacgtgatactattgaggatacactgacatggccgaatcgcataattgttcccattgtacctggagactatagtgacttggagttgaaacctactggggtattagaagtaaaactggtggaagctagggacctaaagaacaaggatcttgtgggaaagtcggacccttttgcattgatatacatacgtccattgcatgataaaacaaagaaaagcaaaacaattgactccaatcatcagagatcattgggtgtgctcgagtagacttagctgatatacagccaggaaaagtgaaggatttatggttagatcttgtgaaggacctggaaattcaacgagacaagaaacctcgtggtcaggttcacctggagctcctctactacccttacgcgaagcatgaaggggttcctaatccttttgctaatcagattcaactaacttcattggagaaggttctcaaaaccgagtctaatggatatgatattaatcagaggaaaaatgttattatgagaggagtcctttcggtgacggtcatatctgcagaggagttgccacctatggacattggtggcaaggctgacccatttgtggtcctgtacttaaagaagggagaaaccaaaaagaagacaagggttgtgacagacacgctaaatccaatatggaaccagacatttgatttcatggtagaagatgcactgcatgatttgctcatggtggaagtatgggaccatgatacatttggaaaggattacatagggaggtgcatcttgacactgacgagagttatactcgaaggtgaattccaagatacctttgtcttgcaaggtgccaaatcgggaaaactaaacttgcatttcaagtggacgccacagccaatctatcgtgatcgtgacagggatcagtgagacttgtaaacgaaaaaggccgataaacacttatccccaacggtgctatgtatattagtcgttctgtatttacaaaatcccacggttcttatagccacgtgaccaaaaagagatcaacccaccgacctgtattttctcctttgtgatgcaagtcagcaagtgcatggacctgtatatttgagtcgttaatgaataggaaatgctgttactatgctgcaagcacatatatgcttagtggtgccgtggtggtggttgcttctgtgctgctgtttgttcttccg

SEQ ID NO: 20088 - DNA, 439 bp, Zea Mays
cacagggctagaataatgaacgatatgaagatcaggtagcattatatatgtcaataagaagcagaggagagaagcagcccgcatcgcaggagacaaggacttcacttgtttggccagttcaggacttcaggatgttgtcgatgatatccatgctatattccctcgcttcatgcttaacaatgagggagagactaagtgaggggctgaaggccgttggtgctgtcagaatgtttttttggagttttggtggatgatgctcagtgactgcaatgcaaaggatccttctgttttgtctactgaatgagattacatcactgtttttttcttagcgatatgttgagctcatgtgctcgtttatgttagtcgatctctggctcttgtagtaacttggaaagcttgctgctttttttaagggtatacatgcctatgatgtatggtc

SEQ ID NO: 20089 - DNA, 1376 bp, Zea Mays
aggcactcctgaagtcctgattgtatgaccttgctcgtttgatcattgggagtgaaggaactttgggtgtaattacagaagtgactttacgactccaaaagcttccatctcattctgtagttgcaatgtgcaatttcaaaacaattaaggatgctgctgatgttgctattgcaacaatgctttctgggatacaggtttcaagagtggaattgttggacgaggttcagataaaggcaataaatatggcaaatggcaaaaatttgcctgaagtgccgaccttgatgtttgaattcatagggacagaagcatatgctctggaacaaactctcttggttcaaaaaattgccactgaacaccatggatcagattttgtttttgtcgaggagccagatgctaaagcggaactatggaagatcaggaaggaggcactttgggctggttttgctatgaaacctgatcatgaagctatgataacggatgtttgtgtccctctatccagacttgctgaatgcatatctacatcaaagcgattgcttgatgcgtcgccattgacttgtctggttattgctcatgctggtgatggaaattttcacacaattatcctgtttgatccaagccaagaggaccaacgaaaggaagcagagagactaaaccatttcatggtccatacagctctgtctatggaaggtacatgcacaggagagcatggtgttggcacagggaaaatgaagtacctggagaaggagttgggcatcgagtcactcaggacgatgaaaagaataaaggcggcgctggatcccaacaacatcatgaatccgggaaagctgatcccgcctcacgtctgcatatgaccgtcacctgactggaggatcgatccccccatggccatcagtgggcttgttggctcactcatcaaaagctttggttccgcgaggcgtgacgcggtgctctgctgacagttgcaataatgcgctgaactgctctgtgcctgtatggcatgcgttggaggcaaatgcacgtaggcgtcacatcaaaactataccggtaccaaaaaaaaaaaaaaaaaactgaactgcctcagggaagggatgggaaataatggagcaaacattcgtctcctgacgccgttttaacaggagaaccctttttacgatcaagtacagcttgacggggccacctagcggtggcgagacggcagcgttctgtactacgcaccacttccgttgccggccgagtcgtcggcacggcacccaccacctcaccaggcggccgcgccacgtccttaccccacgtccccactgtcgcttccggcgatctcgtccggccccgagccgttctcctcgcaaaacgatgctacttccggatcctgattccca

SEQ ID NO: 20090 - DNA, 806 bp, Zea Mays
aagaaataacttccacaggttatttcatcattttttgcaagatatttcgccccttccccaggaagcacatctcgcccctccaggagtcttgttggaaacacaccgtcccatagaggccgtgctgttcagaatcagccatcaactggatttgcacctatcgtggagcctccagagtcctccgttgctatgctggtctcaatgggctttgatggcaataacgcaaggcaggcactcgtgagggctagaaatgacatcaacgtggcaacgaacatcctactggaagcacagtctcattgaactaacgcactgcaactttctggtggtaaattagagggaagaactggttatattccaagatgaacaaacaatatgagcacattggactacagatcggtagattagtgcctcatttcatctaccttgaactgcaggccgacagtttagtaaatcagcgtatacatttgcggcagttagttttatcgtgtcaatacttagatgccttacatacagagaatgtaatattccaatttcagcttgtaggatagatgatataagcattcatagtgtacaattcatccgatgttttacagctttagaacttgttccagcacgatatgtggatcgtgctgagttccttgatgttgcaaagaaaacgaggaaggacatcagggatcggtaaaatttaagcttgttttagggcgaacaagaaacagaacgggtacgaaggcgaaacatgctcgggcatggcttgggtgcaatattttcctaaatgcagaacggttggtcatctgccattcattcattaa

SEQ ID NO: 20091 - DNA, 550 bp, Zea Mays
aacggccaaagtcacacccgcgcggcccatttcccccatccccgtctaccagacactggcgtgtgggccactaacgcccagacgcttctccaatcttccgctgtcgtgggtaacagaatccgcggccctcctctgcttggaacccgtggcaacccggccccgtcctctgtttctccgctgcatctaatcactgtcgccgagagagagagatagagggtggcggtgtgtgccgccgggggcctccacggttgtggttagaaacgagtcgatgatggggcctcggggcatgtccgagatgtcgcgaagccatgtggcgtgtgggcgatgtggtggctgtgcgcgggagccctagttcaggctgaattcctcaccggaatcatgttggccgtagatcagcttcgattggaaacagcgttgtcgacaccacggatccaaggtaatgcaacttgcttaggttctccaccatacctacattgtgaagtcgttcaatttacaaattggagcaccagggaaccccggcaccggtcgtcggtgggcactccgccgtgtt

SEQ ID NO: 20092 - DNA, 1867 bp, Zea Mays
gggtattctaacactaacatacatacatagtgatagaagcccaacctgacatgccagttgttggagccgtaactctatatgtatcgcttctgacttttactctccgtgtacatcctgaccggcttgattatgttgaccaagtgctcggtgcatgtgtcaagaaactttcaggcaaagcaaaacttgaagatagcagggcaacgaagcaaattgttgcacttcttagtgctcccctagaaaaatatagcaatattgttactgcattagaactttcaaactatcctcgggtcatggattatcttgataatgctacaaccaaagtgatggctgtggtaataattcaaagcataatgaaaaacacaacctgcatatctacttctgacaagattgaggcactattcgatttaattaaggggctgataaaggatatggatggggctcaagatgatgaacttgatgaagaagattttaaggaggaacagaactctgtagcacgtctcattcacatgttgcacaatgatgagcctgaagagatgttgaagatcttatgtactgtacagaagcatatacttcagggaggccccaaacgtttaactttcactgtgccttctttagtattctccgctcttaagctggtcaggagattacaaagccaagatggagatgtcactggggaggatgttcctgcaactccaaagaaaatattccagatattgcatcagagttagctctgagactatatttgcattgtgcagaggctgccaatgactgtgatttggaaccagttgcttatgagttctttactcaagcgttcatattatatgaagaagaaattgcggattcaaaggctcaaatcactgcaattcacctgataattgggacccttcagcggatgaatatatttggggtggaaaatagagacactctcactcacaagacaacagggtactcagcaaaacttctcaagaagcctgatcaatgccgagcagtttatgcgtgttcacatcttttctgggctgatgaccaagatgggataatggatggtgaaagggttctgctttgtttgaaacgtgccttgagaatcgcaaatgctgctcaacagatggctagtgctacaaggggaagcagtggatccgtaactctatttattgagattttgaacaagtacttgtacttctttgagaaaggaattccgcagatcacaaataccgtgattcaagatttgattgaattgattagaacggagaagcaaagtgataactctgtagctgatccatctacagaggcattcttttctagcactttgcggtacattgaatttcagaagcagaaaggtgggagcataggcgaaaaatatgaacagataaagacgagttcatgagtcagaactagcgcggcgccacgactggtttcgattttgttgagaattgggtcgtttgtttggcatggttcagtgaaatagaaaccataagttttagctcgctccatgtaaaagatgtttatacgagctgttaattctcaaatctcacggtctgagcgggtctgttcgcccattggcaacactttcaggtttagtcaggtggcaataagctgtgtcctttggggagcacaggtctgtacaggattacttgtgttcgtgatcagttctactgctacctgaatttcatcgttgtatatttccgccccttatgcgaagcttatggattttagatctctgtaacattcggagtacatgccttcatttctgagttctgactggacattgatgattgtttcagagtggccagtgcaggacttgaacattttggatgcccgttcgttgacattttaatgttacccattactctgctgtgtggcatgacctcgc

SEQ ID NO: 20093 - DNA, 5881 bp, Zea Mays
ctagggcgcactcgcaccctccgccggtcctgaactcatcgatcgcagaagcgagagagagagagagaggaggccgtacccacgccgccgcttcgccgccgccgacctccgtctctcgcttccaccatctctctccttttcaccctctctcgcggccaccctcggtcccctccctgagccttacccttgactgagtggtttccaatttcagttccactccctcttccaccactattcacggggaggcgcggcgaatcctgcgagattcctcccggcccacgcgtgcgcacgttggcgatacagggctagagtttcgtctccggcgctttgcggagttaattaggagaaggaactggagaatgtgtaggtggtgggcgctgaaaccctagctgttcgggacgggcgtgcgtgcggggatggcaggggagctggggcagcagacggtggagctgggcgcggtggtgcggcgtgcggcggaggagtcttatctcgctctgcgggagctcgtggagaagtcgcaggcggaggccgaggggaagggcatcggcgccggagccaatggcagctggcagcggtccgacaccgagaagaagattgacttgctcaagttcatcacacgcacacgccagcgcatgcttcgtctccacgtccttgccaagtggtgtcagcagggaaggtggaaagatgccataagatctgaactcatctctgacagtgccactgtacaaacgggaaatactcctctaatgcagcttgttcaagatgcggagttcgattcaagtggttttaagatacctggcctgaaagttaattactggctagatgagaaaagcactagcacagcagaacctgattcatctccatttattaaaattgaggcagggctggacatgcagataaagtgtcagcatagttcatttatacttgatccatttacagataaagaggcgagcctttctcttgatctaagttgcattgatgttgagcaacttattttgagagcagtttcttgcaataggcacacacgccttcttaatattcagagacaactgtgcaaaaatgtccaaatttttcagtccccaaaagatgttgtcttgacacgagatgttgcagcagcgaaggacccaatgatgaatgcggagaagggtttctcagattgttttgggaatgaagtgcttcaagtaagggcatgtggtcaggcatatgttagtcttggaataaatatcaggagtggccgctttctcctccaatcaccagaaaatatattaccccgtgctgcacttatggactgtgaggaagctctaaacaaagggagtacatcagctaccgaggttttttcaagccttaggaccaggagcattctccacctacttgctgcaactggaagtttttttggccttaaggtttaccagcagtctcagggcactctgaagattcccaagaccttattacatggctcagatttgatggtcatggggtttccacattgtgcaaatgcctattatctgttgatgcaacttgataaggacttcaggcctgtttttcatttgcttgagacacagtgtgatgcaaatggtaatactaatgcaagtggagatgtgaaagaagctattagatataacaaaatcaatataggacagatgcaaatacttaaaaatgagatgaatgagaacccttttgatgtgaagctgcaggccctacaaagtttagtggactctgctgacatgatggagagtgatcttcctgtccaaaatgcaattgaacctcttccactacttcctgcttgttcaccatcattttcatctattgttgatgaggttttcgaatatgaacgtggttctactgctgcgcagaatcgttgtcttccagttgatattcaaggaataaatgctagggttgtctcaccaatgcatgatggatgcttatcttatacccaagctaataataacatgaatgttcatcctaatgtcagtttgaatagctatttcccaagtaactttagacatttacaaggtgcaaataaatcacttcagcttgtgccttcaagcaacgataacagcaatcaaatccctgctcaaagctcacattcagggaatcttgggaatgctacgcctggccatttgattggatcttcaactacaaccggaggattagggaagctcatcactgctggttctgatggtgcatctaggaaacactatctttcagatttcttatcaagtatcccttcattacgaggactgcaacctagtgagccaagaaagcggagaaaaaaaacagaatcagtgcagagtctcctgcctttgcaggcacactcttctaatttgcaatcaagaggcagtctcacctatggagatgttcttgctgaaagaaataattgtgttccggcaactatatatgcttctgtgctactacatgtcataagacactgttcattatgcatcaaacatgcccaactcactgctcagatggattcccttgcgattccatatgttgaagaagttggtctgcggagaccatcgtctaatctttggttgagattaccttttgcacaggatgattcttggaaccatatatgcttgcgccttggtaaggctggaagcatgtcttgggatgttaggataaatgatccacatttcagggaactttgggaacttaatggaggaagcaccaaaacacaatggggtgttggcattcgcattgcgaatagctcagaaatggattcacatatctcatttgattccagtggtgttgttttaacttacaacactgttgaggcagatagtgtccagaagcttgtgtcagatttacgccgactttcaaatgctcgttcttttgctcttggaatgaggagactgattggtgtgaaatttcaagacaagctagatgacaaccagttaaccatggaggtgaaatcacaatctgttaataaaggtaacagtgatgctgctgacaagctatctgagcaaatgagaaagacattcaggattgaagctgtcggtctaatgagcttatggtttagctacggcaccatgcctatggtacacatagttgttgaatgggagattgctaaggctggttgcacaatgcacgtttctccagatcagctttggccacacacaaagtttctggaggatttcgtgaatggtggagaggtagcatccttcttggattgcattcggcttacagcaggaccattacttgcccttggaggtgcaattcgtcctgcaaggatgcctgttgctgtctcatctggatatagctctatgccaaaacagccgaacatccccacacaagggcctttagtaaatggttcatcttcaactatacatcacgcacctggcccctcaaatgctgcatctgcccatttaggcagtcataaccttcatgctgctgccatgctttcagctgttggacgcggtggacctgggcttgttcccagttcattactgccttttgatgtttcggttgtacttcgtgggccatactggatacgcattatatatcgcaagaaattttctgttgacatgcgctgctttgctggggatcaggtttggctccagccagctactcctcctaaaggtggaccttcagttggtggatcgttgccatgcccacagttccggcctttcataatggaacatgttgctcagggtctaaatgctcttgaacccaacttcatgaatgctacacaggctagtggacacttaaataacaatgcaggagttccacaaactgctcctagtgcaaatcgtttaaatgctacccctggtgtttctatggtcaggccaacatctggtgttgctaaccatgtagcagccagtttgagtcgagcaggaaatgccatgttggcttcttcggctcttgcttctggtattagtggaacttctgtgcgacttactgctggagctggtctccctgttcacatgaaaggtgaactaaacacagctttcataggactgggggatgacggtggatatggtggtggctgggttcctttggcagctcttaaaaaggtgctgagagggatcctaaagtacctaggagttctatggttgtttgcacaattgcctgaacttttgaaagaaatactaggatcaatcttaaaggacaatgaaggtgctctcttgaatttggatcaagagcagcctgcactccggttctatgtcggaggatatgtatttgcagtaagtgtacatcgggttcaactgcttctacaagttttgagtgtgaaaagatttcaccaccagcaacagcagcagcaggctcaaagcaatgctcaggaagagctagcagcagttgaaatcaatgaaatatgtgactactttagcagacgtgttgcctccgaaccatatgatgcttctagagttgcttcttttatcactttgcttacattaccaattttggttctgcgcgagtttttaaagctgattacatggaagaaaggtctttccccggttcatggggacattgctactgcacagagggctcgcatcgagctttgtttggagaatcactcaggatcagcttcgtctgataacaccgagaacagcagtttagccaagagtaatattcatcatgatagagcccacagttcagtagaatttgccctgacatttgtacttgaccatgctcttattcctcacatgaatgtagctggaggagctgcctggcttccatattgtgtatctgtgaaacttcgctattcttttggggacaacaatcatatagctttccttgctatgaatgggagccatggtgggagagcctgctggttgcagtttgaggagtgggaaagatgtaagcagaaggtttcaagagctgtggaaactgtgaatgggtctggtgtagctggagaggtaggccaaggaaggctgcgaatggttgcagagatgatccaaaagcagcttcaactctgtctacaacagctaagagatgacccactttctgcaggctcgactgcatcatgaacttgcttggaatgagctctatcaaggccattgatgtctgtcatattcagcatggcctttggctttgttaacgtgtagatgtgaaggaatacacatttggtagcagtgacagtttcgcctgaggcttgctcagatgacaattttgtacagtataaatggtggcggttgactctgatggacctttagttagcccatttgaacgtggcctgtaacatagctagggtgggtaataatgtgccaaggtggaattgctcagggatgcaaaatgatcttcgggaattggttgtctgtatcatctactgtaatcgtgtcctttttctccctttctgatggatagttcatttttggattcgttatcatctttcttctgtctgtactatgttaatctagacattggtggatctggtatatgtgttgttgtacatgatatattggcactggacttgagactgacgcatttgacgtcttagtattagcaggacatctctagttgtgttcagagtgattggacacaaaaaatattgcttggagcttttctttagggctagtttgggaacttaaatctcgaccccatagattcctggagaagatttgagttcccaaactagttcttaatgtttcttttttttttctattgcatcttcttagtaaatgatgtttttgtaactgtaaaaaccgtgccggtcaagattgatacctggatggataagatgatgttgggtcagatttcttgctcatggttaggaaattgatgtgagcactctggccagtttgtttgaaactgatattcgtgagttgtgattggaagcgtatggataggctttttaatcgtgttaaccgtcatacgggtaggcctttttagttctcgtgcttctacgtttgggacacaggtgtcagtttttgtgctttaa

SEQ ID NO: 20094 - DNA, 3635 bp, Zea Mays
agtgctgatgctggtggtatgtacccaccgagttacagtggtagctatgggtctcgtggatctgatgttggtgggagttcatattcttcgctttactcaggccgcaatttgggtagcagcagtggtggctactatggaggtagcggttccggttcatattactaaggtgcaaaatcaaatctcttctgtctttcaccaagcttgtttcactgtgcttaaattatttgcaccgtccctcacctctatcacacatgcacacatcatggtgctattgttggggatgagaaatgtttcccctttgtgtaagatgcgggaagtccagaaccataaaactctaattacacagatttggcatcacctcgtctttgtggaacagatttggcattataggacgttggtgtaggccctgcattttgtggagctccttgatttaagccctacagatctggaaaagaaatcccaagcacccaagtgaggcaatgatttcaaataagacatttcaacgaagccagatcattaagttggttgaagcagtagtcccgaggatgttctggcttgcttatgtaatgtaaggatttgctttatctgatcaagagttatgaacataagagccagatatggtgttttaagtgtttctactggtgttttaagtgtttcgacatgtttacttccagtgtttctataacgttattgagacagaatggagtgtactttgaggtagtttctgcaattcaaggtatttgagattacatctttgatgtgctgccaaagatcaggcttacaaaagaagctttacaagcagtgcttcttgtaaggctaatagtttctgaaaaccttcccttctgtcctctagaggaccaataatcgtcaagacagatagttgattgatcagacttaaattctggacatctgtacaaatggttctatcggttgccaaaagttgagagaaactgcttgtgtggcaaaaatttccccaacctcatttggacttctcccaagtttaggataacagaacttgaagcaaaaggacatttgaaatttgagtatagccttgcagtacgatgactatatagagcacaaggcatcaggtaaatttaacaagcagtgccagtattgaacaccaccctggttccctcatttatgaaattccttgaagtgctttgtggagtatggattaaacagggcagaccctgtacaggtggctccagctttagtggggtctggggaagggacaaacagaggcaagctttctccccgcaaatgtggagaggctgcctcgaattcgtgacctggtgattcagtgagacgactttcaccactgcactgggacgatcacaatctttcaagaaccttgctggaggcataacacactaactgatcaagttccagaaaaagtatcgtaacatagtttgggaccttaggctatctctagcagcttacccatccctatacccatattcaaactccattctgcgaacagtgcagtctacagtgcaaaccgatgtttttggtgatgatataggtgaattgctggacacggtcttagtaaccaggttcctggattgatgggatcgaggaataggaacatggtacatggtgcggtacttgaaaaaagattttaacactacggggacgaggttgttcccacattcccggaacaccccgatttctaagtttgggaccaaaccatagtcacaaagtttccagatcggtagggacgaggaacggggtcaaggaacatggtacactacttgtgagagacttacatggtgggaatggaaatgaccctacatatctgggtcggggacgacgtttctgggtcgagggtctctaccaccatacgtgtttcttgtgaatatggaccaatcatttagctcaatatcgccacacttaggctttaaacccaaaaagggcaggcttgatgtggtggtgagagttgtctcacttgagtcatcatgttggtgaaagcctctagcactgggtctgctatcttaggctttaaacccaccatatgcgtgatatatttcattggtctaatttgtgttgcgtggaccattttcaccaaatgataactttgccaagaatttaccttttatataagttgaagaaacaaggcgtgctgtgtttgtgttttgacagtgactacttatgtatggcatcctgcaaagtagctgaaagatgagtagtaataccaacaccccagctatagaggccgcagagagctgaaacctaagcttaacttttaagtgatggtgtctttcttctgtgagttttaacatggaaatctcatgcattaactttggatctgatcaattgggctagggataataactcggatcctgaggtcagaccgccagaggcaattttgcccttgaatttggtttttgcagatgacctaatgatgccactgggtaggatgaaagatcaatatgtaatttcatgaaaaggctactcagatgacttttgcagtattcagaaacacacttttctgtgattatcgatgtacttgagggccatttgtttgttacttatgtgttatttcttgttggaatttgtcttcaagagggaatttgatgatggaattaggagatctagcagaactgttgattgccaaatgtgcacagaagaaatactatatgcaatggcatcaatgggcttggttactggggggcagtacgtgggaatcagcacctgctggtgctggctgggttggtgctcatttgaaaaacaaggggaaggagattatttttccttgatggggcaaggacggtagatctgaaagcagcatggcgtggaaatatttttcttgaaaacagtaggcacaggattaagtacaagaatactccattagaattttgagttgaagggtcttgaattttttacccaattgctggagcaaactcagggatctaacacggtttagtctaactacttagttaagagtattcaacataaagattctttggaatcacaataagctgacaaatgcatcatttctttatcaatttcaccatctcatctgcatagttccctttgtttttattctgttattcacatggtttttctagtgatgttattatcaaagcagttgacgatgcttacctgtttttccatgctaacgtggcttcgatattatcatgtttttttgagccctttgagaattgtagcccaccagcatgcctctttccaaagtcgtgcgtggagattcaaaccggtagtctagtggttgccgtcaaaagcagccagatttgtgaaatcgtcatgtgtgttgctctctagtttaccgatctgtgggcttgtaaagaacactgtaggcatgaaagcaaccgtatgtacagaaaatataattaactgctcgtatgaaataccatacggagatgtaccgacgtttgtcacgcgcgtctgaaaatctgttcccaattagttcttgtaaagaaacattgcaggcatggaagataccagaagtgcaaaaatataatcaagtgcttgtatgaacattgtagtcttgaagttccatcttccattggccacgccgtgtccggtgcccgtgcagctctgtgcgtgttgccttggttctacactgcctcatggtcattgaaatcccgagatggccatagccgaccacgctgttgccc

SEQ ID NO: 20095 - DNA, 1196 bp, Zea Mays
  misc_feature (1195)..(1196): n is a, c, g, or t
gaaagctgttttttcctagataggctactgaagatcatctgggtgttggagtcatccagaggcacaagctgaggaatggggcaaaaggactccaagccttcacatggatatggctactcttcttatgattacgggagtgcttcatcgggatacacctcgagaaacactgggaattcgtcctccagttatagcgtcaggtacgcgccttcttcggagaacagtgtacagccggagacacatgccaggttgcagaggaagtattccaagatcggtgatgactaccgttctttgagccaggtgactgaagctttggcacaggcaggccttgaatcttcaaatcttattgtaggcattgattttacaaagagcaatgaatggacaggtaaaatttccttcaatcgccgctgcctgcatgatattggaaacactccaaacccatatgagcaagctatatctattattggaaggacactttcagcatttgatgaagataatttgattccctgcttcggatttggtgacggtaatcatttagttgcctttgtctgatgatcacctgatgggtttataataacatgtttaaagcacagtgttgatccagtgcttctgttttcttctgagcagcgtcaactcatgatcaggaggtattcagcttttacccagagaaccgcccatgcaatggatttgaagaggcgctagacagatacagagaaatcgttccaactcttcgattagcaggacctacatcttttgcgccgatgattgagacagcaattggaattgttgacagcactggtggtcaatatcatgttcttctgataatcgccgatggacaggttacccgaagtgtcgatacacaatctggacagttgagtccacaggagcgggatactattgatgcaatagtaagagcaagccagttccccctgtcaattgttcttgtcggggttggtgatggaccatgggacatgatgcaccagtttgatgacaatatacctgctcggtcatttgacaatttccagtttgtgaatttcacggagattatgtcgaagagcatagcagctgacagaaaggaggcagaatttgcattgtcagcgctgatggaaatccctacacagtacaaagcaacaattgatctccaactcttaggccgtcgccaaagaataaccccaagaattgctctgccaccaccaann

SEQ ID NO: 20096 - DNA, 2339 bp, Zea Mays
cactcgcgtccctctcttttcctcttctccattccgtcgcgtactcgcgtgcacagaaattccttcctctgcctccctgttcagctctccttttcccttcctcctcctgtaattctgttcgtgtgcgtgtaatttccgtgcaaatacacgcacgccgattttcgaaagcaaaaaaaaaaaaaggcgacggcaaggaatcccccgattaggaaagattctccgctccccgccttcaaatcccccaccggccaccacgacccgcctggattcgcctacgctctgtgctgccgaggtcgggattggtgctggaattcggtgcgccgagttgttccttgctcgattagacttccggttcggttcgcttcgttccaatcggggtttgctgcttccgccgccaccggtgcgctccgagctgctcaagctgggcgccggataccctctcgggctgcccgatctgattcagtccccaacaccacccccgctccgccgctgtggctgccgctcccctccccgctgactccggcgccatttcgacccgcgcggccggatccttggatggttccgatcgatccgggaccaagagacccaaggcttcgtcacctcacccgggccccggcgccggtggatccatggccggggagaaggcgccgcgcgcgttctccatcgaggagctcccgggccacctcatcggggaggtcctgacctcgggtgggctcgctgccgccgacctcgcgaggctcgaggccacctgccgcgcgctcaggccgctcgccgagtacgccgcgtccaagctctgcgccgcgcgggcggcgttcgctgccatggggccagccgcccggggtgagctgctggagaggtgcgggggaagctggaagagggtgctcaggttcctgcagtccgtagagcagtcgtcaggcaccgtcgagacctcatcgggcagccttgtgtggtgtgttaggtcatggcccagatactacacaatgtgcagcattcagtcgggtttccttcccatcactttcccgtgttataaacatctctgcttcacacaaccatgctgcttttgttacggagtctggggaggttttcacctgtggtgataattcatcattatgctgtggtcatggcgaagtggggagaactatatttcgaccaatgcaagtagaagcgcttaaagggattccctgcaagcaggttgctactggtctaagttttactgtgattcttacaagggatggacaagtatatacttgtggaagcaatacacatggccaacttggtcacggtgacaccatagacagggccactccaaagcttatagaattgtttgaaggccccactcaggtggtgcagattgcagccggcgcaagctacacttttgctgtaacagatgatgggactgttcattcgtttgggtcttgcactaatttctgccttggacatggggatcagcatgacgaacttcttcctcgtgcaatccaatcatttaagaggaggaacattcatgtagtccgtgtttctgctggagatgagcatgctgtggctcttgatgcactaggacacgtttatacttggggcagaggatactgtggagccttaggtcatggtgatgagaacgataaaactagcccagaattgatcggcagcttgaagggccaagttgctgtgcaggtatgtgcaaggaagaggaagacgtttgtcctcacggacgagggctcagttgttgcgtttggatggatgggttttgggagtctagggtttcttgaccgaggaacatcagacaaagtaatgaggccccgcgttcttgagagcctgcaggatcactacgtctcccaaataagcaccggactgtatcacactgtcgcagtgacaaataagggcattgtattcgggttcggggacaacgagcgagcacaacttgggcaggagtacattcgtgggtgcttaaaacctaccgagataatgttccaaaagagtatcgaagacataccaattgcggcgcctagtggttgacctcaaggccaagaggccaagaccaccattttggacactgttgcctgcatatatgttgtacttatattgaaattcttctcggtaagtgtattttatactttgtgatttgtgatgaacgggggaggacggaagagcaaagttggaggacagtgttgtgttgtgtagccaaagaagcatgtagtttagtaacgtgtgatgtaccgaataattcaacccaccatttttattctgtataaaatttattggtgtgtttgtattctttttcttgttcctcccacttttgctatctcggaatttattgtattactgcttaatgccctgtttgtttc

SEQ ID NO: 20097 - DNA, 1629 bp, Zea Mays
tcaccctcccaccacatccacaaaaaatcaccctccccacctcgatcctcttccgcgagacggcaaaccgatcggtggaacggaacctccctcagtctcaaggcgagcgagcaagcgcggctcacgtccacagggccagcgacagtaggctgtaggccccgcccgctccagatccataggcagccgcgcgcgatcgcggcgtggtggataaaagcgtgcgcgctgcgccgctgccacgaggtaagagaggcgggacgagcgtcagtgcagtgcgcgtgtggtcgggtagcgatccgaggagcgcgcagcgatggcagcggcggccgtggtgcccgggaggctggaggagcagccggacgagcagctgggcggaagccagctcgacatcggagggctcgccttccagggcgacgtgggcgggggcttcaccggcggcggagcgggctccggggcctccggcggtggcggcggcaacaagatgctggaccggggcatcaacacggccatcgtgctcggggccagcacctacgctctcaccaagctgctcaccgtcgaccaggactactggcatgggtggacgatcttcgagatcctgcgctatatgccggagcacaactggtccgcatacgaggaggccctcaaagccaacccggttctagccaagatgatgatcagcggtgtcgtctactcccttggtgactggattgcacagtgctacgaaggcaagccgatatttgatttcgaccgtgctaggatgttccggtctggccttgttgggttcacgcttcatgggtcactttcacattactactaccatatatgcgaggcactgttcccattcaaggattggtgggttgtccctgcaaaggttgcattcgatcagaccatctggtctgcgatctggaacagtatctactttgtggtcttgggtttccttcggttggaatcacctaccactatctacaacgagctcaagtccacattctggcccatgcttactgctggatggaagttgtggccttttgcgcacttagttacatatggtgtggttcctgttgagcaaagacttctatgggtcgactgtgtggagcttgtctgggtcacaatactgtcgacttattcaaacgaaaagtcagaggcaaggaattctgatagtacctccacaccagcggcttcaaaggacaactccacatagcaaccccaaagatcttggaaagttgcttcgcccttccctcacttcaggggttatgtaaattgtacagttagctgcagcaactatgcaggtgtaaccttttttttttgtagctatatattcatgaaacatgaactgtgcagcatgtgctatagaataccatgaagaaattagcgtgcaaaagaaaaccttatcaaagaaagaaaacagactcatccgatggtagctttgagcagaaaaagttaatcaattgaatactagagttcaaagtcacaattgctccagtagattcaacaccataaaattcttcattgcatagtgtgtttagaagaggctgacaacaagtagattccaatctctgagattcttcccgcatgatttgtccacttttcagaaacttctgtgtcttagaaagagcattgacatctcccctggta

SEQ ID NO: 20098 - DNA, 1833 bp, Zea Mays
tgatgttccacaatctctctcgcctgtcttcactgccatccccactgaagcggttggtagggggcctgaagggagaaagatattcaaggtccagtgacatatcaaagctcttcaccaatagtctaactgttcctcttccagaggaagatgaacaactacaactttttaataatcagattgaagaggatagaaaaattatgatttcgaggcataaccttgttaaattgcacaaggtgcttgaggagcatgatctttcttgtgtggagcttttggatgtgaagttggatgaagcggagaaggccgttggttgggctagaaaccactatctgtcatcaacaactcttccttctatcaaaggtgacaggttaatcattccccgtgagagtctggatatatcaatcgagaggctgaaggaacagggtataacagctaagaaatcctctcaaaatctgaaggttttggctaaagatgagtatgagcgcaatttcatttctgctgttgtgcctccgaatgaaattggagtgaaatttgacgacatcggtgcacttgaggacgtgaagagaacattggatgagcttgttacacttccaatgaggagacctgaacttttttcgcgtggaaatttgttaaggccctgtaaaggtgttttgctttttgggcctcctgggacaggaaaaacactcttggcaaaagcccttgcaacagaagctggagcaaattttatcagtataactggttctacactcacatcaaagtggtttggagacgcagagaagctcacaaaggcccttttctcctttgcgactcgactagctcctgttatcatatttgtggacgaggttgacagcttacttggtgcaagaggtggtgcatttgagcatgaagcaacaagaaggatgcgcaatgaattcatggcagcttgggatggtctcaggtccaaagagaaccaacggatccttattcttggtgcaacaaatcgtccatttgatctggatgatgctgtgatacggcgtttacctagacggatatatgttgaccttccggatgcgcagaaccgaatgaaaattctaaagattttacttgcgaaggaaaaactagaatctgattttaagttcgatgagcttgcaaatgccacagaaggctattcagggagcgacctaaagaacctatgtgtagctgcagcatataggccagtccatgaactactagaagaagagaaaaagggacgtgtgagtaacgaaaacagttatctgagacccctttgcttggatgattttatccaagcaaaagctaaggttagctcgtctgtttcttatgatgcaacaagtatgaatgaattgagaaaatggaacgagcagtatggggaaggtggcagcaggactaaatcaccatttgggtttggcaactgacactacagtagagatttaccaatactgtatctttgtaacatttaggctgcctcttgttggtagattagggagtcagttccatttttttaccatgagcttatttgaacaacctcgtaatcacctcgtgcaaacaaaaaagaatctagttaaacgccaattttgcctactagttaatggtcggaaataccagtgtagaatcagaaatcggctacacactacaaaataatgtatctgagctactctgggtaagcattaagctttaacaagatgtaaacggcttaagaattttcagttaattcatactagttctcagcatggaattcagtagaactaatttagtattgatagctagtcgatggctggaatcttcaggatgtctcctattgcccagaaactttgttcgtatcaaaagaatggaagagaa

SEQ ID NO: 20099 - DNA, 587 bp, Zea Mays
gaccaacacggtatagtttctctgccctcagaaccctcgccgccgcccgtcggagctccggtgtgtcagttcgccgtcgaaggatatggactatgacaggttgaattcgccgaacacgtcggctatttcgctggaggtgatgggccaccggctacatatttcacaggatccaaactccaagcaccttgggaccacggtctgggatgcatcaatggtgtttgtcaagttcttggaaaagaatagcagaaaaggtcggttttgtccatccaagctaaaaggaaagagagtgattgaattaggagctggctgtggcctggctgggttcggaatgaccttgttgggttgtgatgttacaacaactgaccaagtcgaggtgcttccgctgcttatgagaaatgttgaacgcaacagatcttggatttcgcaatcgaattccgacacagataccatcggctcaattacagttgcagaattggactgggggaacaaagaacatatcaaggccgttgaacctccatttgattacattattggaactgacgtttacatcatgaagaacatcacttataacttcaccagtatgtgga

SEQ ID NO: 20100 - DNA, 3775 bp, Zea Mays
gcctctctcccgcacgcccccgccccgaagacctcgcgacgccaaaaaggaggagagaccgccacccccacgcccgcacggcccactcagcgctctccacccccgtcccctcgcggcggcggcggagcccgagcctgagtcctgcccccccgggctaggttggtctccgcctccgccctccagtctctttggcacaacctgcagccgctggcgcaggtggacatggatctgccaagcctcgccgtcgtgctgcgcgccgcgctcagtcacgttcctgaggagcgcaaagctgcagaggagagtctcaaccagttccagttcacaccacagcatttggtgagattgttacagatcattgtcgatggaagttgtgatatggctgtaagacaggttgcaagcattcatttcaagaattttattgcgaaaaactggtcacccaatgatccagatgagtctccgaaagttttggaaagtgacaaggccatggttcgtgaaaacgtacttggttttattgttcaagtgccccctttgttaagagcccagcttggagaaagtatcaaaacaattattcattctgattatcctgagcagtggccaagtctccttcactgggtttcacacaacatagacttacagaatcaaatttttggtgctttatatgtcctaagggttcttgccagaaaatatgaaaaaatcctggctacgcctctgaaggcaaccaagttggagattccgaagcaactatttgatccaaatgtcttcaatgcatggatggttttgtttataaacttgttggaaaggccagttcctgtggaaggccaaccaatggatcctgagattaggaaatcttgggcctggtggaaagttaagaaatggactatccatatcctgaaccgtctctacaccagattcggtgatctgaagcttcagaaaccagagagtaaagctttcgctcaaatgtttcagaagacttatgcaggaaaaatattggcatgccacatgcagctgctgaatgcaattcgtagtggtgattacttgccagatagggttatcaatcttgttcttcagtatctaactaacagtgttacaaagaacagtatgtatcagatgatgcagcctcagattgatatacttctttttgagataatttttcctcttatgtgcttcaatgacaatgaccaaaagttatgggaagaagatccccatgaatatgttcgcaagggctatgatatcatcgaagatttgtacagtccccgaacagctgctatggactttgtgagtgaattgattagaaagcgagggaaaaacaatctccaaaagttcatccatttcattgtggatatttttaggaggtatgatgaagcacctgctgatcttaagccatatcgccaaaaagatggtgctcttctcgctattgggacactctgtgataaactgaagcaaacagatccatataaaacagagcttgagagtatgctggtccgacatgtctttcctgaattcaacagtcgtgttggacacttgcgagcaaaggcagcatgggttgctgggcagtatgcccatatcaacttttcagaccagaacaattttcgtcaggctatgcactgtatgtctcaggaatgcgtgatccagatcttcctgtgagggttgattcggtctttgcacttcgttgttttgttgaagcttgcaaagatttaaatgagatccgacctatacttcctcagctccttgatgaattttttaagctgatgaatgaggttgagaatgaggatcttgtattcaccctagaaaccattgttgacaaatttggcgaagagatggcaccttatgcactaggtttgtgccagaatttggctgctgctttctggagatgtatggctagttcagaagctgatgatgaagctgatgattctggtgctttggcagctgttggttgcttacgagcaattagcacaattcttgagtccataagcagcctcccacatctttttctgcaaatagaacctacattgttacctataatgcgcaggatgttgacatctgatggccaagatgtttatgaagaagttcttgaaattgtttcctatatgacatttttctcacctacaatttcactggacatgtggagcttgtggccactgatgatggaagcgcttaatgactgggctatagatttctttgagaatattcttgttccactggacaactacatttctcggggaactgatatctttcttgcaagcaaagatccagattaccagcaaagcctgtgggatgcactacaatctataatgatggacgaaaacatggaagattctgatattgaacctgctcccaagctcattgaagttgtttttcaaaattgcaaaggcaacgtggatcagtgggttgagcactacctcaggattacaattgcacggttacgtagagcacagaaaccatacttgaaatgcctccttgtacaagtgatcgctaatgcgctctactacaatcctgcgctgacccttgaatctttaaataaacttggggttgcagctgacatttttaaccattggtttgctatgctacaacaagttaaaaaaagtggagcacgggttaatttcaagagggagcatgataagaaagtttgctgcttgggcctgacctctcttatcgcgcttccagctgataagattccagcagaagctttggatcggatcttcaaagcaacacttgagcttcttgttgcttacaaggaccaagttgcagaagctaagaaggaaaatgaagaggctgctgatgatatggatggttttgatgctgatgaagaagatgatgatgaagttgactccgataaggagatgggtgttgatgatgaagacggggatgaaataagcagtcttcagctgcaaaaattagctgcagaggctagaggcttccaaccagccgacgaggatgatgactcagatgatgatttcagtgacgatgaggagctacactcaccaatagatgaggtggatccgttcattttctttgtagaaactgttcaagctttgcaggcatctgatcctgccaggttccagaaccttatgcagacattggatttccgttatcaggcgcttgctagtggcataggacaacatgccgagcaaagaaaaattgaaattgagagagagaaatctgagaaggcaaatgcacagtgacataataaatcatttctggccgcccttgtttttgccattttgccagtataagccattggtgtctggtcaattccctgtgatttgcaggtcgctggtatgagttttgcagccttagccaacctttaagggtaggacaattttaggctcgcaaaattctatccttgtgaggaagcatcttggataatctgtcacgtcggccatgttcttcgtggcctgttgttgccgtcttggttgcgcaagaaagtttctctcgaggacagttgctccgtcttgttgaatttttttttgggggggggcttgtaagagcatttgttatagaaactcacctcaggtggtggggttgcattctccgagttgtcaaagtttattactggttcggagtagattgtatatggtttcggttggtaagacaacggttgtacgagctgcggtatatgtttttttttgtcaacaggacattgtaattgggttttgttctttggtcggcgagagcaagaaaaattggcattgttctgcggagttaccttgtttggtttcattgtccacttgcctgtgttgcaaaattatataatgttatagaaattggatggtgt

SEQ ID NO: 20101 - DNA, 1123 bp, Zea Mays
aaacagccccgcaatactggtgtattcaagtgagattggtcaagatagtccaaccattctgttcttccaagaaaatgctggcaacatcgctcaccgtttggaatttgttcgactaatgatgcagcgactacagtgcaatgtttttatgctttcttatagagggtatggtgagagtgatggttatccttctcagaaagggatcacatatgatgcacaggctgcacttgaccatctagctcagaggaatgacatcgacacaaccaggatagttatctttggaagatctttaggaggtgctgttggagcagttcttgccaaaaacaatcctgacaaggtggccactctaatactggaaaatacatttacatccatactggatatggctggtattatgcttcccttcttaagatggttcataggcgggagctcttctaaaggtccaaaacttttaaactgtgttgttcgctctccatggaatacacttgatattgttggagaggtcaaacaacccattctcttcctttctggattgcaagatgaactagtcccccctccacacatgaagatgttatatgacaaagcttctgatcataacagaaattgcagatttgttgattttcctagtggtatgcatatggatacctggatgtctggaggggaccgctactggaggacaatccaattgttcttggatcaatacgctcctggagtgcagaatcatgatgccagcttcaaaagtgaaattaccgaggatggcaattattctgctccattgtacctgaagcaaccgaagttgtgaatatttttcgaggatattctccaccatgctctgccgctacatttgcccctggaacttaagttatttgcccatgaaccgaatatatatcctcttgattgaatgtatgaatgatattttttttctcctttgctagtatttggaacattcctaaaaatgtggctgtatgacagcccgatagataggctgtaagctcattggctgaactatttggttttgtgattttgattgtttcctttttcgatgttaaagcatctagacctttaatatgtttggatgacacaagattattgtgattaatgtatgttttgcagaagtgttgaagtt

SEQ ID NO: 20102 - DNA, 2044 bp, Zea Mays
gttggacgaggacgccgcgggcgccaacgaggctgactccgcctccgcctctacggtgggggccgccacgcccctcgtatgggaccacgtcaccggcgccgctcgcctgccgttccgcctccccgcctccgtcgaatccctgcccgcggggctgccgcggcttgactccccgcgccggatcgccgccgcagccttcggatcggacgacgagctggtggatctggaactgcgggtcgagatctcgtccatcgccggtatcgaggacgcgcttctcctgaagcccgcctctggtaaggccgccgagacgcggctccgcgccgggtgggcacgctggctggaggggaaggccgactacctacggcgcgatcggatgctccgctccaacctggaatccctcaatccgcgcaaccacccgcttctccaggatccggacagccccggcctcacttctctcacccgcggcgaccgcatggtgcagcgaatgctactagccgagctcgacaagcccgcgtccaagagctttgagcggcgtaggcttctatcttacgagaacaagcagagcatgacaacaactgtgaaggagaagccgcagacgggaaggaggtggggatatttcccggggatcgatccacatttgggattctcagagttcatggagaggttcttcgagcatgggaagtgttccatgagagtgttcatggtgtggaacagcccgcagtgggcgtatgacatcaggcaccagaggggactggagagtctactcaagcagcacccagatgcctgtgtagtcatgctatcggagacactggaactagagtccttccaccaattcgtcaaggaaggatataaagttgctgttgcagtgccgaatcttgatgagcttttagaaagcactccaactcacgtatttgcatcagtgtggtatgaatggcggcagacaaaatattaccatttgcactacagtgaactagtacgccttgctgccctttacaaatatggtggaatataccttgactctgatgttattattcttaaacctttaacatcgctccggaattctattggtgccacaaatcatgtctctggaaattcccgttttggtggggctgtgttagcatttgaaaaacagagccctttattggaggagtgccttagggaattttattcgacatatgatgataccctcgtgcagtggaatggggctgaacttatgacaagagtgataagcaatatttctagcagagcagatgaaaacagggggcatcttgacattaagttggagccctttgttaaattttaccctataagctctactgatattatacgagcccgataacatggtccaaaaagcacatcatgatgcaatcttttctaggatcgtgaatgactctaccactttccatttttggaatggcatcacatctgctctagttcctgaacccggcagtcttgtttcgaaaatccttaaccgttactgtctccattgccttgatgttttatagttgcaacagtctgaagctcctgctaagagctttattttggtttagaacaggtacacagaagaaatctttcaatgaggtactcagaatggctagtattgctgaatcttgcaaaacattgtgatggggggaaaattaccggcagcactgtgtatatattcttttcactaaggtttgtgccggagctgcgcctgcaaagtccaagcatgttgacttgactagttattgtcgatagcaaaagtcttcctcctggcaatacagaatgcaacaactgaagacacttggaactagagagttttgactagttcggtaccccttctatatttgcacatatactgataattttcacaatttgatattttgaaaataacatgattcgtgtaagacagtagaaattgaaggaccatataccgaattcactgggtttatctagatgtttggtaaacttttatttctcagagcatgattttgtctgaattaacgacttgggaacgagaatgtcagcgttgtaagcatctgcataaaattatagtgcaggtcttggc

SEQ ID NO: 20103 - DNA, 1587 bp, Zea Mays
tgaaattatattgcacataatgggtccggttccactatgggcatcctgatgtatttgatagacttttccatctgacaacgggtggtgtcagtaaggcatcaaagagtatcaatttaagtgaagacatttttgcagtggacttgaagaggggctatcgcagggaagattgattcataatcatccccttcaaattgctcttgcctcacaatctcttgttcaacttggttttctgatggctcttccaatgatgatggaaattggtcttgaaagaggatttggtcaggcactaagtgatctaatcatgatgaacttgcaattggctactgtctttttcacattttcccttggcactaagactcactactatggaagaatgttgcttcatggaggtgctcagtacagaggtactggcaggggatttgtcgtctttcatgctaagtttgcagagaattatagactctattctcgcagccactttgttaaagggattgagctgatgattctgctcattgtataccaactatttggtcaatcttatcgctcaacaattgcctatatttttattaccttctctatgtggcttctggtattgacatggctatttgcaccctttctgttcaacccctcgggatttgagtgggcaaaaattgttgatgattggtctgattggaacaagtggatcagcaatcgtggtgggattggtgtgtcaccagacaagagctgggaatcttggtgggaagtggagcaggatcatctaaaatattcaggaacaataggacgctttgttgagataatcttggctatacgttttttcatataccagtatggccttgtttaccacttacatgtcacacataacaaaagcatcttggtatatttaatttcttggctcgtaattgtggcggttctgctcgttatgaagactgtgtcggtgggaaggcggacattcagtgcagatttccagctattcttccgtctgatcaagtttttgatatttgttgctttcattgctattttgattgtcttgatagtattacttcatatgacctttcgcgatatatttgtgtgctttctagcattcttgcccacaggatgggggatacttctgattgcacaagcttgcaagcctcttgctcgacatgtaggattatggggatctgttcgtgcccttgcacgggcctatgagataattatgggggtgcttctctttagtccagttgctatattggcatggttcccctttgtgtccgagttccaaacgcggatgctgtttaatcaagcgttcagtagaggactgcaaatttctcgaattcttggtggtcaaaagaaggaacgctccgctcgtaacaaagattgattagtcttctttcatgtgtgttccaatatgcacttgtaaatatttgttactgtctcacggggtatagtgtgtttttatgattacaatatgtaaatatcagatcaaggtgtcataattgtattcgttagattactgtgtgtgtttctattgtaatagtctttgatccagcacatgtacttttactacatatatacgcaaagtctactctaatcagggtttccaacatgata

SEQ ID NO: 20104 - DNA, 205 bp, Zea Mays
gtgtactatatactgcattagctagcaggagcgcaaggtcatcgctatatggcactggtttgtcatatggcacatatgtacttccgtttccattatggtttcaacacaatagttactaatgctctagataaaatacctgcagcatggcaaaggagcttaattgcggactacggtgttccactgatggtgatactttggacagcat

SEQ ID NO: 20105 - DNA, 1030 bp, Zea Mays
gaacaaacctgttggattttgacatgcattgtgtaatacaaacatcgtggtgtatgtgggaatttgctcagtgataggatctttgacggtaatgagcatcaaggcagtaggcattgctatcaagcttacaattgagggcataaaccaggctggctatttccagacttggctgtttgcaactgtttcagctacatgcataattattcagttaatttacctgaacaaggcattggatactttcaatactgcagttgtttctcccatctactatgcgatgtttacatccctcacaattttggcaagtgccataatgttcaaggactggtctgggcagagtataagcagtattgcctctgagatttgtgggtttcttactgtgcttactggtactgttgtactgcattctacaagagaacatgatccaacccttacttcagatctgtatgctcctctttccccaatatattggcatatccaaggtaacggtgaaacaggaggaaagctgaaagaggatgatttactctctggcaatttcatcactgtggtgcgacaagactactttgtctagagaccttccacgatgctcaatgttctggattaaaagaaaagagaacaacactacggaaggatcctactgatgcccagtgtactgcggcttccccactgtgctcatgaacagacattttttcctgccttccaaacaggcccttagaatttgttgaaaagttccagtttgatcacaggcatctgggccgatgccttgtagtaagatgtaagcaatccgtcctctggccgggttgagcaaggcttggctgcagtgtatcagggtggtgcagctgatgtatttatactgtacaatctagtgtgaatgtatgaactagagctatcagaatctgcacagatatttcatgacagactctgtccagcatgttaagttatatattgctcctgacttgtgaatactttgttattacttcctggttcaaagttatgatgcgatgtacatgctctgtacatcatacaagacgag

SEQ ID NO: 20106 - DNA, 902 bp, Zea Mays
cgcgaaggctccgacggcgacggcaagaaggtggatccccgctgccccaacgcgcccaacccgttccacgtctgcaccgaccactgcctcgccaagatatccgaggccggccgctcgtcggagggagccaagtcgccgatctcgctcttctcccgccactcccgccgctcctcctcgtcctccgaagatggcagcgtgaagtccgcggggagcaagaaggtggatccaaggtgcccgaacgctggcaatctgttccatgaatgcggtgagcattgcgccgccaagatgcagcggtcggagcagcagcacaagggggtcaatctcaagtcaccgcgcaggaaagtggggaagaacgctacagcgatcccaaactggaaggttgatccgaggtgccctaacgcgtccaatccgttccacatgtgcgcccagtactgcttcgaccatctgagtgaaacagcgcagacaagtgcagcaaagtcagacaagagacgaggcaagggcgtttctgaagacgagggaagaggagaaaccaaaaccaaccctggttgcgccaacgcgtccaacccctaccacaagtgcggtgaccaatgcaagagaaagggtggtggtgataggtagaccgtagacgaggaaggccggcaagacaggatctgtccggacggacgatcgacggcgggcgatgaagggaagaaagaaaaaacaaagctagttcccatcgaccgtccctgcgggctccgttctgtatgtagagtggtgtgcttccccgttttccattgtaatgcactatgtttctctgacgatgaaggttgcctgtacgagcagaagcctcctggagtgtttggtgtcatctttttttcttttttcttttggttcgctttcacggaaatggagacatgtttttg

SEQ ID NO: 20107 - DNA, 1305 bp, Zea Mays
  misc_feature (1304)..(1305): n is a, c, g, or t
ctttctgtgtcagtgccagtggataacacaccaatcaccaccagcaaaacgtgttgagctcggcctggtgatcgcggccaaaaaaatcctagtcttctcctctcccgcgccgaagcttcctccgccgtgcgtcgttttcccagcagcggggtcagagaaccggtggacaagaaacctctccacccacccacctccgccgctgcagaatagaaattgcggcattgcctccggcttgagcagaagatcatctgggtgttggagtcatccagaggcacaagctgaggaatggggcaaaaggactccaagccttcacatggatatggctactcttcttatgattacgggagtgcttcatcgggatacacctcgagaaacactgggaattcgtcctccagttatagcgtcaggtacgcgccttcttcggagaacagtgtacagccggagacacatgccaggttgcagaggaagtattccaagatcggtgatgactaccgttctttgagccaggtgactgaagctttggcacaggcaggccttgaatcttcaaatcttattgtaggcattgattttacaaagagcaatgaatggacaggtaaaatttccttcaatcgccgctgcctgcatgatattggaaacactccaaacccatatgagcaagctatatctattattggaaggacactttcagcatttgatgaagataatttgattccctgcttcggatttggtgacgcgtcaactcatgatcaggaggtattcagcttttacccagagaaccgcccatgcaatggatttgaagaggcgctagacagatacagagaaatcgttccaactcttcgattagcaggacctacatcttttgcgccgatgattgagacagcaattggaattgttgacagcactggtggtcaatatcatgttcttctgataatcgccgatggacaggttacccgaagtgtcgatacacaatctggacagttgagtccacaggagcgggatactattgatgcaatagtaagagcaagccagttccccctgtcaattgttcttgtcggggttggtgatggaccatgggacatgatgcaccagtttgatgacaatatacctgctcggtcatttgacaatttccagtttgtgaatttcacggagattatgtcgaagagcatagcagctgacagaaaggaggcagaatttgcattgtcagcgctgatggaaatccctacacagtacaaagcaacaattgatctccaactcttaggccgtcgccaaagaataaccccaagaattgctctgccaccaccaann

SEQ ID NO: 20108 - DNA, 2337 bp, Zea Mays
ctgttgtagagttaccttcggactccaggccctcatccgcccctcctccccaaacgaaatgctatatttgcagaaaggtcccaatccaagtccaacaaccgaaaagaagacgacactcggagggctttcctgtaagtttcgagggcggcgaagcactagggcatccacctcggcggtggcggcggcggcctccatgtcgggcagcaacgggaacggcggcggcgcctcctccgcgctctatggcttatacggtcccaacgtgaaacctgatgttgtttttaaggaggctgctttaaactctacactaaacctgcaggatgttcagggtctagttacttgggttattggtgacggcatgctgccttcttgggtgtttgttaagaacaaacctcttatacccaaagtcgtcctactatatgttcctggccttgatgcagctttatatatgtcacaaactcgacttctctcttctctgaaagaattatgtggcaatccaaaacctgttctagcttcaagctgtataccggatgataggcacacaattgatgcactcctaacctgcagagtaaagagaaagcttgatgtaaaaacatcaaatcagtcatctaaacctgacagggatggaaaactatcaagtctggatgatcttggggacataccatttcctgttacgtattacacactttcagagaaagacttggaagataatggctaccccttcaatttaccaggttttgtccctactgtttcagctccttcaggttccttgccacataaagttcttgcacttgattgtgaaatgtgcataacagaagctggatttgagcttacaagagtgacattaattgacattaaaggatcggtggtgctagatagactagttaagcctgctaatccaatcattgattacaatacaaggttcagtggaatcactgctgagatgttggctgacgtgtccacatccctgcatgaaattcaggaagagtttgttggacttgtatatacagaaacaattcttgttggtcattctttggaaaatgaccttatggcattgcagatatcccatggtttaatcatcgacacagctgttttgtacaagtataatcgaggatctcgctgtaagattgctttgcgtgtcttgacaaaaagatttctcggccgggagatccagaacacaggatctgggcatgacagtgtggaagatgctagagctgctctagaacttgctatattgaaaataagacatggtcctgattttggttcccaaccatcgttgtcaaggcggaaattgacatctatactgcatgagagtgggaaaaaatgctcccttattgatgacatgtctattctagatcgatattcagatacttcttgcaattcaattgctgtcttttctgatgatgatgccctctccagatcaatgaaggaggtgaagaacgacaaagtggctttcatttggacccagttctcaggattgatctcttacttccgccgaagagctgaagatcccgaaaagttgaaatcatgtgtcgcagaggctattgcattaaaaacatgtgatacaaaaactgcttcaaaaaaagcaaaaagtcaaatttgtcctgaattaaaggaaattttgtgtgaattggataaaaagataaagcagttatatggtgccctacctgacaattctatgcttattgtatgcaccggccatggtgatactcctctagtacgaagattgcggaaaatgcttcaccatgaagaagaaacaatagatagccgggaaaatattgtccaagctctgggagatttacaagcccaagccgaagttgctctgtgcttctgctgtgttaagcattaactaactgcatctttggattaatgtactgatggatatggcttcagccattatagaaggggggtggcaaaagttccggctatatggtatcggaccatgttttcgattcataatatggcccttactatttacactcagggagactgttcatgcggggaagaacattggccactgcctacggaagtgcggtaaatggcaatatgacgcacgtgctcctgatcctgatgcagccagcctgacgaatcccaaatacgggcaggctattgggtttgttgaccccaagctgtccttggagagttgaattcattaatttatttatggctagaccaggatgttatggttgcttgttactttcactgaatcttcaagtgggttcgttgtataaataatactctcttcatttttttaatctgttgcggtatagtttaaaaataaactaacgagcgacaaatattgagaaccaaggtggtacacccttcgttccagaatagtaa

SEQ ID NO: 20109 - DNA, 1133 bp, Zea Mays
ggagacaaattagttggatgtataaattcatgagctctctggtaaagttggttttaggatttttaaagcaattagaaaatattaagtgaattaaaggtgctttaaaaggactattggaattttagaaataagagttgagcaccaaaaatcatagaaattcttggaaagacttgttatcataaagtgagcacttgttaaaatttggagactttttagaagcctttttcttagaaagcattgtaaagtcacaaatagggtgagaaaatccctaatcaagtatgaattaatgctttggaaagaagataagtttatctagggaagagatgcagttgcttaagaagttttacgcttttggatgagatctaagatggattagttctctagtttgcctaagtgaatccgatttagccacttttagcaagtgttggtggtgtaaaaccatgtgtatacttgtcatgtgttttagtttgtggtgtttatgttccccacctctccttgtgagagtttgcatttcatgtcattacataaacatacatgtatttgtaattgacttgtagaacacctagaagaagtggtgtttgaaggaggagtctactccagtggctgctgatcaagtggaggagccatctgactgggtattgggtggaaaggtctttagcctcttctctgcaacaaaggagaagtttttttcccttttctttaggttagttacttcatgtggaggacttgaagcttagaaggtttttatatatcttttatggaaaggcttcacccttccaattattgtaataagttatgcacttcgagtactatcaggacttgtaataaatacatctctttctaccatgtaaaacttgagttcgggaatgtaaagtgtactttgtaaaagtcttccgctctatctctaatgtgtgtgtatcaaatgtgattactgtattatacctgttatgtgggagatccttgggatgatgagttccagttggcgaactcgatagccttgttaagttatccggtacacgtgcacagccatctgagaccattaaggcaaggattggtgcatgtgggcctaataacttgggagggctgtcacaaagacaagcgcttctaccatggtagggtcaaggcgagtacga

SEQ ID NO: 20110 - DNA, 859 bp, Zea Mays
gcaaacggcaagggctggaatgagctcaactgaaggaatgtacaaaataatccggcctgctattggtgaagcattgagggagatgccttcaagtgaactgaaaagcaagtacaggaaggtgtcatcaatagacaaagttagtaaaggatggcaggaagagtacgatgcttcatcgaagcagtgtatgcatggatctaaatgtaaaattgggagctactgtactgtaggaagaaggttgcaagagcttaatatattgggtggcctcatacttccagtttggggtacaatagaaaaggccctggccaagcaggaacgcctcattcacaagagaatacgggttgtccgtttagtcacaacaaatgacagtcagcgaatcgttgggctgctgattccgaattcagcggtagagtcagtactaacaggtttgcaatgggtgggacattgatgactgacatggaaaggcttgaattttgtttctcagctgcattcagtttgctgggctttttttaacttcgtggcactgttctgatattagatgcagcagcatctagggcacacttgattttgtttgtagggagatagcaaggtaacttacccgaagcgatgaaattcttagcttacaggtcaggcaggtatatgctgacaacttttgtatgtaaaatacgcggtgcggtgtggtgcggctgtaagacatgtaatgtaaagctactaaaaaagctcaggttaatctcaaaagaaagtcgcacctcacaatctggtgctgccacaatgataatgtttcatgtggagttactgcttatgtcggactgaactgcacaagaaaaactaaggcttatttatattatagccaaattatcta

SEQ ID NO: 20111 - DNA, 3494 bp, Zea Mays
caccccttcttctttccctccacttgccgctccagttgcagttggtcgaaaaaaaaagtggaaaggaaaggggcaaaatatcctagggttctgcctccatggacatcgagacccacgccgccgccctggcccgcgacgagctgcggcggctcctggccgccaccctcagccccgacaaggcgtcggttgacgctgccgcggcggggctcgacgcgctctcttccgacccacgcttccccctcgccatcctcgccgtcgctgcaggggacggtgatcaggggatgagagtcgctgcagcgacatactttgaaaaattttacccgccgcaatttggaaacccgtctgtgttcatctgaggtttacaaggagttccgtgaccaacttgcccaggctttgcttcgagtggagcctgcaattcttcgagtgctgattgaagttttccgccaagttgttgaaaaagattttgtcaaggataacttgtggcctgagcttatccctcagttgaaactagtgatccagagcagcaatctaattagtccaggccagcatcctgagtgcaatactattaatgcactcacagtacttcaatctgttgtaaggcccttccagtatttcttgaatccaaaagttgtgaaagagcctgttccacaacagttggagcaaattgcagcagagattcttgtaccattgcaagtgacattccatcacttctctgacaaggttcttttgtcacctgatgggactaacttggaatatgagcagctcctactcatcacatgcaaatgcatgtatttcactgtgaggtcatacatgccatctagggtgaaacaaattttgccttccttttgcaaagacatgttccgtatactagattctttgaactttaatagtcttattgaagatggatctaccatgaagctcaagattgcaaagagatgtctcattatattttgtgcacttgttacacgtcaccggaaacatacagataaccagatgccacatattgtcaactgtgcaatcaaaatatcaaaacaaagcatccatttaagtaaactcgactctctccccaatcggattgtttcattggcatttgatgtgatttctcgagttttggaaacaggaccgggatggcgactagtttcaccacatttttcttcacttcttgattcagcaatttttccagcattagcattgaatgagaaggatatagaagaatgggaggaggatactgatgagtatatgcaaaagaatcttccttctgaacttgatgacatttctggatggactgaggatttgttcactgccagaaaaagtgcaatcaatttacttggtgttatagcgctatcaaagggtccaccagttgcatctgcagcatcgaagcgtaagaaaggtgataaaaataaagggaaatctgaaatgagctcaattggggagttattggtcaccccattcctttcaaagtttcctataccttcccatggtgaagatgcatcatcagtagcagtgcggaattatttcggtgttttgatggcatatggaggcctccaagattttctgactgaaaagaaagatttgacaattacattgatcaggaaccggattctcccattatattctttggatccttgcagcccatatttgatttcaacggctaattgggttattggtcagcttgcgatatgcctaccagaggacatgagttctagtatttatgagtccttaatgaaggcgttgaccatggagtatgtggaggacataacttgttatccggtttgtgcctctgcttctggtgctattgcagaactcattgagaatagttatgttccacctgactggctcattcttctgcaagtggttctgaaaagaataagtactggagatgaaaatgagtctgctcttctgttcaagcttctgggcacaatagttgagggtggacaggaaaaagttctgtctcatattcctgaaattgtatccaacattgccagtactgtaatggagctcctaccccctgtcccagatccttggcctcaggttgttgaacagggtttcgcagccctcgtagcaatggtgcaagcttgggagagctctgcaccagatgaaaacaagacacctgaaaagaggttctggcagtcaggccagtctgcaattgcccaaacaatttcattactgttacaaaaagcttggttgttgcaagctgacaatatgggctctgcattaccacctccgtcatgcgtaaacgatgcttctgtgctacttgagtttgtcatgagttctgtcacttgcatggaagaaacggcaaatctgaaggtctttgaactggtagctacatgggctgacgctattgccaactgggactcctgggaggagatggaggatcagggtgttttcaacacaattaaagaagctgtcaatttccaccagagatttgacctcgacggtctcttcctgaaaacgcttccgtcgcagtctgaaaatggttcacagagttcagtcatcggccgtgtctctaattttgtgactagggcaattgcagcttacccatccgcaacgtggagggcatgctcgtgcgtccatacactgctgcacgctccaaaattctcccttggagcacaagacactagaaagactatttccgaatcctttgcacaagcagcgttttcccgcttcaaatctgtatccgacagtcctgctgggctatggaaaccactgctgttggcgatatcctcgtgctacatctgctatcccgatgccatcgaacaagtcctgaacaacgttgatggtaacggttttgcgatctgggcgtctgcattggcacaagtctcaagcagcttgttcaatcctggcctgtcatctgaatccgagatcaagttagctgtgctgacgctatctactgtgatcaaccatctcgtgtccctttccacgggtggcaccaaatttgttgcaagactgctatgcatcactgatggagtcttgcattcagctgaaggaagttcaggacgatggggacaatgacgatgatgatgatggtgctgaagatgttgatgacaacgatgaagaggaagacaccgaagatgatgatgaggattcggacgacgacgacgatgcgagagaagaaacagaagaggaatttctggaaagatatgcactagcggcggctgcgggcgagtcagtcgaggaaggagacattgatgaagagacccaagacatcgaattgggctctctggatgacgtggacatacagcaggtggttattcccctgatgcagaaacttcctgctctgcagcccgccggagcgtttccggacagcctggttgaaagaattgcagaaacattcccggaatacgaacagtttttgcaagcccttcgacgagcttagaatatggtgtttattttcccttgatgtgggtggcaagatatgggtgatgatgtacgtacgatggttacaagtatgttgtgagcataattgttatggcaacactatcctccaaaaaaaa

SEQ ID NO: 20112 - DNA, 2007 bp, Zea Mays
gaactgcacaatgattctacagccgcgagcggccgatccggtcgctgtcggtgatgacgtgtgcgcgggttatctccctcagcgacgtgcagccgctgagcgccatggtgagctccagctcgtccctcagcatctgcagcaccttccgcacgccggcctcgccgtccaccgccagcgagaacagcacgggccggccgatactcctgaagctcccaacgccagggccttgaagacgtccgtgccacggcggacgccgccgtcgaggaacaccggtagccggcctttcgcttccctgacgacctgaattcacgtcgcactttatagtgaaaacctcagcagacaggaacatggaaagccaggaagcacaagcaagcttttcgcctttacccccctgaagactctgaagctctgaatcacagaaggatttggtcggcgtacctcttccaggcagctgatagtcgcaggaacataatctagctggcgcgcgccgtggttggacacgatgatcccagcagcgccatattcgatcgcaagcctagctgcatcgggtgtatgtttcgcgtgaaatgttacagccataacaaaagctgacgcgaaactgaaggttgcgcctcaaagtctgaaaccgagcacttactgtcttctgcagtcacgatccctttgactaggatcggcaacgagattagctgttatctgcaactaggaaggtattcgcaagaagaagaagaaaaataatgaagctaggaaggaagggtgtacgaataataccttccaggaaagggtgcggtcaacttgaccagcaacgtaggaagcaaggccggaatcatttgtcttgtccatcgtgccaagatccagcgcttggaagtttttcaacaccagatgtggaggtaaggcgaacctgttcttaatgtcagcttccctgcggccaagtattggagtgtctaccgtgagtgcaatggccttgaagccagccatctcagcccttttcacgagttgccgtacgatattcctgtccttgtagacctgatggagatgacgatacacggtataaggtcagagtgtgatgaacagaagataagcaacgtttcttgtgagttcatgaaggaagataataatgcatacatagagctggaagaaacgtatgcccggcccaactgagttgacctcttcaacgctggaagtagaccatgaggacaatgtctggaaaaaccataagatcagcacaatggattagtgtttgggtcatgacttgaggtaccacaggcagtgtgatctttcaaaccattattgttcctgcggaagctgcagctcttgccgtggcaagctctcctgcattccagataaatttctccatgagaacttctctttggaaaatgagtagaaaactctgatgactgaacattcgtccgaaccatcaggatgagccattttctgcatggctgaaggagcgatcatgataggcatggaaatgctgaagcccagaatgtttgtggccatgtcgatacgggagacgtcgatcagtacccgtggcctaaacctgtaatcatttccacaaggaagcacaaaatgtggttttcagatatctagcaaaggaggcaaagagggattgctacacttcgtgtgccccggttatcacatgcaacgtctcctctaattttctcaaacatgagtcgtcgatgtcagtgtttgtgttgtggatggattaattctagcttactcttgtcacacatggagatatggatatggggatggttatagagttattaatgagcaaaaggtcttggagataataatgtttaaggtctactaccaacattgccaaatgccatacgcaacatcatctgtatgaaaattcagagtcgagatgcatgaccgaagagctgaaacatgtaaggacaataattcggcacacgtccatgcatttctaatgtcatgtgtcgtgtctgagagttcctaatggacttgccatcttattctgaccgtccaggccacaagtcacgagacaca

SEQ ID NO: 20113 - DNA, 832 bp, Zea Mays
acccgagttttggttacccattgtcatggatgttcatgggcacacggccaccacaccgcggcgcgtggccagcgcagcgaatccatccccatcctcatgattataaataaataataattttacacgcccccttctctctcgatttctcgcggagcggccctccacctttatcgccgccgccgccgttgctgtgttccgtctcttcgccgatggcttcggccaagttcggtgctgcccagcaggtggagaaccgaggcgcgctgtccaaaaggtcacgtaacgacgagaatgatgtcaggacctcctgcttctggacctgtcccaaatgcgacaacattaacttttccttcagaagcacttgcaacatgaagaaatgtggagccccgaggccaactccgggaggtaacacgagctcatctcgcaaggacaacagcaataaggaagcccctgaaggaagctggacctgcccagagtgcaacaacctgaactacccattccgcacggtgtgtaacaggaaaggatgctcgtacagcaagccagccccggcgaacaactgaacccaaccttcgcgcatcgtcgagatattgttgtacccgtagattgtatcctagtcgtgtgcaatctttgaactgcacaaagatgtttgtgcctggagacgagagattcgattcgttacgcttaatttactattatacttttttattaaatgatgaaaactagggaagagcattatatctataaactcttagtagtctgctatacacagcaattgacatcaattgttgcagctctcgagacattaatccttgaaccacgcaacatgttctcaaac

SEQ ID NO: 20114 - DNA, 170 bp, Zea Mays
cccaatggttcgtgctagttgcacgagagacggtagacaatgatttacaggttcgggccgctttgaagtgcgtaacaccctacgtcctggcgagagtgctgtatatggtgagttacaaggtaattctctaatgcgtaggaagctagggtggatggctaagtagtgggttc

SEQ ID NO: 20115 - DNA, 1151 bp, Zea Mays
catgtcctcaactgctgcccttcaattgcttgtgtttgcttaacatgcttctcatgttcagctacagctaccatggttttctagttgctgctgctgctgctgcttcatggctccagtgcttgttttcaaaacatcacggcttgctatgctttagtcagcaacttagtgttctacaccatatttcggcaggagaacggtattggtggaagcatgtttaaccaatccgcagacgcgaagagtccatctacctctgataatagaaatcaaaacgacatgcttcctccgaccaaagcggccgagaagccactaaacggtactgcgacagagcagcagcctcgcctacggacgcttgggtccctcacgacacggacgggcagcaccagtgacatcagaaagctcatgatggaggacatgccaatggtctcatccaaggtagaagggcccaacgccaggaggatcgacggcttcctgtacaggtacaagaaaggcgaggatgtgaggatagtgtgcgtctgccatggtagcttcctcactcccgcggagtttgttaagcacgcggggggcggtgatgtgccgaatccgcttcggcatattgtcgtcaaccctgcgcccttctcgtgaagagagagggttacgctggtgctgctatctgctgtgctgtaacatgtaggctcctttgtttctgggagttcaacggaaggtctctgtatttttacataaatcgagtgtgacagcaaattcaagagaaaaaaaatcatctgcaaatgttataggcttgtctacaaattgacaaggattcagtagcaatgctttgctagctggttttaacagttccctttccagtgacaagtctctgtatgcttcaagagggttcacatccaagataggaacagggttctagatggcattcaagtttgccatgctcaagctattcgatttcgaaggcattgaggaaacagagatatcattatgcttctctaggaggttgagctcccaaaggaatgaagcgaatgctccactctgatatggatccctgtcttcggggttgtatttctgtataaaagaagaggaatagcaggatacgaagtgtccatttccaactattgaaaaagaacatgagaaccgccaccagaatcattttccaacaaaca

SEQ ID NO: 20116 - DNA, 1574 bp, Zea Mays
aaggctcatgaaactttcgacccattggaggcccacgacctctccgtccgatccctaggcggcggatccttcctccaccaaacccgcacctgccgcaactgaatcgggtcagatcgggccatcggggaggcgagggagctcacgcggcgccatggacgaggaggagcacgaggtttacggccaggaaatcccggaggacggcgacatggacggcgctgacgttgatatggctgcctccggggatgacgcggcgaagctgcaggagctcgacgagatgaagcgcaggctgaaggagatggaggaggaagccgccgccctccgcgatatgcaggccaaggtcgccaaggagatgcaaggaggtgaccctagtgcatctacagctgaggcaaaggagcaggtggatgcccgttctgtgtatgttggaaatggctagtgtgcttgagcaagcctttcaaattgactataatggcctaatgggcactgggtgatgttttagagttagcatagagtgaaaaagaaaaaaaaagaaaaaaagatagaaggacctctgaaaaaatataaaaaagtgcatggaaaaagaaaggaaaaagaggaaagaagtaaaaaacggataataaatatcataagttagatgacatccttggcgaagcaaaagaagtcagcacagagctgctgtctacactcgggatgggactttttgactggagctggcatggcggcatctgatgtggttcgtagctgctggtccactgatatcacctgggtggtgcgtaagtatgacatgtggattatgcttgcaccccagaagaagtgcaacagcatttccaagcttgtggaactgtcaacagggaaggtgttcaggaagctcttaacttgaatgaatctgaattgcatggtcgccagattaaggtcgccccaaagaggactaatgttcctgggatgaagcagcgtccaccacgtgggtataatccataccatggctacccttatagatcatacggggcaccgtatttccccccatatggttatgggagggctcctagattccgccgccctatgcgctacagaccttacttctgaagtacggggtagggtaatgaagttcaatgcaaaaccagcccatggtcactggtcagtcccgggaataatcaactgtatcgtttgcactgttgcggctcaatgctcctgtatcagctgccttttctgacctttgtttcaagtgccgccataagcgacggacatgttgtattggcttgtaatacaggacgtagtaagtgcacacactttctgtaagcgtgctttcccacttcccagggttactactgtttgcaatttctgtagttctttgggtcggtcggttaggacatgggagtggatcgttctatgcccatttgaggtagattagttatatgaagagaaagcttcgcatgcggggctgtcttgtttgcagattgccactacctcagtacggttccaggttcctcaaggtatccgctgagcatctgttctggtgtcggattccgagttcaggtcttgtaactaataaaaaacggaaattataatgtctctcttta

SEQ ID NO: 20117 - DNA, 874 bp, Zea Mays
caaccctggagaatgctcgtgtaatggtcctagctgctacaaacaggccttctgagctagatgaggccatcctaaggcgctttactcagatatttgagattggaattcccgtccagagtgaaaggaacaagatacttcaggttgtgttgaagggagaaaatgtcgagcctaatgttgattacgatcacattgcaagattgtgcgagggctttactggatcagacatcctagaggtgtgcaagcaggcagcattctaccctatcagggagctattggacaatgagagaaacgggaggaaattagataaacctagacctttgagacaatcagacttggagagagccttatcaacatctagaaagtgcaagaaggctgcaagttcaggactgcagtcacccttgtgggttcggccgacagattcagaagacgatcagatcgcgtgaaaattctacagcggagtaaacgcaggcattacgtcgatacccttaggttttcttacgcagcttgcagagaggttcagcgtatatatatatatgcattaattcgttttgcttggcgagggcgcaccgggttttttgaagctaactgcagctgggagtatgccctggtgtttaagtttattattcaagattgatgcccctgtgggctgtaagctcagaactccatagttgtccggcctacaattggccttagtttccttgcattttatcttcagtttaactagtctagggtagcgaattatacattcatataatgcagaaaggggcccttccgtctcgtcatcatattcctaaacgtgcgttcatttttttgtctgatcgttatttacatgcatgtactacttttgcttttatcttatttttttaaatctccg

SEQ ID NO: 20118 - DNA, 3179 bp, Zea Mays
cttgtcccggctggagccgcggcccaagaactgaggcgagtcgcgagcgtaccctagccgccagccgctcaacacgcccgagacctcaactcccgacgccttctgtttcagcgtcctgctaggccgccgcagttcccctgctaggccgccgcagttccctctccgctccgccggatccatccctcgctctgctcatcgccccaatgccgaaaaaggtcgccatgcggcgaggtaagcccgcccccgaccaagggaagaggcggcgccacgggccgcggctgtccaaggtgatgcttcgggagctcgacgcgatggggcctggccctgcccgcggctccgatggtgaggaggacgggtccgacgcggttgccgaggacgtgtacgagtacgaggaaggggtgcccgaggaggaggccggcaagaacggccgctatgacaccgtcgccaagtacgagtacaacttcgacagcgacgcctccgatgcggatgaggatgtgccttcggaggaaggcgaggatatggacgaagatgacaatgacgacggtgatgatgaggagaagcagataagaatacttcaggagacgaccggaatgcccagagaagccttcgatggaaagaagaggaaacagccatcggagctgcacctgcagcatggcgatggagatggtcctgtcacaattcatgatctcttggacaatgtccaggggaaacctggttatagcaagatccgtaagaggctgcagcagcaggagaaaaaaccgatggtcgtgctagccccacttccaaaagtagagagggacaagatcgagcgcagcgtgacgtttcagaaatccaagaatgagctaacaaagtgggaaggaatcgtgaagagtaacagggaagctcctgtactatactttgaaaatgataccaacttgggtgtgaacactgttgcggcaattgctagcgaatttaaaccaaggactgagtttgagaagaagattgctgagattacgcaaagcactgaaataatagaagcacacaagaacgatggtgccaaaatcctggaacttaacaagattgatgcagaagatgtgagagaacaccaaaaccgtcttgctaagatgcgcagccttctattccgtcatgaaatgaaagcaaagcgtatgaagaagatcaagtccaggacatatcatcggatgttgaagaaggacaaattgaaggcagcatcagcagatttcgaggcagatcctgaagctgtcacagatcatgctaggaaacaagaatttaaacgggcagaggaaaggatgacattaaagcacaagaatacatcacaatgggcaaagcgcatcctcaagcgtggattgtctgttcaagatgaaggcacccgagctgccattgcagcacagctccaacaaaatactcttctgactagaaaaatgaattccatgaaggatgattctagtagtgaagaaagttcagatgatgatgacgacgagagtgactcagaagcaaaaatcttaaacagagggaaagaaaagattcttaaagctcttgaagaagacaatgagataccgaattctggagttttttcgttgcctttcatggagcgtgctatgaaaaagcgcgaggaagcaacttatgaggaagcacgacaggctcttgaagaatacgatgattccttgaagaaattagaggacaataacactgaacaaaacgaagacaaagttaaggtgtcaggtaaaagaacgtttgggcctaccaaaaatacgcacgaagagttagtgaagaggaaaaaattacaagatactgaaaacagcagtgatagcgagtatgattctgagccagcccagcctttgagcaataatgaagtaactatgaaacatgatgatacccaatttgggagtgcactactggatgatgaaccacagaatgatatatacagaaactttactgatatcataaaaaatcctggtcctaagacaactttcgaagttggaatgttagctggtgattcatggaagaaaggtagccattctggtatcttgcggtcaagagcgacaaaggaaaggaccacagcaatgccaatgacattaccaataaatccaaaataccggttccttctattgtagacccacagcctaaggatcacaattccgattcagattctgaggaagagatggttgaaggcaacttgaccatccctgacagaaaggagagctatgaacttccatcgcaagctgatctcatacgtcaggcttttgctggtgatgatgttgaagctgaatttgagaaagacaaaatggatgttttaaatgaggagaatcctgaacctgaaaagcctgctcttgttcctggctggggccagtggacagacatccaacagaaaaaaggacttccctcatggatgataaaagaacatgaagttgctaaaagaaatagagaagaagccttgaagaggaggaaagactcgaagcttaagcatgtcattatttctgaacatgtagataagaagactgaaaagtatttggtaaggaaactgcctttcccttacacttcgaaagatgtgtatgagcagagcattcgaatgcctattgggcctgatttcaacccagcgatatcagtttctgctctcaatcgacctgcgattgttaagaagcctggtgttatcattaaaccaatacaatacgaggaggttaatccccatgagaagctcgatgaaccaaaacgtgtcattcagagagcaaccccaaaccggaatgcaaagaaagcctttgccaaacaaggaaaaagcgtaacttcacaaaagagaaagtgacgagacagtcatcttctcgtcaatggcttcatttggacaaaggagagctcatccgaattttgttgcccccgccgaatttgcacatgcatggctccaggtgtgtgcagtgattcttccctttatgaaagttcccgcttcggcgcatgacccatgggcaaaaggtttcacaccactggtttatgagagcagagaaattttggtacaagtagttctgtatttgttatttattgcattcgccacgcatcgtccaaatgagacggatgctatatttcagttctgatgatggccactggttaactagagtcacctgtcttgtatggatccccacttttcagacgccggtaaatttgtatgatttgcgaaatgttcgactgatcgaaga

SEQ ID NO: 20119 - DNA, 86 bp, Zea Mays
caagatcattgtgttaattggaacatggagcttaacttgagataataatgctaccacaagggtggaatgggacgcccttggccaag

SEQ ID NO: 20120 - DNA, 1135 bp, Zea Mays
aacccatgctcaagggaaagtgggaaacgctcgaagaggggagaggagacagcggtcctatgtccgtgtggtcgtgcggactgcggacttctcttcctcattccatccccgctgccccatccggccatcccacagcgaatctcccaaaccccggctccctcgattcccaatcccacccctgccacgaagagatcagatgacggcgagctgctgctgatcgagtgcagtggaatcggaggcgatgcgggctagccggccggcggtgcaccctgtggaagcggcccctccgccgccggccgcggcggcggaggggccggaggcccaggtggagggtgccgcgcacccgcgcggggtgcggatgaaggatccgcctggggcaccagggacacctgcggggcttggtctacgccttgcgcaggccttcttcgcagccgctgcgctcgccgtcatggcgtccaccaacgacttcccgtccgtctctgccttcagctaccttgtcgcagcagccattttgcagtgcttgtggagccttttgctagcctttgtcgacatttatgcacttcttgtcaagcgatcgttgagaaatgcccgagctgtatgtatatttactatcggagatggggtacaataaccttgggcgcggcatgtgcttcagcaggaatcactgttctcatcggtaatgatctcaacatatgtgcagagaatcactgtgcaagtttcgagaccgccacagcattggcttttataagctggtttgcgctggcgccatcctgtatcttgaatttctggtcgatggcctccagatgataaatataggatgttataaaacatagtatttttgaatggtttctggacaaggtcgctgcttatggtagcagcaaagcaacgcggtgccgtaaagctaattgtaatacccagaaattgttgaatggctgtggaatgtagcacgtggtcgaattgtctgtacaaaatacggagaggccttctttggatctgaaaaaggcttctgaatcttgccagtccttcctttttacgttaacatgtttctcctgtgtggtttgttgtattgtacgatggcatgcctaaatggctcgagatgattgtttttatgagttgttggtatcacgcatataag

SEQ ID NO: 20121 - DNA, 1675 bp, Zea Mays
cttccctcccaagttgcaacggccagaaagccacgttagcctagccgagctcctctgctcctctcgtggccgaacaggcagagcgaccagtctccagagcgctccccatggcgtcaggagctgcggcccctgtcgttcagaccctggtgctgaaggtggccatccactgccatggctgcaagaagaaggtccggaaggtgctcaggagcgtcgaaggcgtgcagaacgtgacggtggacgcctcgcagaacaaggtgactgtggtcggcaccgtggacgccgacacgctcatccagaggttgtacaagtccggcaagaagggggagccctggcagtgccacccgcccgtcaagaagagcgagcccgcgccggaggccccgccggctgcgcatcctgccggtggcggcggcaaggacgctgctactgctgcggccgcggtggacaagaagccggaggagccgatgaagaagccgcagggcgacagctccgaggagaagaagaagaagccggaggaggcggccgagagctccaaggagaaggagaagaaaccagaggagccagtgaaggagccaaaggccgagagctccaaggaggagaagaagaagaagccggaggaggccgtgaaggagccgcagggtgagagctccgaggagaagaagaagaagacggagcaggagggcggggccgcagagaagaagcccgaagcagagtcaaagaagaaggacggcggtgacagcaagggagctgagacgaaggccaagggctcagcagagccggcaaaggaagctgccgccgtccccgcccccgctgccgccgccgctgtcaatgacaaggccgaggcaaagaagagcgagaagcccaaggacgccggtaaggcggcggagccagccgccgtgacgacggagaggtcgctgcctgcgccgccggcgccggcgccaatgcccgcgtacgagcaggagttccgccacccctactacgccccgcagccggtgatgagctaccacgcgtcgcagccgagctcgagcgtgtcgtacacgtacttcgcgccgcagacgcagccggcgtactccatgcaacaggcacagccgcacccacaggcggcggcctcctactccgtgcagccgacaccgccggcgtactactccgcgcaggagctgcagccgcagcagccggcgaagcagtggtcgccgtcgtacctgtacatgccgtacccgcacgcgcaggcggcgccggagccttactaccagcagcaggactactacagcccgcccgggacgcacgcgtcgccgatgcacgacccgtaccgcatcttcgacgacgagaaccccaactcctgcagcgtcatgtgagaggcgcgagctggttggcgcggcccggccgctgccggccgccgtgggcagcgagtagtttggggggggggggggggggggaggcggcgccgcgcgctaccgcaacatcagagagagacgtctctgtggctgtataggtagaggtagagtagcctgttactgtttaccacccctcttccttccattccatttccacctagtatagaggtcaaacctcttctccgtgcagtgacggaaccttttcttaatttccatctttttactgttctgaatcaagtgattagaaagaacatgtaaattgtaacgagatacgttcatcaaaaaaa

SEQ ID NO: 20122 - DNA, 913 bp, Zea Mays
cagcttccagggcctcctcgcgctcgcccgcatcaccggctccaactccgatgagacacgcggcgcctgcaagaagtgcggccgcgttggccacctcaccttccagtgccgcaacttcctctccgtcaaggacctggacctggacgacgcccaggccgctgcacaggcagccgcgcaggccaagttcgacgaaataaaaaagaaggctgctgctggtggggacgcagatgaggcttctgatgacctcgaagaggaggaagaggacagcgattcctctgattcagacgtcgaccctgagctggagaagataattgctcagcgcgagcgtgccaggaatggaggacggaggcacaggcaggaagagaagtcgttgagccaccgctataggagcagcagcagcaagagaaaatcaaagcacacaaggagttggagaagtgatgatactgaggatgaagaggaggaaggcagaagaggcagggacaggaagaagaggtccagcagatcgaaaaagcatgaaagatcagatgaggctagcagtgatgactctgactcagataggcagagacacaggaagagcaggaagaacagatcagatgaggctagcagcgatgactctgactcagataggcataggcgcaggaagggcaggaaggacaggaagagaaggaggagggagacgccaatgtcaccgcaagcggagccatcaccaaagggatgcatctgactgtgacaaaggtggcagtgattatgcagatgaaaagaagcaatcgagcaggcggaggaggcaccgccagtcagaaagcagtgggttggatgaggatgagcggcgtgatccccgaggagcaaagcgatctgaggagaagaacagggaccgcaagaggagctaaagaggagcattgaattgtgctagttg

SEQ ID NO: 20123 - DNA, 2398 bp, Zea Mays
tatccggtggacgggacacgggaagagaggaggagcttgcttggacagccggtggactggtgctggtatatagatagctactagaggtaggcgggcgggcgggcggccaatgctgtcaggcgcgtagggctaggagcatgggcggagggggcgcgatcgtccacggcttccgccgctggttccaccgccggagcggctccacctccaatcagtcgtccatcgccggcgacggcgagggggaggcggacggcggctcgccggatctcgagatcgtcgatgacccggatctcctcggcctccgcgccatccgcgtgcccaagcgcaagatgccgctccccgtcgagagccacaggaaggactcggtggaaatggagttcttcaccgagtacggagaggcaagccagtaccagatccaagaagtcattggtaaaggcagctacggggtagttgctgcagctgtagatacccgcaccggtgagcgggttgctatcaagaagatcaacgatgtgtttgagcatgtctcggacgccacacgcatactgcgggagatcaagctccttcggttgcttcgtcacccagacatagttgagattaagcacatcatgctccctccatctcggagggagttccaagatatttatgttgtttttgagctcatggagtctgatctccatcaagtgatcaaggccaatgatgacctcacccctgaacatcaccagtttttcctgtaccaacttcttcgtgctctcaagtacatccatgctgctaatgtatttcatcgtgacctaaagcccaagaatatactggctaactcggactgcaaactgaaaatatgtgactttggtcttgcccgtgcatcatttaatgatgccccttcagctatattttggacagattatgtggcaacgaggtggtaccgggcacctgaactatgtggttcttttttctccaaatacactcctgcaattgatatttggagcattgggtgcatatttgctgaacttctcactggaaggccactatttcctgggaagaatgttgtacaccaattagatattataacagatcttcttggaactccatcatctgagaccttatctcggatccgaaatgagaaggccaggagatacttaagctgcatgcggaaaaaatatcccgtgccctttactcataaatttcgaaatgccgatcctttggctcttcgtcttttagagcgtttacttgcatttgatcctaaagatcggcctactgcagaagaggctctagctgatccatactttgcatcccttgctaatgtggaacgtgagccatcaagacacccaatttctaaacttgagtttgaatttgaaagaaggaagctggccaaagatgatgttagagaattgatctatcgagagattttggagtatcatccacagatgctggaggagcacatgcaaggtggagaacagattagcttcctctacccgagtggagttgatcggttcaaacggcagtttgcacatcttgaggagcattatagcaagggagaaagaggttctccactgcaaagaaagcatgcttctttaccaagggaaagagtggttgtatcgaaggacggtgatactgatcaacatattaatgaccaggagagaagtgcagattctgtcgcccgcaccactgtgagccctccaaggtcagaagacgacgacatgagcgatgtgaaatccacaagcttaagctctcggagctacctgaagagtgcgagcataagtgcttccaagtgtgtcgttgccacgaagaaacacccggaggacgatggaatcgctgaggaaatggaaggcgccgtcaatggattgtctgaaaaggtctccaggatgcactcgtaagcaggactgcccctggcaacagcaaccttgttgcaaggtttctgtctctggtacactgtattccgacgacagccttggaaaggcaaacactgtatgtcacacactagttcgactttacctgggtggaagaggaacacaccaccgcctgatggccctttcttcatcgtctgcatttccaccgtgtcatgccagcgctgcgtggcacctctagaaggtagaagccctgcatggattcatgaagaattcctaagatgtagcactagtcagtgcatggaggaaacatagtcggcctgtcgaccatgagatgttttcttgcaaatggagtctggacctatggttttcagttttattacaacggcttctgccgtaggaagtgtcagcagtgtatcatccctgtaatacccaatttataagagaccatataaaaggagaaaaatcatttgctttatgtatgtgtataacatatccacttatcatcacatgtgaatgccatatttaaagataaataactaataaaaagttataccact

SEQ ID NO: 20124 - DNA, 1088 bp, Zea Mays
actcaaaccactagttgtttatactttacaattttgcatacatagacatcaaaattaccttaaatataggttcagctttctcatggaaaactttacttgatctaccatgtccagatcgagggttcaatataacaagtactctttgcggagatttgcatttaatcggtggctggtcaaataaagactcactgaggggattttctgagtcttgattgatactagatgctccaaggcgaggtagtaagttaacatatatactttgttcagcaaagcatgtcacccacaaaatggcctcgtcaagggtagaggctataaagcagaaatctttctgaactctgcatgtctttttaaataaagactttttagttgagtatgcatgcaatgtaaaatgtttgactccagaattatatgatacctgccaaaatataagcagagacaaaatatcagtaaagtgatgaaaaagatctaattaataatacagacacatgttattatctgacttacagagacaacatcctccagtaggagtacagagctgccccagatcagagctttacttgtgagtctagcatcaattgcatcagcttttccgtttgacggtaactgattattatcactcgcacttctatttttcttttgaagaatcagctttccagcatacacttcataacctagaaaattggacctctcatctgccacgtcaattttgtggtcatgttttttcccttttttagcctctttgtcgtcaataaccaagtgtttctgccttgaagatttcgatttgcttcttttctcttgagcaccggtcaaagaatgctgtccagctgacttttgagaacgcctactactcgaacgtcggctagatttctgggatgagcttctagaagtaggattttcaagctcggatccatccatttctgactgttagatagcacttcagaacactgattcaggcaatgaattccaaatagcttcaggaatggaggaggcatcacggatccaacgccatatgagaaggtcagtataattaagtaaactgcagttaaaggaaacaattattatatgcaaatgtctggtacatatataat

SEQ ID NO: 20125 - DNA, 312 bp, Zea Mays
atgccaggcgccagaataattaggcccagccatttgttagatggcagctgggtgttagagaagttttaggaggcttatcctccctggagcttatctccttaataatctcctaagttgttccctggagcttatcttcttaataatctcctaagttattaggccccagagctataagggtgcctcagattgtaatagggttttttatcaaaagaagtcgcacctgtgtgggcggctgctggatcacggtggcgacccccacgcgccctggtgatcgtgttcctcagccgcctcgctgcgtgccctattccctgc

SEQ ID NO: 20126 - DNA, 1491 bp, Zea Mays
ttcaactcgcttctggtgaggttttcggacaagaccaaccaatagcacttaagctactcggctcagaaagatcgtttcaagccctcgaaggtgtagctatggaactggaggactcgctgtatccactgctgagggaagtcagcattggcatagatccttacgtggtctttcaagatgtagattgggcccttcttattggcgctaagccccgaggtcccggcatggagcgagctgcgctactggatatcaatggccaaatctttgctgaccaggggaaagcacttaatgcggtcgcctcgcggaacgcgaaagtcttagttgtcggaaatccctgtaacactaatgcgctgatttgtttgaaaaatgccccaaacataccggcaaaaaactttcatgcattgacgaggttggatgaaaatagagcaaagtgccagctggcactaaaagcaggtgtattttatgacaaagtatcaaacgtgactatttgggggaaccattcgacgactcaggttcctgatttcttgaatgccaaaattgatggaagaccagtgaaagaagtcattaaggataccaagtggttagaggaagagttcaccctcacagttcaaaagcgtggaggtgtgctcatccaaaaatggggcagatcatcagctgcatcgaccgctgtttcgatagtggatgctattagatccctcgtaactcctaccccagaaggtgactggttttctacaggggtttatacgactggaaatccttatggcatagcagaggatatcgtgttcagcatgccatgcagatcgaagggtgatggtgattacgaactagctagtgatgtgttgatggacgattttctctgggaacggattaaaaagagcgaagctgaattgcttgctgagaagaaatgcgttgcccatcttacaggagaggggaatgcattctgtgatcttccggaagataccatgctaccaggagaagtgtagtttagttacagaagcaacagcagcggaatgcatttgccaatacattagctgagacttgaaacatctgcttgccagatgcagcaactacttttatatatatatgtgtatattcaataattgtgccacacgaatttgactatgatgcaaacctcttacacaggtaagtcttttttttttccgtaaatacgagaaagactgcttcaaattcatgatctggtgattcagtgagataatcctcaccaatccgctaggcgtgtgccgttcagccacaacttgcattcatcgttacgttgtgaaccatcatgactcccatggaggatctgaaatatatatacatgattttgcactatcatcgccactgcaactagaagcatggcaaatgacatcatcacaccaatgaggcgattcgcatactattattaaatgctctctccattctaagttataaattatgttattaagagtcgaagcatcttaaatttagtcaacattatagaaaaaaaaatacaaa

SEQ ID NO: 20127 - DNA, 2205 bp, Zea Mays
tctcgagctagattacacaaactttaaactactcctatcttattagaaaccaaacttttcttttttataaactactcgtatataaaagtagagtgcaggtcatcagtttggagacgcagagctgcattatggccagcttctccttgaaaccacagcacaatggcagcagcagcaggatctaccatactatctgtagtgctactgcctccgaatggaggtcgctcctgcggtcccgaagcagtgtttcatggagctggaagaagcacacaaggttgcgattgcgatgctgtcagggttccaatgggggtgatgacagccgtctgagccaaaacaccggcattttccacccatcgatatggggggatttcttccttggttgctctagcagccctgaagaagctgctgcttcgtcccaacaaaaggcttggatggaacgatgcgatgaactgaaggaagaagtgggtcgtctgatggtagtagaagcaaactcaccattgcatgagaggctgcatttcatagacgcgctggagagcctgtgcttggaccacctgctgaaagaagagatcggtgctgcgctgacgcagatcgagaccgccggtgtcagtgacgactgcgacattgggaccgtctctctctggttttacttgctccggaaacaccgccgcagggcgtcgccagatgtgttcgtgaggttcagagacgcggagggaggtttccaggcgaacgatcctggggacctactgaggctctacaacgctgcgcatttcaggacccatggggagacaatactcgatgaagccatcgcgttcgcgagaagccgtctggagatgatgctgccctacgtgaaagggccattgttggcgcatgaagtcagatcctcgctggagatcccgctgcctagaagggtcaggatctacgagtcaaagtattacatccatgcgtatgagacaagtggaacgctgcatgagaaggtactgcaacttgccaagctgaactccaacgttctgcagctccatcatcagcaagagctgaagatccttacaagatggtgggaggatatgcagatcggatcaaaacttcctttcgcacgagatagaatcgtggagtgttttctatggatcttaggagtatactatgaaccgtgtcattcaagagcccggataatattgacaatggttatcgccatcgtgacactcttggacgatattttcgattctttcgcgaccccacaagaatgtgaaatactcactaattgcatcgaaagctgggatcccaaaggggctcaagacctcccaggttgcatgaaatttgctctagagaagatattggatagctaccagaccattacaaatatgctccaccgagaggacaagtatcgaatgacgtatctaagacactttacagaagatctagtgagaagcttcaacatggaggtaaaaatgcttcaaaaaggttacatcccagattctgttgaagagcatcttaaggtttcactcagaactggtgggtgtcccatcttatcatgtgcttgctttgtcgggatggatgatatagcaacaaaggatttctttgattggatttctagcgtacccaaaatggtgcgcgcactttctataattctgagactagcagacgatctccactcgtatgagcgggagcagctaatccctcatgtagcttccacaatcgacacctacatgaaaaagcacaatgtctcaattgaagtggcgcaggaaaacatacacaaactaaaagaagagtcatggaaagatttaaatagcgagtggctaaatccatgcaatgatgtgtatccaaagcaactattggagaggatattcaacttggcaaggacgatggagttcatgtacaaccaagaggacaatttcaccaactgccacaaccttaaggataccattcgctgcttgttggtagagccatataggatccacatttagtttttggcaacaaactaatgaattacagtgtccagttaatgtaatgcagagttatatgtcatccttatatgtgttagtatgttttctctagtgtatgtaatatggtgtcatctcatcctcatgtgtgtcaatcttcttttcatgtatagtgtcaatatgtacacatatatgtggcatcatttttgttttcaccctagagtttactcttgtcgtatcatttgcccttccttttggactttttatgttaaaa

SEQ ID NO: 20128 - DNA, 2413 bp, Zea Mays
gtttcttttcttccccactcctctcgtcgcgtccaataaaaaggggggaagagcattttcccttttttttgctcccctcccccctcgcttctcccgaatttgatgcttaaaccctcgccgggaggaggactccacgcgcgagcccgcccgcgccacctaccgccgcgcccggatccccgccatggccgccgcgccgcaccgggcccaggtccccgctgatagcacggctccgttgcagacggggcctgtacttgagaataacccctccaagagtgcaaacgccaaggaccagattctttctggtacagagaatgtgactacaggcaatgcacgtggcgctagctccttgagatcgccaaacggcccaccagagaaggctagctctgtcggaaaagctggagagcaaccttatctctaccagcaaaatgtgtatgcaccacagccacaaccactctatcctggaggatacatgaacccttcaggacaatgggaggaatatccccattatgtgaatatggaggggctccattccgtatctcccggaatctacaatgacaaccagtccctcatgctatctgctggatatgcaaacaacccccaaatgatgtatggagcatattctcctgtttccactgctggagatggccaacaatacttccctgtgcactattccttctcaaatccttactatcaaccaccagcttctcctagcatgggatattcaaactccgcaactggaatgtcccaaggagaccctatgctgcagcaagagtatttccttcctgatggccttctatattcacccacaccagggtatcatcaaccattcagctcatttgacagagcactgacacagccaaataatgctcctgggttgtttggtcaagggagtctaccactggcttctggaatgcatcatggatcgatgtatggtcctggatcctacaagggacgccagtatggtagcaaatttggtggcactactccaagttggagttctgctggccgcagatttggtactttcgacttgagtggcaatcaacaaagggggagcatgtcatttggtagtcataatggctctctggagtttatgaatgagcaaaaccgtgggccacgtgctacaaaaccaaagatacaagacacagagaactcaggagatgagaaaagcgagaaaactgttcctctaattgatagtgaactgtacaatcgctctgattttatcactgagtacaaggatgccaaattctttgtaataaagtcctacaccgaggaccatgtacataggagcattaaatataatgtttgggctagcacagccagcggaaacaggaagctggattctgcttaccgtgcggccagagagaaagaagagcattgccctattttcttgtttttctcggttaatggaagtggccaattctgtggcgtggctgagatgattggacctgtcgattttgacagaagtgttaattactggcagcaggataagtggagtggccagttcccagtgaagtggcacataattaaggatgtaccgaacaaccttctgcggcacatcattcttgagaacaatgacaataagcctgtcacaaatagcagggacacccaggagggcctccagatgctaacgatcttcaagagccatgaggctgagacaacaattgtggaagatttcgacttctatgagcagcgggagaaagccttgcaggagaacagacgtcaacagcatgctgccagcaccgatacccagaaactggtggataccaaggctcaagatgctgtggccgacatatcagatgcatttgccaaggccgtccagttgaagaatactgagaacagtgggacaacccccaaaactgagggtgcttcagctgaaaagggttccgctgccacagccaaggttgaaggaagtgcaaacctgaacacaggccctgtggaggaaagcagttgattcgtttcccttctatctgcaaatttggagcagcagatgaatagcatggtgcgatgtgaaggtcagaaaggggaaggtgtgttgaatatggtcgtgcccccgtcagttgtacaacatcataggctttcttttatggccatttaggttataaaatttcaatatcatagttccaaaattgttgttcccggttgtcttcgttcctgttctgttttgcttccgtcttccatgttcctgtgtcgtaccatgaatgatggttcaatttagtgggtttaggcataagaagctgcagaattatgccgcggtaaaagttgcattttctgcagctgaatgtgatactctgcactgtctccatccttgtgtaatttcagagatcctttctctagtgtatcttcgtcttgttgctttcaacatgtacagttctgccacattgcttcaaagaactcatgcatgaccatccgaatc

SEQ ID NO: 20129 - DNA, 1740 bp, Zea Mays
cgcacacggctcatataaaatgccggagccgtctgcgcattggactcaaagcgaacctcgccgccgcctcttccgtctctctcatctccgtcctcctgcaatctcacccctccctctaaacccgcaggccgcagtagcgccgctacggtttgctcaggattcgaaccccaccttctgattgctccgaatccgagaagtttgcggcatggcggggtacccggaggacaaccagcacgcgttgaacgggtacgacgatgaggaggtcgacgaggaggggcaccccgggcggcggggaggtcgggatggggcgtctgggtacggcgatgctggcggagaggatgtgaggggggcgggcggcgactcatcggggaagatttttgtcggaggcgttgcttgggagacaactgaagaatcattctccaagcattttgagaagtatggggcaataactgattctgtaattatgaaggacaagcatactaagatgcctcgtggatttggattcgttacattttctgatccatctgttatagacaaggttttggaggatgaacacgttatagatggcagaacggtggaagtcaagaggacagttccgagggaagagatgaataccaaagatggccctaagacaagaaagatcttcatcggtgggctacctgcatctcttactgaagatgagttgaaggatcacttttcattgtatggtaaggtgcttgaacatcagataatgcttgatcatagcactgggcgttctagagggtttggttttgtcacttttgaaagtgaagattctgttgaaagagtcatatcagaggggagaatgcgtgatcttggtgggaagcaggttgaaataaagaaggctgaaccaaagaaacatggatctgataacatcggtaatgggagatcaagccaagggggtggaggttaccgcagtacttaccgtggtggtggtggagctggtagtggcagcagcggcagcggtgggggtggttatgggtttggtgatgcttatcgatctgctgcagcgagttatggatatgatggtggcgcaggagcaggatatggctatggtagagggtatggctatggaggcgcatatggtgcatatggggcatacggtggtggttatggcactggtggatacggcagttatggtggagcaggtggtactggtggtgggagtacaggtgctcggggttcaagtaggtaccatccatatggaaaataagctacaagttcaatcaagttttctcggtgtcgggagtttctctggtcctcctagttcagttttcatgccatgtccacctaaacaggggcattggagcatagttgggttgaacacgtcaccaccggaacaattgtgtaactgcagctgttgagcctgcccgcctgccttcgcttgctgtacaagctacacatgaaacctgtgttgtattctttagttcggtatgcagagtttagaaccctgagaaacaagcattttatggtagggacagtatttggtccggtagaactatattctgtgctgtaacttgctgttgcaagttttaactgctgtccttgtccgtccggttgcacagaaatcgaaagggattaaaggagatcaaatccctttctatttaattttaactaggaagggatttaaggcctgtttggttcgctgcctaatttatcacattttactacacttgtgtctaagtttagtttttcaattcgaataattaatcttagacaaag

SEQ ID NO: 20130 - DNA, 683 bp, Zea Mays
atctttagggaaatatcaaaaataggcgaacttttggatctggatgtgtgcatggaaattttggacattctgtatgaaacggaagatacctcgttactttttaattgtccctgctcacttgctgcttccactcttgttgctgcatatgctatatcagttcctaagcaaacatgggagtttccaatccttccttgggtcaggtttgctacatcatacgatgaagaggaaatcatgaagattgttctgacaattctcctacatgtgcttaaactggatggtatcgaagagaagggcaagggacgttttgatgccagatgtttgtcgtgagtatgtgatatgtagagcacgagattgtgccccaattttgccttttgagttctgaagtattaaccatctaactgaccgtgtgcagcagatacatgcttttagaagacactgtagctagtttttgacaggcggttttgagattgagatgcccataatagttatgtgaactaaaactatatgatcaagggagtgcgcgtaagcgccttgcaatggaattctgtattggatgtattttgaagaaagatgcctgctaagtaatgccttcaggttggaattcaagtttgacataattatcaatgtaatgacatttaagctccttgagatctcaaatggaaggatgttgcattgccgccgca

SEQ ID NO: 20131 - DNA, 1591 bp, Zea Mays
ggacacacgcacacacggaagaagccactagctctccgcagtccgctctcgcctctcggccttctccttgtgccgccgaacaccctcacaagagtcggcctctcgatttctcagtccagcctcagcagtccccttccctccctccatcaggtgttgcctcccgcagatccaaatcggaattcggtccttcgtccccaaaccaccaatccgtcctttggaatgctacagggaagtgaagtgatgggggagtgcgaggacggcaaggagtacaggtgctgggaggagctgctgccggacgcgctgggcctcatcttccgcaacctgccgctgcaggaggtgctcaccgtcctgccgcgggtgtgcaagtcctgggggcgggtggtggccggcccctactgctggcaggagatcgacatcgaggagtggagccagcagcagggcaagccggagcagatcgcccgcatggtcgagctactcgtgggccgcagcgccggctcgtgccgccggatcagcgtctccggcctgccctgcgatccgcgcttctccttcatcggagacaacgcacgagctctccggaccttggagatccccaggagcgagatcagcgactccatggtggaatccgtggcgccgcggctgccgaacgtcactttcctcgacatcagcagctgcacgaagatgggggcccgcggcctggaggcgttcggcaagcactgcaagtccctggcggggctgcggcgggtgatgcacccgatcgacctggcggacagggcgtgccagcacgacgaggcgcacgccatcgcgtgcagcatgcccaggctgcggcacctggagatggggtacatgctggtggcgacggaggcggtggcggagatcctggggcggtgccgcgagctcaggttcctggacctgcgcggctgctgggcggtggacgacaagctcctgccgcgcgaccgccacccggggctgcgcgtcctgggaccccgcgtcgacgactgctacgagaacagctactgggaggagtgctccgacgactactcggacgactcctccatctactcgtgggagctcatggacgacgtcgacgacgactacgactacgccgccggcagcgacgacgacgacgacgaggccgtctgggacgacgacggccagggcctggagaacctggaggtcaggttctacggcggtggcttcggcgagaccttcgccggcttcgactggccgccgtcgccgtgacatgacacctgctgcctgcgcttgcgttgcttgcgtgggtgggtgagcctttgtgtgttgtccccaagctttggaagcttgctgtgctgctgtagtactgtgcctgcgacatcactcgatcttcctctacctcgcagatatgccatatgtgaagcgaactgctagtggtgcaatctaaaatgtagacgctggtgtttacatgaagcaatccccatcagcatgcaccggtgagattccaccggtgccaatccccatccatcctacctactactagtcatagagagcggggcagggtacccctgtctcctgatggcttctttaatgtcatgcgagcaaacatggcagtgcaagg

SEQ ID NO: 20132 - DNA, 3395 bp, Zea Mays
cccaacccagctctgcccctctctctcttaaaccccccaaaaccaaaaattaaaatccgccttctttcttctcccccgactccctcttccggtaagaatccggcccgccgccgccgccgctagcgtcgccgcgctcgctgcttctagggctgcgccttctcgcgcctccggtgccttccctgctccccacgatcccctgcctccacaagcttccttcacctgctcactccaaccgctgccgccatggcggagaagctcagggatctaagccagccggtagacgtgacgctcctcgatgctactgtcgctgccttctacggcaccggatctaaagaggagaggagcgccgctgatcagatactacgtgacctacaaaacaacccagacatgtggctacaagttgtacacattctgcagaattcccagaacctcaacaccaagttctttgcattgcaaatacttgaaagtgttatcaagtacaggtggaatgcattgcccgtcgatcaacgtgatggcataaagaattacatatctgatgttattgtgcagctttccagcaatgaagttacctttcggcaggagaggctttatgtcaataaactcaatattattttggtgcaggtactgaaacatgagtggcctgccagatggtcatccttcatacctgatcttgttgcagctgcaaagagtagtgaaactctatgtgaaaattgcatggctatattgaagcttctaagcgaagaaatttttgacttctcaagaggtgaaatgacacaacaaaagatcaaagaactgaagtcgtcacttaacagtgagttccggctcattcacgagctatgtttatatgtcctatctgcaacgcaaaggccagagctcatccgtgctacattggcgacactccatgctttcttatcatggatccctgttggattcatctttgagtcaccgttgctggagacattactgaagttcttccctatggctgcttatcggaatcttacacttcaatgcctaacagaggttgcagcacttcagtttggtgatttttataatgtgcagtatgtgaagacatatacatttttcattattcagttgcaggctattcttcctcctgaaaaaatcccggacgtatatgctaatggttccactgaagagcaggcgtttatacaaaatcttgcactcttcttcacatcattttttaagaatcacatgcgtatactggaaacaactcaagaaaatattgctgctttgcttatgggtctcgagtaccttattggaatttcatatgttgacgatacagaggtttttaaggtgtccttggattactggaatgtatttgtattagagctatttgaagcacacaatcaaatggaacctgcagtaactgcgcagatggttcctggaatggtagatgggggcacagctgttaaacagaggagacagctttactctggcccactctcgaaactacggatgctgatgatttgccgtatggcaaagcctgaggaagtacttattgttgaagacgaaaacggcaatattgtacgcgagacaatgaaagacaacgacgttcttgttcagtacaagatcatgagggaaacactgatctatttatcccatcttgatcacgaggacacagaacaacagatgttgaagaaactaagcaagcaattaaatggagaagactggagttggaataaccttaatactctctgttgggctattggatcaatatcaggttctatggtagaggagcaggagaatagatttctggttatggttattcgtgatttgctaaacctctgtgaaatcacaaagggaaaggacaataaagctgtgattgcaagtatgttgttggtcagtatccaagatttctcagggctcattggaagtttttgaaaactgtggtcaacaaattgtttgagttcatgcatgagatgcatcctggagttcaggatatggcatgtgataccttcctgaaaattgttcaaaaatgcaagcgcaagtttgtgacacaacaggtgggcgagaatgaaccatttgtttctgaacttctgtccaaccttgctacaaccatcgccgatcttgagccacatcagattcatacgttttacgaatcagttggccatatgatccaagctgaatctgacaacactaatagggatgaatacctcaagagattgatgagccttcctaaccagaagtgggcagaaataatcggacaggcaagccaaagtattgatatcctgaagaaccaagatgttatccgatcagttctcaacattctacagacaaacacaagtgttgcgagctcacttgggccacacttcttcccacagatttcactaattttcttggacatgctaacagtctacagaatgtacagcgagcttgtatcaagcacgattgctgaaggaggaccctttgcctcaaggacgtcatttgtaaaactcttgagatctgtcaagagggaaaccctaaagttgatcgagacttttgtggacaaggcggaagatttgccacatataggaaagcagtttgtaccaccaatgatggatcctgttcttggtgattatgctagaaatgtacccgatgcaagggagtctgaagttctgtccttgtttgcaacaatcattaacaagtacaaaggggaaatgcttgaggatgtgcctcgtatatttgaggctgttttccagtgcacccttgagatgattactaagaactttgaagattatcctgagcaccgcctcaaatttttttctttgcttcgtgcaattggcacccattgcttccaagcattaatccagctttcaagtcagcaattgaagcttgtgatcgattcaattaattgggcgttcagacatacagagagaaatattgcagagactggccttagcctgttgttggagatcttgaaaaaattccaggcttcaggattccaaaaccaattctacaaaacctactttttgacaattgagcaagagatttttgcagtcctcacagacacattccacaaacctggtttcaagcttcatgtttcggtgctgcaacacttgttttgtgcggttgatggtctaacggagcctctatgggacgcgtcttctgtaccttaccaatatacggataatgctatgtttgttcgagattacaccataaagctcttagggacatcatttcctaacatgacagtaaccgaggtgacaaagtttgtagatggtcttcttagttcaaaacttgatcttccaagcttcaaaaaccatattagagacttcctggtgcagtccaaggagttctcagttcaggcccttggcgccaccagcagattggcgacgaattctgttcctgctgctgccttgtgtttacaagtgattttgtcttgtgatggacatgtcctg

SEQ ID NO: 20133 - DNA, 2375 bp, Zea Mays
agattcgtcactgcggctatactgaaactgggtcaagcaatcttggatatcatcttgagctggaaagcaagaagaaacatgtctcttgttgttaagctacgatacatcttgaagttactatcagctgcttcttgggttgtgattttgcctgtaacttatgcatacacttggaagaatccaactggtcttgcaagagcaattaaaagttggcttggtgatggtcagaatcagccatcattatacattttggcagttgtgatttatttggcaccaaacttgctgtccgctacactatttcttttccctgtaattaggagagctcttgagagatcaaatcttaaagtcgtaacattcataatgtggtggtcgcaggtagtattgattaatctaaaacttatacagcctcgcttatttgttggaagaggaatgcatgagggcgcattctcccttttcaagtatacaatgttctgggtcttgcttttggccactaaattggttgtgagcttctatgtggagatcaaaccacttgtgcagccaacaaaagatataatgaaggagccaatacgaacatttaagtggcatgagtttttcccccatgcaaataacaacattggtgttgtcattgcgctttgggctcctattattcttgtctatttcatggatactcaaatttggtatgcaattttctcaacgctaattggtggtgtctatggggcttgtcgccgtcttggtgagataaggacattggggatgttgagatctcggttcgaatccctgcctaaggctttcaatcaatgcttgattccatctgacacaagcaaaaggagaggattccgggctgctttctccaaaccttctaagacatctgaggataccagagaacaagaaaaaatagccgcaagatttgctcagatttggaatttaattatcacaagcttccgtgaggaagatttgatagacgacagagagaaggacttgttacttgttccatactgcaaagatcgtgatatggatataatccaatggccaccattcctgcttgccagcaagattccaatagcattggatatggccgcagatagtggtggaaaagatcgtgatctaaagaagaggatgaaatcggatccatattttacttatgctatcaaggaatgctatgcttctttcaaaaacatcatatatgaactagtgatcgattcacgagagagaggttacatacaaaagatcttcgatgcggtggatgagcacatagcagaagagactttgataaaggagctgaacatgagtaaccttcctaccctaagcaagaagttcattgagctgcttgacttactggaaagtaacaacaaagaagatcatgatcagatcatcatattgttccaagacatgcttgaagtggttacaagggacataatggttgaccagctcagcgaactactggaattgatacatggtgcaaataataaaagatctgaaggaatgacatcacttgaccaacaagatcagttgttcacgaaagctattgattttcctgtaaagaaaacccaagcatggaatgaaaagataaaaaggcttcgacttttactcacggtgaaggaatcggctatggatgtccctacaaacctggatgctaggaggaggatatctttctttgctaattctctttttatgtcgatgccagatgctccaaaagtgcggcaaatgttgcccttctctgtcttgactccttattataaagaagatgttcttttctcttcacaagcactagcagaacagaatgaggacggagtttccatccttttttatttgcaaaaaatctacccagatgaatggaaaaattttcttgaaagggtgcattgtgagagtgaagatcaactccacgagactgagcattctgaagagcagcttcgcctttgggcatcataccggggacaaactttgacaagaactgtaagagggatgatgtactacagacaagctttagtccttcaggcttcccttgatatggccagagatgatgaccttatggagggttttagagcagctgacctgttatctgaatctgatgaatcaccactattgactcaatgcaaagctatagctgatatgaaattcacatatgttgtatcatgccagcaatacggtattcagaaacgttctggtgatccacatgcacaggatattctgagattgatgaccacttatccttcacttagggttgcgtacatcgatgaagtcgaagagcctagcaaagacaaaaataagaaaatagagaaggtttactactccgcattggtgaaggcagcagtaacgaagcctgatgatcctggccagaaacttgatcaggtgcacaacagctgtcagagctgtggcgg

SEQ ID NO: 20134 - DNA, 1889 bp, Zea Mays
cataacttggagaatctgcttggattggggctcgtgagcggcatgaattgcagctgataattggacgaaacaggggtttataaaaatcttctgcaggaagtggctcaaagagttggggcgccattgccattgtatacaacagagcgatctggccttggccaccttccggttttcacatgcacagtagagctagctggtatcacatttgcaggtgatcctgctaagaataagaaacaggctgaaaaaaatgctgcttcagctgcatggtcagcactgaaacaattggtacgcgaggaggtgaattcatccaatgagccagaaaacattgatgagcaggagcagatcaggatcgcccgagccctcctcaattatcgcttgaaggagaagatggcgatggccaactaccctcatgtttcaccattccccaagaaatttcccatgcagcaagagcggaagccttgtttgggtcaatcttgtcaatccagccactcgaagattctccctttattccgccctaaacctaattcaagaccaaagtcgccagcatccaccgacggtgtgtcgaaaacgcctgggcggacggttgagagcctagtagatcaaagtcccaggtcaagatttccagctgcagaggcagctccctatgtgccagttgggcactaccgccgtataccttgccataacatggctccttccgtcacaattaggaccgctgttcctgtcttctctgctccacctctcccacctccccctgcacgcctgcagcagctccctccactcatgagccacccaccgcccattcggatggcatccccagtccgcatgaggccagcgccagcctctccaatgtttgcctcctcatctccagttcaagtgccgaaacctgtgatgcctgttcagctgaaggatgtgcaagatcacccaaggaaggaagcagttccacttccacctgtgatccctgttcaggtgaaggatgcgcaatgccgaccaaggaagagctccatgtctcccgtgattcctgtcccagtaaaggacgcacagcgccggcctgccgcaatcccagtgcagatgaaggacgtgcaaacccaagccccaaaggaaccgctggcagctccaattccagcagccaggccttcagttatgaccgacacgcctgcccaagtcaaggaagcttcagctggtgctaccagcgaggcgccatcgtctgctactggcaataacgctgctgtggaatgcagtgcatcatcggaaactgtcttggcaaggcaatctggggctgcggatgaggacacgctggtactaatgcggaagctaagcatgaggcccgaggctcaatcagcggcagaggcagccaccaccatgcggttggagaccaattgacttgatataaaaaaaatgcgcgccgccatcttctcccagattttgtaattatagccgcctcccgtgcacatccccgttctgttttagttcttgtatgccttgggtttcggattagggctgtctgggcaacctgcattgtggttggtaggaaggaacacctagtttttttttttttttggtctgttgagaagagagagagagaaaaaaaacaatgaggtggtggtggtaggtggcttgcccagtgtttttagttggagacggttatacttccctggacatgcagttggtctgcttttttttacccccaatgatgaggcgggctgtgcggtgcctctagggaaggaaggattctgatgaggcggcagttacatctaacttattattgtcggtctgccgtaaccatgttcagcttttttctctctctcccagtagtagcaccatgcaaatgatggtgcattagtggctggctggtgtagtatgatgagaggtttttttttcctttctctcta

SEQ ID NO: 20135 - DNA, 2301 bp, Zea Mays
gaagtgaggatgacattgaagacatccaaaaggagatatctgttttgtcacaatgccggtgcccatatattaccgattattacggctcttatcttcaccagactaaattgtggatagtaatggaatacatggctggtggttctgttgctgatcttcttcaagctggtcctcctctggatgaaatgtctattgcatgcattctgagggacttgttacacgcaattgagtatctacattccgaaggaaaaattcaccgtgatattaaagcggcaaatatcctcctcactgaaagtggagacgtgaaggttgcggactttggtgtttctgcacagctgactaaaacaatgtctaggaggaagacatttgttggaactcccttttggatggcacctgaggttattcaaaattctgaagggtacaatgagaaggcagatatctggtctttaggtatcactgccattgaaatggctaaaggtgaaccccctctggcagatattcatcccatgagagttcttttcatcatacctcgtgaaaatcctccgcagcttgatgagcatttctcgaaaccaatgaaagagtttgtctcactatgtttaaagaagaatccagcagagaggcctagtgccaaggagcttcttaagcatcgtttcataaaaaatgcccgaaagactccaaagcttttggagcgaataagagagcggccaaaatttgcagcaaaaagcatggatgccacacaaaatgggcaaacacatgatgaagaggaggattttggtacaggcactatcaaggtcaataggacaaaagatacagctccatctttgagtcaaggaacagttaggaaatctgcagtcagagatttttctgatagatcagagggcacaggaactgtccgagttgtttcaaggcctcctcaaatcgcctccacgaaggatggtagatctgatatgcctcaaagtccaaaagcaccaatacgcacagctgatcgagaaaatcagtggaggtcatcagggactggatctgaagaatctctctctctcagagatactcagagcggacgagggagagtagaaagttctactgatgacaatgatcactctgtaagtgggtcaggaactgttgtgttacgctctccaagagcatctcagttgtactcaacagctagcaaccacagtgccaagcctcccagcagattctcctcttatgaagatatgtctaatagtgggacagttgttcggacccaaaatgaagacccagaaactccacgatcttcaaggtcaaggctggggatccaagaaaaaacatcaaatgctcctcttgaggatagtgccattaaccttgcagaggcaaaggctgctttgcaggctgggttaagaaagggaaatgctcgagaaagaccttttatcaacaggcatgaaaagggatcacatgagcatagatcttctggagtaaatagtcaagaggttcaaagcgaggatgtggacacgcagaaaggtcacaaattacggcaattacctgatgggcagtcagcctctcgtgctagttctgtagcttcacctgcagtctcatcattgctactcccttccctgaaagaggctactggtgacaagtttgatcggcctgctgttcatgccttccttgattccttgatggatttagaacgtgatatacctggatcatgcgaagtactggttggcagattgctacaccggctagggagctcaaaggattcctcattgcaaggtcttcaggagacggcgatgtcaattttcactaaggaacctgaacctccctctgaaaaagcaggcgacaagaagttagctaatatgccaccattggctgctcctaccgtgagcccactggcaaggttccttctcacaaggtggcaaaaccaagtttctcaagatcttaactctgtttgatccctgcgatgcagaaaagtgatttcatgttcgattcggtgtataattaatatttttcagtgtacataatgcaaactttagaactttatttcatccagtcggtctcaaccacctgttatttcatttgttttgttcatggcgaatactccctctgtccccaattaaaatttgttttacaattaatgtatgtgttgtatatatatgtttagtttcataatcatccatatgaatatggatgtaaaaatctagagctagtacgagtactatttttgggctagtttgagaacgtcattttccaaggattttcattttctcaagtaaaattagtttattttttcttaggtcatgtttttctctttattttgaggaattggaatctaac

SEQ ID NO: 20136 - DNA, 546 bp, Zea Mays
ggactaactcattcctcaaccaaacacccttaatgccctagagaaacgatcaaaagacatcgcaaacaagacgttacttgaagagggtgtgctgcgccgttccacacgtgtccgggcccagccaaaggacaatccgtccatggcattcctcaagtatgtcaacaagtggagggataactgaggtactctgagctatgtaggcttttgctcggttaggtcgttgcagtgactcgccatactcatggctggtttactgacacctcattagctagtgaaacctgtatcagaacctacttttcttctctctctttttttttttaaattttaacttagctttcatgtgtgttcacaaatgaacccctcccccccctccgtaattgaactatgctaggctttaccgtttttagaacagtggccaaattttttgcatggatgatgtaaacgtgacaaggccggtgtggagatgcttcgatctgcaagggtgggccgcgggccaatgttggggatttttgacttaatactactgccttgaattttttagcacca

SEQ ID NO: 20137 - DNA, 5504 bp, Zea Mays
aaaagaagcacatatgccatttgtctcatgcattatcaagtgacgatatatccttaatgcccctatgtcctaataaaaatatggagccaaatgatgaatcggcaccaaattatcaaaataccttatgatctgctgaaaaactatggaattcacatctttgacttcaatgacttgtatactttgacattgattttggatttctatggcaaaatactttatgatcagctggcaagctaaggaattcacatccctgatttgtatacttgacattgattttggatttacatggcaacataatttctccatctcttatgtcataaatgactgactaatgttgcaaagaatggattttaattgttaccgttttcacatgaaaattccctgttgcattgtgggtacttttgaagaagccacagacattgaagaatcctttgttcaacacagttatagagaaaaaattggtacgccatataggaaagggacatggcagaattttcaccttagtcatatcttgtatctttgatctgctcttcatatttacatttatatccatggttgaagttcattataaagtgtacgaggatgaaataatgaccactggccagtgtttgtctgaaatgaattcccaatctttctagttcactgggtggtgctatatctgatgaaacagtctggaaggatgatgattggttagccaagccaaaggttacttgcatgcgtgccttttctgatctgcaacattcacaatctgtactgtgtactccatgcccactagtatttaactacatgaaatcaccggcatttgtcatcatttatctggatgacctttgttctatagagacctgtgagaaccacataatgccatagaggtaatgtcgttccagagtttagccagagtttttagcaacagcaaaacccaaaacccatatgtaggatatttagaaacacggatggggaaatcaacatatattttattaatcatctacttccatgtgatgtagaagttcccttgcagttcctctctctctctctctcagaccaagagtcaaataagagcttacaacaaattaatggttgcaatgaagtttaacagttcagttatgaaggcctgaagattactgttgattgaagcaacactgttacttgacagcttcttctgttgcttgtgtttgcgctccattaaaatttggcattctttgacttgcctatatatttctttaattcaagtaaaagtagactatatgccccctcgttgaacagataagatgactgcatatcgttttattaagaagaaaggtctgaaacaggaagaaatcccaaaccacattcacacccacaacactctagaagactagaacatactttttctctctcgaaaacacaggagagctgcgcttcattatttaagaagcagcaaacaaggtcccaaaatgggccagcacaaagggtggcactttacagtagccagcacctgacatagacaaacttatccataaaaacacgtcacagcactcaaacacctaaatcaggcccatatcccggctaactcagtagccccagcaagggccaattcctggcatcctctccgatatctcgcagcacctgggacacatccgccacgccttcttcgaagatagtaattgcgatgtttccacaaccaccaagccactaaaatcaccacagaattgaactcatttccctgcggtttggggactcttctctctgcttgattccaccaatcctgaaaattgacctccctgggcattgggctaaggtgctgtaagttgattagagaaagaacttgaaaccagacctgtctaccaaacgcacaggccaccaacaaatgctgaactgtttcctctttctgatcacataacaggcaaagttcaagatgctcaagtcctcttctagcaagccagtccacagtccagcacctattgaggctcgcaagccaaatgaaaaacttacatttcggagggccccaggttttccaaacccttttagccggtttaaaggctactgaccctacgaagaacctttcatatgctgacttggaagagtagcacctggaagcagaaggggtccaaagatgcacgtcttgtacacccggagccaaattgaactcatttaggatgacctagagctgtagaaattccatctacgtttgagcattactgcacctcttatatgtctgacaccaacaaccattgttcatagtgtcctgtactgtttgtatctgctgaaccttactggggatgagcttgataagagagggtgccaagaccgacaaggattgcccatggagccacctgccataccaaaacgtgctgctagcaccatctcccaccgcagttacaagcgaagcagtgaacatagcaagaccagaacatactgaaaagaaagaccaaaagcaacatgaccaaaactaccacactattgcctgtgcccctcctaaaggtctcccaataagcttcaggaggccctttgctctagctgagtaccaaaggatgcactcataagttacagcttgcaacaccgttgtaaggcttggagtagagccgttaaaaacacagttgtcctgtcccaagccaccaatattgccagtgaattgaaccccttctgtagtccattgttacctctttaactgcctggtaggctggtaccactagcttgagaatctatgggttgatggttgggctgcaatggagacaaaagcaattttctgcaacctgcaaaatggtgaactagattttccaggcgaaaacacatgaaatcaataggtgctgtgtggtcttctcttcttcatcagaaggggcaagcagctgggtgggaagtcctcttttagtgatccggtccgcatttcaagaacggttctttactgcaagccaaatggagagcttgcagcaaagaggagcccaggacttccaaattcgtttccatggagcaaagcggatggaactaaggaaaaaggtattgtaggccgactttgctagagtaagaatcgttcctagtaagcctccaaacaagctgatcagcatcattctgcttcagcgagaaaccttccatcaagtctcataagcggagatattatgtaagaacctggacagagagctcctcttatgtcagctacccaacgatgggggtacatcacttgatgatcctcttgaattccctagttgatcatttttcagtttattgccaaatctagctgtgttcttgtggctgtgaaattatatctcccatgctgatacttgattcccttatctttgcttcattactacaccacagtaatttggatctgccattatgttactatgtaactctcatttgatatcaatcacagctgccacatacaaaatacaagtatgtttatctagataagatcttgattcatcaatcaccactgatctgagttttcgccactgcgatgcgaggaaaagacagatatctaataacatcttggtgaagatgttcttaggtcctttgctttctcttcaagtcagcttcctttgatttcattcctcaaactatcaatcacaggctgcagcacgtgtaatccgcatcggttcaagaacagatttcatgcttggtgatattttgcatcctgcgataaattgggctgataaagagtctcatctggatcctgatgaaatggccaagatgaagtctgcttttattggtaacctgccagaagatgttaatgaggagtacttgagaaagctttttggacagttcggtgaggtagtacgggttgctatctcaagaaaaggacaatgtccagttgcttttgttcacttcgccaaacgttcagagcttgagaatgctatagaagaaatggatggtaaaacggtgagaggacctggtcgagggccgtctttcaagatccaggtgtcagttgctcgacctacggcagacaacgacaagaagcgatctcgtgaagaagtgagaactagaagatcaaatgcatcaggagataggcgagattattctcatggaagatatggacacgattcacttgatcgtcaagtgaaagctccaagattatctaattatgtggccgatgctgctgacccctatgaatcagctgttaattcattaccttcagctgtcaaggaagtcttgcttcgaattctacgtctaagaattggtactcgatatgatattgatatccattgtgttaaaagccttgatgagcttcctgagtcatctgctcttgctgtccttaatcagtttttgatatcaggtggagacaaacacaacaaaggagattattttgcatcgttggttgctaaggctgagacctttggcttaacacatgcattacacggtaccacttatttgtcaagaaatccggaaatgcatagcaagcgatacccacatgaagattatgattttgtgacacccaggagcagtaggtacgattcgtcagcccatcatccttcaacatactacgaagacgatccaccagtgtctgagtcaagggttagaagatatgctgaagaaaggtccaccattgtaagaagcccagaaccacgtccgcgatatgacgaaacagacataagaataaacccagaaccaagattaccatatgaatcaagacacaacgccgaaaagcatctcgatcgaagatacatacaagagcatagttcaaatattgaaagaccagctgaagaagctctcctttctagggaaaggagatttctgcctgctgcagggtacatgccgaacccaggcggctcggatttccgctccaggtcgcccgccgaatattcagcacaacgccaacaaatgaggtttgatccattcacaggtgaaccttacaagtttgatcccttcacaggggagcccatcaggccagatccgaaccagcgccgctcaggaagcctgtactgatcagattagttggagcgatatgccagataagaccctgaaacaaagctagatctggataactcttcttcttgtctgccaagtgtctctgtgattttgcttgtgggctacagatcatgtaccccgagcaccatgtgtgatccagtcggactaatcatttcggcattgaaaagtcggactaactttttttgtgcccataacgctacgtattgtttggtagattaattaaaaattcatccggtgaaaagcaattttctggtatttttctggaggtgcagtaggcgtggtaatgcagaatttcaactgctacgtacactgcaagcgctgttttacccgattcgtctttacgtgttgccaaatgtttcattgacttcatagaactgatttcgactactttggatgctgagcaagggaccatgcctttctcacatatactcatctggagaatgtcaagcaagacggcccatctggacacatggcaagaagagataaactagctagctgcctcccaatgatgctactaccttctcttcgactgcttcaacgttcacatgcccctcccttgcatggcgtagtaaactgggttgcttgaaaaaacgccacttctaagcgta

SEQ ID NO: 20138 - DNA, 2249 bp, Zea Mays
caaaaattggctgcatacagcgaaatgcagaaaaccatcaactgatttattattcatcccctgttgaacaattgaaatcttatctgatgaatctaccattctatccctggtgactttggttatgaataacttggcagttacggtttacgagaagggtgctgaagttgtcagaatgtacaagaccatgtttggagcatcagggttccgaaagggcatggatctttattttaaaaggcatgatgggcaagctgtcacttgtgaagacttctatgcagccatgtgtgatgcaaataatgcacaactgccaaactttttacaatggtactctcaagcaggtacgcctatagtcaaggtggcatcttcatatgatcctagttctcagacattctctttgaaacttagccaagaagtaccacccactcctggccagccggttaaggagcctatgttcatacctgttgctgttggacttgttgactctactggaaaagatatgcccctcacttccgtttacagtgatggaagtctccaaacagtctctactgatggccagccagtcttcactactgtgcttcagtttaaaaagaaagaagaagagtttatgtttaaaaacattcctgagaggccagttccttctttgttaaggggatatagtgctcctgtccgtctagattctgatctgagtgagggtgacctatttttcttgcttgccagtgactcggatgaatttaacagatgggaagctggccaagttttggcacgtaagttgatgctcagtctcgtagctgatttccagcaacagaaaacactggttctaaatccgaaatttgttgatgggattagatcaattctgcgcaacacaagcttggataaggaattcattgcgaaagcaataactttgcctggtcaaggggagattatggatatgatggaagttgcagatcctgatgcagttcatgctgtccgtaactttattaagaaggagcttgccgtgcaacttaaagatgatcttcttgcggctgtgaaaagcaacaggagttctgaggcttacacatttaaccatgatagtatggctcgccgtgcattaaaaaatacatgccttgcataccttgcgtcattgaatgagccagatttcgttgagcttgcactgcatgagtacaagtctgcgactaacatgacagagcagtttgctgcattagcagcattatcccaaaatccaggccaagttcgtgatgatgccctcttggatttctataacaagtggcagcatgaatacttggttgtaagcaagtggtttgctcttcaagctacttcagagattcctggaaatgttgcaaatgttcagaagctgctgtctcaccctgctttcgacctgaggaatcccaacaaggtgtactcactaatcgggggattctgtggctcacctgtgaacttccacgcgaaagatggttctgggtacaagttcttgggtgagatcgttttgcagcttgacaagataaaccctcaggtggcctcccgcatggtttcagcattttctcggtggaggcggtacgacaagaccagacaagctcttgctaaggcccagctggagatgatcgtgtcggccaatgggctctccgaaaacgtgttcgagattgcttcaaaaagcttggcggattagcttgggcagttccgaggaattgcgagtgggagtgcttaactgaatctctcttttgttggtaaaatgacaagtagagataataaacaggcgggccgaatttgcatgaactgataaaatataagtgtgatgatgcccgctttgtggggggctttggagcatgcatgcgcgctcgtctgttggaatggaactgctgtttttttttttttacgttctccgctcagcggaccgctgtggggcagaaaacatctgaagcacgacggctgctctctgtctctgtttctctctcgaactcgcggtttggttatcagtcggtcctgtggaacccttggcttcgacaaagctggaaaagtttggagctttccagtcatgccaggttcttctagcacactccagcaagtaggagcaagtgttctttttggctggtttgttggcaccgtatttcttttggtttcttaagttttctaacaaaatatttattattggtagattttgttgaactgtagatgcacagagtcaggcatgtgaagtgaattgacagcattggttggggatcggagctacatgccgaaaccgattggacctctggtgg

SEQ ID NO: 20139 - DNA, 773 bp, Zea Mays
tttgtttacgtgcctcatcttcattccttatcctgtacacgtcaagtctttggaaggaaatttctcagcgtgtagcttcatcttcccctccgtgctcggcgtctctggcatgctggtcgaccagcccgtgactccctgcctccctgggacgccgcacggctgcaggccgcggagcagtccacgccaggggcagccgaggaggcggctgggcgaggaggacacgcacgcgcagggcatgctcgtcaagttcggcgacgtgctcgacgtctttgctttcacttgcgtggccgtgctgaagctcctgcaccgcgtgggcatgcgcgcgctctcctctgtgcgggagagcaggctctcttcacgccacgcgcagggcaccgtccagcgtcgccagtcgacttccgccaccttgccggtctggccatggatttccccttctcccctgcgagctccaccagtccgacccaggcgaccacggtcaagtccccagctcctcgtctttgtgcatcgtcgatcgtcacaggccgtcgtgggcgctgccccgccgtcgcgcccggggttttagcacatctccctgctccgaccaatttcgcacctcgccgtccatggagccgatcgtcaccagctcacgcgcccagcttcatgagctatacgctcgcagccaacttccattggaggcgattttggaggtccagatttcacaaaatacaagggagaggttttggtcttcattttttggaagaaggtggataagaaaggttgatttatgttttttt

SEQ ID NO: 20140 - DNA, 1803 bp, Zea Mays
atcccctatatagccgtgcaggtcgtcttcttcctcctctccactcctctcgtctccgtctccatctccgtctccgtctccacaccgtgccgtagctgctgctgtccgtgtccctcgcctcgaagaagacaactccaacactgttgctgcgtgactgctgaattcgctccacacacgcgcgaacccagcaaggcaagaacacgaacgagagagagagagagacagggagggatcatccatccatcagaccatcacccatggacaaccttaaggagcagcggggccacgatgccgcgggcgccaacagcggcgtctggatgacggtgccggcgttcggggactgggacacgaagaacggcgcgctgccggactactccatggacttctccaagatccgcgagacgcgcaagcagaacaagaaggagctctcccgcgccagcctcggcggcgacgacgacctcttcgcccacgcccacgcccacgcccagaagccgcaggccaacagcgcccagcccaagctcggccgcccctgccccgccgccgaccgccgaccgctccacgcccgcgaccactccccaacggtaaatctccgtgtcccggcccgtttcgttccagagtcactaaaatgaacttgacccatcttttctttcttcatttcttttgcgtggaaattcgggatattacatctcaaattcgtctcgtcttagttggattttacaagcgcggggggtaataattagtgtcggggattgaacttgctaattgcgagtgaccgcaagtacaaaagtgttaccttagtccggacaagccagattagcaaagctgacagcggagtaaaaaaaaactgtaactggcgaaaccagtttttttttagtgtagcattacaacacgcagtaaaatcgcctcgccgcttcagtaggcagcatcacatactgctgtccttctgaagcagattcttgagatggcataatggttctggaggtttagtttagaaaactagcgcatatgggttttccagtaaatggacgcatcaagccaagaaccacccattccaactccaccattgcattattatattttgtcgtaactgataggcaaggacgaatcttcctgtttttttcttaatcatactgtccatgtctacacgccttcagaaagctgcgcggatgtattgacgtggcactgtccgtaggaggatcttagggaaactgatgatgaggtttagccagttgaggggataagcaactgtccaggctgttgctgtgatatatcacaaatagcagaatggctgaagaagcatacttttaactgccaacaactacagaacactttgcatcagttcattgggttctccagaatgccttttcttacaccgttgcttggagggaagaagttcctgagctacttccagtgctgtatcaaggcctgaagaggagctgccgcaatgctatgtctgtgtgcctgtgctttgtcgcagcagaacactcgtgagcaattaggtcccggctttgttaagtatccaaaaaatgtgcaatgtatttgccctgatggtcactcgtttgacctgttagcctgtatgaagaacaagtcaggttatggggccaggcagccgtctatctgtacatggcaccatcgatttgtttgcgactggtggtataatgttgccctgtaatcattgtattggatgggaatttgcaccgcctccgtatttttgaacgatcacaaggggcatggttcgtttggattggttttgtgattacttatgatgggaaaatacggaaacaacaaatggcccctggaaca

SEQ ID NO: 20141 - DNA, 680 bp, Zea Mays
ccgacctaaaggaaggagaacagaagcaggagagcacaacgttacaaggacgcatcgaggagactacctacggccatggcgaggagaaggcttctcgcgctcgcctcccggctctacgggaggcctcaggcgacgcagccgtggcggcgacccccgccccggtttctctcctcagctgcgtccggcaccctcgatcacctgaagtcgccgcctttcgcgcgtccggctgcccggaaccccgcctcctatccatgggatcgattcggaggagggcagaagaggaccatgttcatccagacacagtcgaccccgaacccgcagtcactcatgttctatcctggaaagccagttatggagattgggagctctgatttccctaatgctcggactgcgatgacatcccctttggctaagtcgctttttgctattgatggagtaaccagggtattctttggatctgattttgtaactgttacaaaatcagaagaaacttcctgggattgcctcaaacctgaggtttttgctgcaataatggacttctactcatctgggcaaccactttttctggactcaaatgctgcagcttctatggacacagcaattcacgaggaattgcttaaatgcttcttgaatgtgttgattcaatcctgtatgtgcactggttggtagaaataaaagga

SEQ ID NO: 20142 - DNA, 1653 bp, Zea Mays
caccgcaccaccatccgcctcgctcgcactgacagacaggcaggcagagagagagagagagcgcgagccggattgattgccgagggcagagcagcggcagagggagcagcaacagcaacagtccacgaccgatcgcccggcccgcgcgcaggcaggcagcagccatgaaccacctgacgccggcgctccacggggcgatgcggccgccctcggcgcaggggcaggggctggcccggtacggctccgcgccgggctcgctcctggccgccatcgccgactccgtcacccgcggcgaccccgcgccgccgccgccgcccgtgagccggttctactccgccgagtcctcggggctcacctcctgcgactccagctgccgcaccgactgcggacgcccgcccctcgagcgggcgtacggcggctccggcgagatccgcgtgccgccgccgctgcagcagcagcagcaccacctgctggctccccccgcggcctccccgctgttccgccacagcagctcccccgccgggctgctctcccgcctcatgaccgacccgcacggaatggcggcgagcggaggagcgatggggagctacacgcaggcgggcagcgacgccgcgctgggccccggccacggccacggccacgcgcagctcagctcgcagtggagcttctccaggcaggacctgccgcagatctcggagatggggatgataccggccgacatcggggagagcatcgtgggcgccggcgggtgcaacagctccagcgacgccgcgcagtcctcctcctacctctccaggaccttctccgtcggctcctgggacgacaccaactccatcatgttctcgtctgccccctgcaagaagcccaaggtggaccccgccgccggcgccgacgacatggtcaccaacttcagcaccattgacccgcagttcggcctgtccaactcgtccctggagctgcccggcatggacgactacctgcagctgcagcaggactccgtcgcctgcagagtgcgtgcgaggcgtggctgcgcgactcacccacggagcattgccgagagggaaagaaggacgaggatcagcaagaggctgaagaagctgcaagacctcgtgcccaacatggacaagcaaacgaatacgtcggacatgttggaccttgctgtggagtacatcaaagagctcaaggaccaagttgagaagctaaaacacgaccaagcaaactgctgttgcctaggcaacaagagctgctgctgatgctggagaagcagacggaggagggtttttacgccgtaacaatgtgactgttaaaccagagctgttgcttcaggagaccaggccgcgggcagaagtgcgtgacatgtggagcggcttccatgactcagcttcctcttttcttggttgttccacggactagcgaccggggtgccaacggcttgaagactaggagataacaagtaggacgatgttgtaatttagttaccgcgacgcggtggctctggctttcgtgtaaagaagtcctccctttcaacgcgactgggattgttgttgctggtaaaattgttgtaggaatatcatctgtgctccatttttcatcgagctcatcttttttttttagctcaactgattttctgactcgggtgacgagttttttttt

SEQ ID NO: 20143 - DNA, 6117 bp, Zea Mays
cctttttggtgtgatttctggactcacatttgagcttttaaaacctcctcttcctccgcacctgttcacccctttcttttccgttcttctccgtaccccaatcactgctactcaacagccaactctttcgcaaccaaatatttcttctggcgttttggggtttgcaaaccgctatcaacattggagttggagcagaatgtgatctgtccaattcttctcttgtcttatttttggcgtgctttgctcttctttccccctatttcctgaggaggggttcccgtcttaatctcttgcgtttagtgtggcttcgaagagttagcagctgccatggcacataatgtgtgggaggcggacaagatgttggattcctacatttatgattacctgttgaagaggaacctgcagaacacggcgaaggcattccaagccgaaagcaacgtgccttcggctcctgtttcgattgatgcgccaggggggtttctcttcgaatggtggtcggttttctgggacgtcttcattgcaagaacgaacgaaaaacattccgattctgccacttcttaccttgagtcaattaaagcacgggagcagcagcaacaatcgcagcaccagatccagacgcagcaactcttgctacagaggcatgcgcaacagcatccgcaagagcagcagcaatggcggcagcagaagcaacagcagcgcagcgaaaacactgattttccaactagtgcccagaatggtactgttgctgctgatccaccagcgcgacaaaatgatacaactgcaggtactttatctgcaaaagtatttgaggatagaatgaaaattactgttcagagggacgtttcagaagagacttcaatgaagcaaaggctcactgaaaccatttgcccattactggaatcaaacccaacttcaatgctaaagtcacctgcaagatcatctctagcttcagggccaatcttccaaagatcagctgggggcatgtccggttcattacagcaagctcagttcaggagccagccacttctgggatcaacacaggatattaaggcggaaacaaatgtagctttgaaccagagagctgcaggtgcagatggatcactatttggagtaccaggctctaatcaggcggggaacaatttgaccttgaaaggatggcctctcacaggattagaacagcttcgatctgggtttctccagcacaaatcttatatgtacccggcccagccattacaacaccagctccagtttctcactcctcagcagcagcatgctctaattcatgttcaagcacaacaaaatgccacttcacctggagacatggataacagacgacttcggatgctttttagcagccgaaacttggttcctgggagagatggtcaatcaactggtttcactgaaattgttcccagtgttggccagtcattgcaaaacatgtgcttacctatgcagcgcactgagacagatatgctgatgaagatagctgctctacagcaacaacagccgagtaacaatctgcaacagctcctccaacatccattactgagtcagcaacaacaaagctcaacttatcttgaaggtgagcaggaaaaaatgggtgctggaattgtaacagtggcttttgctggaaatgaacaggtttctaagaatcgaaatgggcgaaagcgcaaacatcctatctcctcgtctggcccagccaatagctctggtactacaaatactgctggtgcttcccccagttcaacaccttcaactctttctgcacattctcccggagaaacaatatcaacaccattgcagcaccaaaatgcgagctcatgtacgactttagttgtttatggttctgagggtccagtaccaataggatcgccgaccaatcaacttgttgatatggatcactataccgaggatgactccatggaagataatttagaaccattcttgccgcataatggcacaaatccaagagctgctggtagccattgtatcagttctggaaaaggatatatccttagagaggtatcttcagcccaagcaagcacaagcagtgttctgtgttgtcatttctcgtcagatggaaaattaattgctactggaggtcacgataagaaggttttcctgtggaatgctgacactctgaaacaaaaatcaatgctagaggagcattctctgctcataactgatgtgcgcttcagcccaagcactcctcgcctcgccacatcttcatttgacaaaactgtgagggtttgggatgctgataaccatggttattcaattcgtacgttcactgggcactcagcatctgttatgtcactcgatttccacccgaacaaggatgacctcatttgttcttgcgatggggacaacgagatacggttctggagcatcaagcatggaaatgctgtccgaattttcaagggaggttcgacccagctgagattccaaccacgttatggaggactccttgcaacggcttcagacaatgtagtctctatcctggatgtggagaggcaagcttgcgtgaggagatttgagagccacactaagggcgtcgattccgtgtgctgggatcccaccggcgagtacgtggtgtctgtcagtgaagacacggtgaaggtgtggtctttgaacgacgagagcttcgtgaacgagcttagctgcggcgggagaaagttcagttcgtgcactttccatcctacgtacccatccttgcttatcattggctgttaccagtctctggagctgtgggacatgtccgagaaccggagcatgactgttgcagcgcacgacagcctcgtctcggccctggcatcgtcgagctccggcctggttgcttcgagtggccatgacaagtatgtcaagctgtggagatgagcttcgactttcctgccctggcatgttaagtacggttgtggacgcgccccaacccttttggcaccattagctatctgcttgcattgcagtagcgctcaggagttaggatggtgactcgaccgcctgactgaacatgtgtccgctgaagtagcgtgcagtaaaaccctgaagaagtgggtttagcgcctagcttttgtataggaaattagaacacgggttatgttaagtatccaatgtctgtcactaccttgacatctgacatggcttgaaagcttttgctgctgcaactcggcttccgaaagggatcacatttctgtgctcgtgggtggcgtgtgtggtgtggtgttgcgtacaagacaagatgcaaggctagaaagataacggcagtcccaacttagaagaaaggaacccttgtagcccgtgatgcctagctaacgcaacgagattcccgtgttcaattctaattcgcacgtaggagtagcagatctgcggatctgccgttccgattcctctacgaggaagaacagctatgcctccggtcattcaagatctgtggccttgtttgctatgcctgcgtcgaatcatcttcttcgtctgcagacttgttcgagacgccaccctcccccgccgcgcgccgccgcccgcggacatggatctccttcgctctcatctccacaaggtccggatccccgagccaaccaaccgcatccacaaggacgagtgctgcgtctccttcgacactccgaggtcagagggaggcctgtacgtggacatggtctcgttcctggggttcgggagggagtacgtggagtggaacttcgagaagacggggaaccccgtgtacctccacatcgttcagcgccggaagccggagcccgacgaggcggatcgcccgcttaagaagcccaccctcctcgctataggtgtggaaggaggttttggtgatcaagaaccagaatatgatgaaacttttgaaatagtcatcttacctgattttatttgtcttccatttccgtcagttgatttgccagagaaggttaggcttgcggttgataaagttttacttgctgaaagtgctgatagaaaagaacaactggctgcttgggttgctgacaaaaagaacattagtgcatatgctatggacctgcagcagctagacaatggtgttattgtgcctcctactggatggaagtgtagcaaatgcgataaaactgagaacctctggctgaatttaactgatggtatgatcctttgtgggaggaagctctgggatggaagtggtgggaataatcatgccattgaacattatgaacagactaaataccctcttgcggtgaagcttggaacaattactgctgatttggaagcggcagatgttttctcgtaccctgaagatgatagtgttgaagatccgctattagctcagcacttatcacattttggtatcgatttttcttcactccaaaagactgagatgactactgctgagagggaacttgatgctaacacaaattatgactggaatagaatacaagaaagtggaaaagacgctgagcttctgtttggacccggctatactggtcttgcgaatcttgggaatagttgctatatggcttcaataatgcaagtcatgttttcaatccatcctttcatatcaaggtacttcgagaaacagagtttgaaagctgcatttgcaactgcacccgctgatccaacagtagacctaaacatgcaactgacaaaactagcgcatggtttgctctctggtaaatattctgctccagcaaaggaggggcaagaagggatacgttctcgcatgtttaagtcagttatcactgcgaaccatcctgaattttcaagcatgagacaacaggatgtccttgaattcttccttcaccttattgacagagttgagaaggcaaaccctggagaccgtgagctaaatcctttttccggtttcaagtttgttgttgaagagagggttcagtgcccttctgggaaggtttcttacaacaaacgatctgacaacgttctttctttgagcataccactgcatgaggcaactaataaagagcagctagaagcttttaatgagaagaaagctgcaatgaacttggatggaaaagaagtgtctaatgaggatattgtcaggcctagagtcccattggaggcatgcttgtcaagtttttcagggccagaggagattccagatttttatagcactgcattaaattcaaagactaccgtcactaagacagctggtttcactacctttcctgattaccttgtgctgcacatgcgtaagtttgtaatggaaacaggatgggtgccaaagaaactcgatgtttatatagatgtgccagatacaattgatatcacacatatgcgcagcaaaggattacagcctggggaagagctgctacctgaaggaggttctggtgacgacagtgccgagcctgctaatcctgttgccagtgaggatattgtaacccagcttgcaagcatgggcttcaactaccttcattgtcagaaagctgctattaacacatcaaacacaggagttgaggaagcgatgaattggctcctctcgcacatggatgatccagatataaacgacccaatatcaaaagattcacgtgcttatgagccatctgttgacgaagcaagtgttcaaactctcatctcctttggattccaggaagacattgccataaaggccctgaaagcttctggtggtaatatcgagaaagctacagactggattttcagccaccccgaagcatctacctcagcatctgctgattcttccactagcaatgtaaatgctgatgacacatatattccagatggaagtggcagatacaagctgatggcgttcgtgagccatatgggcacctctacccactgcgggcactacgtagctcatgtcctcaaagacgggaggtggacaatctttaacgacagcaaggtcgcagtatctgttgacctgcccaaggaaatgggctacctctatttctttcagaggattagcaactaggcacgtcacacacaatggaaagaatggtgggctgttaggatactgtcttgctgattttaaagcgaacgtttactcacatcctgccatgctggttactgaatggtcaaccgggatatttgcttttttgttccttgagacctcgattggcatcttccggttacataagaacaaaatcgcaatgaaagaaagtagacaataagaca

SEQ ID NO: 20144 - DNA, 5036 bp, Zea Mays
gccaggctggcctccgccgtggaccatcatcacccacgggaaacaggcgccgtgttaatggccgccacaacggtaaacgttacccttgccgaagagaagggaaaatagcagtagcgcccggatcccctctccttccctccagatcacaccactgccgcctccgcctgcaaatccatttctagactcaagctgttgctgcgagcgagctagggttggtgctcaggtctccagggtttcgcctccccgctcccggtgcccatcgccttggaccttggcctgccgggttagggttgggtcgcagctgcgggggccgtggggcggggatgcggccgatgcggcgatcgcgggcgatcgggaggctgtagcggcggcggggcagggtatctcttgggtggattctccggcgatggccgcagacgcactatccatcatcccgggcgccgtgcttcgcaacctctctgacaagctctacgagaagcggaagaacgccgcgcttgagattgagggaattgtgaagcagcttgcaacgtttggggagcatgagaagatatcagcggttatctcgctgctcaccaacgatttcacatattcgccacaggcgaaccatcgaaagggtgggttgattggccttgcagcagttactgttggactcaccagtgaggcagctcagcatctcgaggattttatggagttgtattgttgcatcagttgaaatggatattggggatctggaagaaagatcaatgagggagattgcaaatatttttcattgatatgcaaattgtacctcctgtgcttacttctttcctggaccaagatagtagagtgcgttactatgcttgtgaagcgctatacaacatagcaaaagtggtaagaggggatttcatcatctacttcaacaaaatttttgatgctttatgcaagctttctgcagattccgatgctaatgttcaaagtgccgctcaccttcttgataagcttgtcaaggatatcgtaactgagagtgatcagttcagcatagaagaattcataccgctcttgagagagcgcatgaatgtgttgaacccttatgtaagacaatttttggttgggtggataacagtgttagatagtgttcctgatattgacatgcttggttttcttcctgattttcttgacggtttgttcaatatgctgagtgattccagtcatgagataaggcagcaagctgatgcagcactttctgagtttcttcaggagataaagaactcaccagtaaggctgctgctctatactgttagccatttaacagcttagacgttaaaaacattgtgggatgcttattcctttagttatccttttttattttctgtatactcttaaaggttgtgagatgttagtttggaaggtggaatgatacctttcggtatttagtatcaatgctatagagagacggggatattgatgaacatgttagccatagaatcaaagcagagtggatgaagttgtgtcaagctcaagcatttgacattctatgacaagagggtaccattttttttccctctcgaacacgcaggagagatgcacatctttatatattagagagaacgaaagaaggtcttacaagaagggagaaaaaacctgctatgcaggaatccccagaaaaacacagacccttagagctattacatgtttgttacataattttctccgaccacactaagggcttcggctaagcctaagctttcgggatgtttggttccagctagcacccagcgcgccaactcatctaagaaacctctctggaccttgccgatggaggagaatcaccctcaaaaaccacccggttacgctacagccataaacaccatgcacctagtataatggcactattaaggcctttcttgtctttatgcactcggttacaaactcttctccaccaatcaacaaaagcgatatcctctacatcaggggagagatgaccaagcccgaaaggagataagaagctgtgccaaaattgctttcggatgtgggaggcctcaaaagctaaaaggcgagttttataggatgacgattagacatgctatgttgcttgatgtagaatgttggcctaaaaaaagacgacaggttcagtatataagtgttacagaatgcttatgttacgttggatttatggccatacaagaagggatcaagtctagaacgacgatatatgtgataggctaggggtagcaccaattgaagaaacgtttgtccaacattggttgagatggtttggacatgtcttcatgagagaccttcagaggcaccagtgtatcctaacttcctaaggcatgatagtaatgggaagagaggaaggggaaggccgacgttgacatgggaagaggcagtgaaaggagacttgaaatgatggaatatatccgaagatttaaccttgaataggagtgcatggaaaacaactatcaacgttcctgaatcttgacttgtggcttctgttgggtttcaactctagtctaacctaacttgtttgacactaaaaggctttgttgttttatacttttaaaggctgcgcatgtcaagaaaacctatggccattacattaagaagaagacctcacgtaagtcgagaaaacccttgaacccttgccccatccatacacagtgacactatagtccatgtgagaatgaccgcgactggggccgggccttagacctatgctttggcgtgggacagacgatgggattttttaaccttagtctaaaattcgctcccatgggcagtcgaactcaggacactgaggagtgctactcagaccacaaccaaaaccaaaatgtagattatggtcgtatggctgaaatactcgttcggagggcaggctctactgatgaattcactcggttgacatctatcacatggatcaacgagtttgtgaagcttggtggggaacaacttgttccctactatgcagatatattgggcgctgtcttaccatgcatatctgacgaggaggagaaaatccgagtggttgcacgcgaaacaaatgaggaactccgtgctataaaagctgatccagctgagggatttgatatcggagcaattctttcaatcgcaaaaagagaattgaacagtgaacatgaggccactcgaatcgaagcattgcattggttcttcactttgctggatcgatattgtgctgagttcttggcttacctgaacgatatttttgatccactcctaaatgcactttctgatccttcggacgcggttgtcctattagtattggaggttcatgcacgcatagctgaagaatctcaccacttccatcatcttgtatcctacctgatccgcaccttccacaacaaccattttgtactggagaaacgtggtgctttgatagtccgtcggctctgtgttcttctaggtgctgaaaaagtatatcgagagttctccactattcttgagagtgaagttgatcttgatttcgcatccgtcatggttcaggttttgaatttgattttgctcacatcaactgaacttggtgagctccgctctcctcttaagaagtcgttagtggattcttgtggcaaggacttgtttcagtctttatatgcttcatggcgccactctccgatggctacgataagtttatgtttacttgctcaggcatacaatcacgcaagctgtgttattcagtcactgggagaagaagacataaatgtgaattttttggttcaattagataaattgatccgtctcttagagactccagtatttgcttacttgcgtttacaggtaacttggtctgataatccgttcctgcaaatttatctttctgtttctcaggcacatttgaattccgaaacttggagagttctacctggcttttttaatttgatttctagtgctacattaatggcatgataagcctggaccaatctttgtctcatgctgtttatctgtagttctgtacatttactgtatgctcgccttttggtacaatgtttccagactattgctatcccctaatgattccacattcagtttggatgctgtaaaactaacatgttggggtttatgtgacgcaacatgatatgaaaactgtgatgacttgttggcaaaaaaaaactctagtacagagacttttgttgttatatcttcttactgatcattttggcatggaaattccacaacatgctcttaaaaatctgcagcttctcgagcctggaaaacacacttggcttctgaaaactctttacggtctcctgatgcttttgcctcagcaaagtgcggccttcaagatcttgaggactcgactgaagactgtgccattcagtgaaaatcttaagcgcacatcttcagcgaatccatactctcagattctgcaagtgacggaagatggcaatagaaaccaagatatgcagaactacagtgcaatcaatttcccattccttctccagcaatttgagaacatgcagctgcagcatcgtaaccatttgaaggatcaactgcaatcccgtaaatctgcttcgactttaacattatctcaggagatacaaagatacgaagaagcgcattcctcatcgctgtcagagattaacaggcccccttcaagaacatccaaaggcattttatgatgcatttgttcttgcgatgtatgatatatttgccggaagcatcaccacatatatgttggggctttggttagtctcctcgttttttttcaaaggaggttgcatagggtacatagtgtaatcttttctatttcgttcctagattttgtcaagagatggcaattatttgttggagaaagctcgttgccacattctagtcattcttttcttagtggtttcactgctcatctggtttctgtaatttttcaattgaaggccaaatgagcaaagtagtaattggagatagaaatatgttactactgtcctatctatcgatctccaataaattagcgttgcaatgtaaattcctgttggctcgtatgatatatttattatattatttatatgccttatctttacccccattttatattattacaatatcgc

SEQ ID NO: 20145 - DNA, 1951 bp, Zea Mays
accagtagatatattatttatagagtttagttgaaaatacagcggaggacagagagtgtggaactgtggatcgtacaactcaaagactagcaaagaggtcaggtgaccggctcaccgctcggagtcgcggcttcagaaatcagaatcagagcacctgcctctcttcagtttgttgccgtctctctctctcctcttgacgcaactcctctcctatcttctctctctccatcgctccctcctccgcgccgcgttggcaccgaaccctcctgtcatggcaaggccgccgaaggaggcgattgataccttcatcagcatcacgggggcggacgaggccgtcgccgtacgcaaactcgaggaacatggtggtgatcttaatcgagcaataaattcacatttcaatgatggagacagcatattgaacggaatcagtcaaaacgccatgcctgctagtcgtgatgatatgatggacctggatggaccacttgataatacatttcaaagatctttgttgccagagagtttccgtgccccttttgctctaatggatccaaatttccaggaccaattttttgacagagttggctccactgatggtgtcattcgtgaaccgctagtttcacatccaagagaggtgagggagatacctatcgaagttaaggatggtgatcctcaaacaggttcatctggccaggatgttactggaaatgagtcttcaaatggccctgaagtccctgaaactatcataattgatgatgtggacggtggattgttatctgcaccatctgttccacatcctattattcctagcaatacatctactgtgccaactgctcctccattggttcatgttaatgactatgatgaggacatagaagaggaaatgattcgggcagcaattgaagcttcaaagaaggattctgaaggactggcaaatatagtcgagcaaggaggccagcatcaagaggaagtgaatttgagggaccattcttctgataaagcaggcatggaaaccgcaaatggaatagttgagaggtgaatgttaactttactacccacctcttcactcaggctaccctactacagtatcatttgattccttatacatgcaatttccttttggaggcaaggactagcttcagaaaaggctggaacatctaggcaaccaatagatgacgagagcttccaggaggaggctgaagatgtagaagaacagccgttagttaggcgtcgttctcggcgtgccccttctgaggacaatgaattaccaaaaatagtgcacccaggtgctagccctgttctgaacaatcaccagtataatggagatgatttcccatctgagtggggtggcatttcttctgaggaacatgatgaagctgttatgcttgaggctgcaatgtttggtggagttcctgaaggaccaacatatcctttctctatgccttctcacagaacctctacttattatcccccaatatctcattctccatcaccagcattaactgaacagcggttattacgagagcagcaggacgatgagtaccttgcatcgctacaagctgatcaagaaaaggagttaaaggccctacaggaggctgagctccgtcgccttgaagaaacagctgcgagagaagctgttcttgagaaacagaagcaagaggaggaggaaaggcgtaaaaaacaacttgaggaagaggaactagagtccagtctcacttcgaagcaagcatcattaccaccggaaccgtctccagacgcagagggtgctgtgacagttgtagtccgaatgcctgatggtagtcgacaggggcgccgctttctcaaaactgataaacttcagttcctatttgatttcttagacattgggaggacttgcaagccagggacctacagattgttaatgactggtgaccaggcagctatccttgtttgaaagtccctgatccagagttca

SEQ ID NO: 20146 - DNA, 1476 bp, Zea Mays
gtacatgaagctaaagtgataagtttcatactggtgttaccatgcaagcgctccggactgctccaccagacatgcaattaaaggacaagtttttagtacagaccacagttgttccttatggcacatctgatgaagaactcgttcctgccgttttctccaaagaaactggcagatacatcgaggaaagcaaattgagagttgttcttgttagttcataccaatccctcgaagagcaacccactaatggaattcatgacactgagccagctgttgaagttcctttactgaaagagatgccaaatttagggagcgaagtaccagatgttgcaaaagaaattcctgcccctctggtacaaggtccagcaattgtgaccggaataccttcacctgtcaaagaggttccaggcctgagagaaattcctgtgccactgaacgaagcaccaactttattggcagaatttccttcccctcaaaaagatccctctgctattacagttgaacatgcctctaatgttacaattgagcatgcccctgctatttccattgaatccccacctttgaaacaaagtgttccagtttttaaggaatctcctctgaaacaaagcgttgcagtttttaaggaatctcctcctttgaaacaaagcatttcagtttttaaggaatctcctccactggaggaaactactcctaaagaagctgttatgctaagtgaccgagggcttttcaatgtgcagaatcatcaattatcccatgtaacagaagatgttcagaatatgaaatcaaagctcaacaatcttgaatcaaaattggaagaggctgaaaagatgataataaggctaagagaagagagcagaaataccacccaggagcgggatgagctacagcaagaaatggtattcctaagaaagaagggaaccgcaaggagtcaaatgggtttccccctgctctttgtggtgtacgtggcgcttcttggtacctgtatcggttacctgctccgcatatgagttccaaacttcaaaaaagttcagcagatgggatatgcttcgtatgtgggcaagacaattgaacggcagttgcactccaaaatgttgaggggtgaatttattagcattattagttcggaacttcatatggttttgcacataacagcagtgccaaactaccatctgcctgtatgtatagaacagttactttttttcgcgttttatagaacccacccaaaagatgtctgctgcctcgtagactaacctgggattcttcttccatctacctaagatttttttttacactttactggattcgcttgccctgaatcggtattggtcttttgtgtaactatttttacacctggtttcgttccagtctaatatcctggcctataaaggcacaaaacagtgtaccaaaaatccaagaaagtcaggaattcatggttgcgtagttcgtgtcaagataccaagatgtagtaagagccagtct

SEQ ID NO: 20147 - DNA, 176 bp, Zea Mays
ctgctagggttaatccactggctctcctatatagaagcgcggcgagagctcgcaccgccgccgccgccgctgtcgcatcacaggcctctcttccggtttccccccaaacccgtccgagaggcagtcatcccgccgcgatgagggccaaggatgtagtgcttgtgatcattttggag

SEQ ID NO: 20148 - DNA, 1458 bp, Zea Mays
gctctgcatgagaacaggagacagcgtctctcttgtgcttgccccgtggccggcgctagctccgatccttcgccccggttcggcctctcccggcgcctcgggtcatgcccacgagaccacgagctacgcgccgcagacggcagggttccggagccaatgtatgctgctgaggcggcaggactctagcagctctcctatctcataccctattccaaacaacactctgtaaaaagtgtaatgtgacgcccgacgcgcctggatgccgaatcgcctggatcgagacgagtctgggatgagcacggcggcgcctcctcctggccagcggtgagcgtccgtgctgtgaggaagacgtcggcaacatgatgaaggcatgacgctcaacaggagactcaaagataagtctggtttgtgttggtattatttcatttcctctcctcttctgatagtgttttatacgctcctaatctgggcctaagtaccagatctattacaaagctgttaaccctaatctgggccagcccacaatcaccatgtaaaatcgctaagaattcaaaccaatccaagtacacaaatgaaacaaagctcattactactatttcctactgatgcacaccctgatccatgacatgtaatgacaggccaagggcctgcttgaatgcgctgcacctattagcgcctggcgcggtagcaattagttaattactagccacacattgcttccatttgctcctccgtggctgctgattgcagaagcacacttttgcagttccatgcggactgtccttgttgtcatatcatatcccaattgacgatctaatattacatagaacgccgttatgaaccctagagaacttcagcttttgtgtagcgggactgcaaacaacatatgttttgccaccgctaccaattccttatgctttacattcgatccctaactctgcgcatgcaactttgtaacttacagtcacacgatggcaaaacagcatcatctgcatccatgcatgggtcgttcgtcgtcgtcactgcctctcctgctggttccactcgagtattgccgaacgaagggccctgttcggcacgagaaggctgcgctcgaggtcgagattcgtcatgggtgatgtgctatgcccgctgtcaagccagcccctaatagcttcaccctcataagtgaatccatccgctgcaacgtaagggtctctcatgatctcctggccaccatcaaattacagccatgagtttacccatttcaatgtatttaggtgttgtttggttcacatatttgtaacgtgaacgtaactcatgacgtttaaccatgtttaagtccaaccgtaatcagataccacactaggaactaataccggcctattcaaacttgataccactaatactctactgtgaatcattaccgctgtcatttatgttacatttgatgaaccaaacaacaccttagtgtcgtta

SEQ ID NO: 20149 - DNA, 150 bp, Zea Mays
tttaggaccgagaggtggtgatcgtgcaagtgatgtggtgccaaccacaagatacagttggtggacaacccaaggaaggatggacttaaccagtggatgctcgccaagcgagtgccatccagcaaacactacctaagtgttaaattaaag

SEQ ID NO: 20150 - DNA, 820 bp, Zea Mays
ctaaatgtccatggtggtggacatagctgcttttgggagagtgatgaggcaagactaagattcgaacggaagaagttctgggagaaggctgtggggatagctgatctatgcggaaaggatgatgcatggtggggtgttaaaggttacatgagggacaatttcaaccatagcaatatggccatctcgtacaaagagcattttcagaacagcaggctcgtggaatctgtgttggatatgtattgggagcttcctcctgttgccggcccatccttaacacaccaaacaaggtatgacccagcacgtacagttgacccaatcatcgaagatggtcgctacggcttgttccgaaagaccggtctagcgaggttggatgcctcggtgttcaatggttacactcagatggcatatgtgcagatatcaggttcaatgttgagcacggacgatgtttaaagattttttgtgggtgagcttgtttcgtttttggccaactgttgataggctttttgtacaacactgatgcgcttctatgcttacttagtttcttttaaccttccagaaattaatatttaccagaccaccttccaaatatttatgagggttgtgtttcttgggtaaggtcacttttctgtgaaatttggttctgaataatcacatgtacttctagggcctgcgctacatgcctacattacattagccaaccaatggcttgtgtgctcttgtacggatgtgtgtattatattcagaagtcactagtaccaaccttgtacaatatctacataaccactttgcttttgataatagcaatctaaaaaataaagag

SEQ ID NO: 20151 - DNA, 1277 bp, Zea Mays
cccgtcgtcctctccatttccttctgtctgcttgccctcaaaccctagcccgtaccggcgtccaccttcgcgcaccctcgcctcaccaaacacccacggcgcattggcgcttccacctcttatcgtacgaaggcgagcggctttcacggtgtctctctgtcgcatgcaatggcaccgctgtttgaggggcgcccaacagctgcctgcccacggcatgctcaggggcgctggggtcccttgccgctgtccctgaagtctagcctgggttgttgatcttgccgcagatgcggtactccattacttctccgcccgcgccatcatttcggccacacctcagtctgttggtcggtcgcagatcccttgccccgtcgagcttaatatgcaatccgttgcttgtgaaggttgtggcttccttgggtgatgcttatttgagaacatagctgttgtgctctgagcatgtcctgtgtgcctgtcatggcggcttcttttggcgacatcataccaacatattcaatgtcaggctttaaaggagtgagctggtttctatattttaactgatgcaccttgatgctttattgagcggtgtctatgaaatgatttggatggaaggctatcctatgctgctgatcagtacttaatggatgggagaagggtcagacctcagataagtacctaacttgctatttcctatttttttatcacttttattgatgcccaattgcatctaaagtgttgtccacttctattgcagcagtgcttgaggattcagtgatcagcagatctgcaaggacaaaaggaccaaaggagtgagctggtttttatattttaactgatgcacctggatgctttattgagcggtgtctatgaaatgagttggatggaagattggagaaacgcccatgggcctggcaaactgtggcatgtggctttgaactttgccaattggagacctgatgtggatcattttgggacgcgagttaagccccctgtttggagtgccagaaacaaaacagatggagaagggaaaaaggtgtcaggggataagagccagcgcctgatcaccgttttattcgtttttgagtaaactgtagcgagcaacaggtagcctataattgagacaatgctgaatggattgtagaaaaggatctgctttaatttccgttaatttagcgccttcagtgatgttcctagttgctggagtacatgttaagtatatttaccatttaaatcctcccaccactctcgcgtagctttataaaaaagctcttaataaacca

SEQ ID NO: 20152 - DNA, 433 bp, Zea Mays
gccacgtaggctagctgatatgttgctggcaccatgcgaggacaccttagctgcatgtcaaacatgtcaggaacaccttgccccatattcaagtatttatagggcatggtccagtaaagaatactccttgcccatcgagctctaaccaataaccactgcaagggtgaagttgttctggtgttccagccagtggtcatccaagtgcccacctcgccgcggtcaagcaatcacaagcgattccccagctgtacagtgcaagtttcgtgttctccttagaacacctagacgaggtggtatttaaagaagtctactccaatgcctgctcctcaagtggatgaagccatctaactgggtattggatagagggatctagaaccacttcattgcaacaaaggcaagccccggtgcatgcaaccacttctttgtgttttta

SEQ ID NO: 20153 - DNA, 1891 bp, Zea Mays
cttcctgaagcttaaatgctcacagttatgctgtcagacagctaaaaaggaaagccacatctgaagaaaatgctgctgctgactcaagcagttgtatcattaccagtccaatgctcactccggtctctgctaaaactgttaaagcttctaaggcaaaggctaagaacagtaaaactgggcctcagacacctacatcaaatgttggttcaccactcaatccaccaacgcctgttggcacatgccgctatgacaattcactaggacttctgacaaaaaagttcattaacttgcttaagcaagctccagatggcattctagatttgaacaatgctgcagaagtactagaggttcaaaagcggcgcatatatgacattaccaatgtccttgaaggcattggactaatagagaagacacttaagaatagaatccgttggaaggccctggatgattcaagtgttcaattagataatggtatctctgctttgcaggcagaagttgaaaatcttagtctgcaggagcaagctctagatgagcgtataagtgacatccgtgaaaaattaaggggcttaactgaagatgaaaataatcaaaggtggctctatgtgactgaagacgatatcaagggattacccagctttcagaatgaaacactaattgcaattaaagcacctcatggtactactcttgaagtaccagatcctgatgaggcaggtgattatctccaaaggagatatagaattgtattaagaagtacgatgggaccaatagatgtttacttagttagtcaatttgatgaaaaatttgaggaactgggtggtgttgcgacacccgccaagcattcaaatgtgcccagacatcaaccagctgaagatttcaatacatcatatgctggacaaagtagcacactaatgggtgtggcacatgatgcacagcacagccagaagattccccaggatcctagtgctttgcatgactttggagggatgacaaggattagtccttcagacgtccatacggattctgattactggctcctaacagagggggatgttagcatgactgatatgtggaaaacagaactgggatgagatggatttcttgtcagaagatgttgtcacccctcgagcccataatcagcagctggtcacagttgatgggccacatatggaggttccaagcacagatccataagatcataatggcctcaacaaaactgacatctgaacacctggagcggtgagtgttgaatgggaaggattctcgtgtgacagtaaatgcttattattgcaacggaagagccggacgatttcatcagggaatgtcacctggagtttagtcagggcatcagttcacaacttcagattggtgcacaccgctgttgtgaagattggcgaggtcagcttggttaacaatttactgcctgattggtaacctgcagctatttagcttagccgacactgctcccggcttctgtgactttggtgttgtgctcattcatccctgctccattggcttgccaagctattatcataccagaccggtggacctccactgaaaaatgctgcacaatgtataaaacatcaggtcaaaacggtgcacagtgcatggggtgttggcgttacaaaaccattgggtgagctatcaatgtaaggcagaaaattctttgtaccgcgttacaaaaccattgggtgagctatcgatgtaaggcagaaaattctttgtacaattgtttgataccccagatcaaagcatagctgttcgattgtaaacaaatgtttctatgcatgtatcagagaggagctcaaattgtttggcatacatttgatccattcacaggttcataccctgttaaacgtaacaacctttgataacgaagaaagatgctctatta

SEQ ID NO: 20154 - DNA, 1999 bp, Zea Mays
atcaagcagcaggacaatttgaaacagaatagaccggcatttagactcaatcatgttaccagtttcaaaacaaaacgaacacagcacgacacaaacatgtttccaacattccagacaaactaaaaggatcaccaccacaggcaacttgatcaactaaacgatgcatatatcctacttaacagtattgcagtaacatcgatacagataatagcataagtcttcagcaagttgccatcagtgaggaaactagtggggaataaaacacaaagccatagctagatctacttctccgatgagttggggccgcgcttcttgccgaatccaacaacggcggtgacgaagcggcggttgtattgcatgcgcttgtgagcgcggccgcggggcttcttcttcttgtcctgctttgcaaccttgggcgtctgcccgcgcaccttcccagcgcgggccagcgatccgtgaaccttacctgcgccagaagcagatagatcaatctgagtaaacggctattggaaggatgcacgcaaagtagagatagagacgaggacaaggatatcgttacccatggcggcggcggcgaaggtgctgtgttgctggaggatctgacgagcgactcgggatgttgcggcggcggggctgtccgaacggtgccctagacgggtgggagaatttataaacgccacgctttactgggccggctgttttgaggcacatgcacatgtaaaatgcccaggccccgctaacagcccagtaactactaactagccatatccgcgagagaaacccctcgatagcccgcagcattgcggcgcgcgagcacaccgaaccacccacctcggcggcggcggcggcttttctgcctgcgaagagagaaaccaaggagaggggcaactcggaagagggcgaggatgcctcggccggagttccaggcgccgccggatgtgttctacaacgagtcggaggcccgcaagtacaccacctcctcccgtatcatcgaaatccaggatttccgagagggcgctggagttgcttgctctccccaacgatggcgtccccaagctacttctcgacataggatgtggttctggacttagtggtgagacattgacggagcatggccaccactggattggctacgatatttcaaagtctatgctcgatgttgccttggagcgtgaaacggaaggagacctcctacttgcagatatggggcagggcttgggcttgcggccaggagttattgatggtgcaattagtatttcagcaattcagtggttatgcaatgctgacaagtcttctcacgatccaagattgcggttaaaggctttcttcggttcattatatagatgcctagcaaggggagcaagagctgttctacagttttatgctgataatgtgaagcagagtgaaatgattgtgacttttgccatgcgtgctggttttgctggtggagtggttgttgactggcctcatagttactacatcacttccaaagggtaaaggtgaaaatggtgaggggtgcagcgacgatgacgataatgagagcagtggcgaagatggtgacagaacagtgggaatatatgaaaggaataggccgaagaagcggcagaaaacgaaaaagaatggcaaaggcaaggattggctcctgaggaaaaaggagcagatgagaagaagaggacatgatgtgcccgccgacacgaagtacaccgggcgtaagcggaaaggctatttctagctctgtgcaatgcccccttgcctgcaatgctggctgttcagttatgatgctagttcatttagcagaagcagaaggatttttgtaaagggtgaagcgaggagttgtactggtattcgggagtcattgcatttttagacaacgatgtgaaactgtcatttttgtagaacgtggatgttgagatgaatacagttggtttgcgtgaatctgtatcagatcgctggtgacgcccagactttggctaaaagaaacgcagttcatgtgtcaagt

SEQ ID NO: 20155 - DNA, 798 bp, Zea Mays
ggacagccctgctacttgtactgggcactggcggtgccatcgttcgtggttgtgaccgtggtgctgtccatgggcatctacatgggcctcaacttcgctgccactcctcctccgacttccttcagtactatcttcgatgaaaagagtagggagcacacagccttttcttctgcaactgaggatgagaggcccattgaacccatctcagacatcggtattgatcggatcaacagtcttatgtttggtgatagatgatttcccccggtggaatatgagtttaccatggagcgccggattggaaatagatgcaaacgcgaaggaagatttccatgtcagctgaactttgttgcctgcatatgctattgagaggcccgtcgaacccgttttcagacggtagtattgatcagatcaggaatcttatacttggcggtgatagacgattactcaaaaatggagtgtgagtttacaacagagtgccagattggaaggcgtgaagaaataatccacattgttaagtgaactttcatattaccttcaagcataaccgacaaaggaattcgatccttgagcttttcgtttcacgtgaagggacgccctgtaactggattttttttgtgttgtgtagtaatgtgatgtgtactgtggtaaactcactgcggctgtgcctaggtatttatttgtgttgtgtagtaatgtgatgtgcacagggctgttcctgacttttgaggggcccgggacaagattataaatagaggctccaacaccataaaaactattttttactattatatatatcaa

SEQ ID NO: 20156 - DNA, 1909 bp, Zea Mays
gtcataatcctctcacgactcaactctttgatcgacctttgggttgcgtgtcttgaagttttcatccatccttctgtttgcctcaactagagttacatactcacccaatagaacaattctatgcccggtgattgtacctcctgaagtagaagagcatactgaagcagaactcgagtggtgttggatcgaaatggaaggcgggatgtcaagtttggaagccgccatgaaagcttcttcatcgatggcaagcagcatggcaaggaatgctgaccctaaccaacagactctccgccccaatttagtggagcagttctattttccaagacctggtcaatctttgccaggcattcctccattttttgggcctccctctagtttgtatcttcctaatgacaatgaagctaaatttggcaacaactttgaatcaaatccttcacagaatacagattggaacccacaggcaatagtgagcaacctaaccttccttgagcagaagatcaagcaggtaaaggatattgtgcagtccatgagtaaccgagagaaccaagtagctggtggttcctgtgaggtagctgcaaagcagcagctcataaccgctgacctcactagcattataatccagctcatatctactgcgggttcgctgctcccttcaatgaagaacccacttcttagcagcaatccagcagtcaggcagcttggcaacactcttggttctcctacgggctttggcatgaatgctaatcagcgaccaagcgtagacagcaagaccgatattcctgacacaggaaaaacttctgattatgaggagctgatgaatacccttaatactagtcaagctgaaagagatgagctgatcaaatgcccaaatccctgtggtggggaagggtctgaactgactccgatggaggaccatgatgtgaaggagagtgacgatggtggtgagggagagaatctcccccctggttcatatgtaatcttgcaactggaaaaggaggagattttagcaccacatactcatttctgcttgatctgtggtaagggtttcaaaagagatgctaacctaaggatgcacatgaggggccatggagatgagtacaagactccagctgctcttgccaaacccacaaaagattatggtgcagatcatgcaccggttacaaggtactcatgcccatttgtgggttgcaaacggaacaaggagcacaggaagttccagcctctcaaaacaatcttgtgtgtgaagaaccattacaagagaagccactgtgacaagagctacacctgcagccgttgcaacaccaagaagttctctgtcatcgcggacttgaagactcatgagaagcactgtggtcgtgacaagtggctctgttcttgcggaacgaccttctccaggaaggacaagctttttggacatgttgcgcttttccaaggccacacacctgcgctccccgtggaagacggggatgtaccagaaggttcagagcagcctcaggacggcgaaccaacgaatgaaatggcgaggagcatggtgtatagcttcccgtgtagctcgtctgatggtttattgaacctcgacatgaaaatggctgatgacgatcttgcagttatgggcagcagaacggtgatagctgatggatgccgccatcgatgatgactacaccgcggcactgtcaacctttatgtatgttgttgcatgatgctagtttggttcatcctctgttcaagagccattttaggctatgcctttaactttcttaagtgtacctccgtttgtggtcattaataatgatcaaggacttctagatagccccaattttctgcatacatatgcaaggattgctggttcatttggttgaatcggtgcgatgcctctagcgctgacaatatgtcaaaaatctggttctcc

SEQ ID NO: 20157 - DNA, 2019 bp, Zea Mays
cattggttcaaggggaggcgggggagccacggcggcggagggaattgtttaatcccccgtcaccgtctcctatcgccatcaccccacccgtcccccttggtccaggcgcaggcgcgagcgcgacgtccggcgtccggcttcggcggcggagtggagcgatcccgatccccacaaggaattccatcgctgtcgtggcgtttggtggcgctcctcccggccggcaagcaggatcaggaaatcgcacggaggtgaggatacacgggtgcggaacgagagctaggcgaacctgtctggtacctcgcggcggagatggacgagaaggcgacgatggagagcaagctgtcctcggcggcggccttcgtggaggggggcgtgcaggacgcctgcgacgacgcctgcagcatctgcctcgacgccttctgcgacagcaacccctccacgatgaccaagtgcaagcatgactaccatcttcagtgcattcttgaatggtgccagagaagctcccagtgccccatgtgttggcagcatatcagcatgaaagatcctatgagccaagagctactagaggctgttgaacaagagaggaacatccgagctaatccttcacgtaatactgctgttttccaccatcaaatgctgggtgattttgagatccctgtaggtgcagatgatgcagaacttgaagaacgcattattcagcacttggctgccgcagctgcagtgcgtaggtcacaccgtcatcataatagaagagatgggcaccagagcagatcagaagcaagtagccacccacagtttctggtgctctcagcagacgagcgcacaatctcaggtcaagaaggggactacgaacaagcatctgctgtagcttctggccgccctttacgtacacttgttgaacaagaacgcactcgagggttagcggatgcttccagtccatctctccgttgttctactcctgctgatagtactggtagatcaaacaataggatttctgggatcgaatctacacctgtggatcaagacggaactggaccatccgctttacaatcaatggtacagggatttcataatcaaagtgcaagtggatggagggagaggtggttttctcggagcaactctttactggatcttggttctgaggtgaggagggaggtcaacgcggggattgctgcggtgtctcgcatgatggaatggcacgatgcaagggacgggacgggagcggggccttctcctacctctgcatcaagatctggttctcagtgaaacactctgcacttgaaaggaccgatgcaaatgtaaagattaaggcaagctgctggaagcgacgtgccaagtggctgggctcttcggtcagcggtcgcgattcgcaagctgccagtagacggagaaggggctgtgataccgaaagacgaacgaactgaactggtgggctggggctgccctggagaggcagagggagccgtccacattattacttggtttctttcttttttttgtttattattgagaataatgatgaatcaggtcaggtgggtgggggatgtggctgtaaactcggtgggctgtcggtgtgtccagggggaaaaaaagagagaaaaggcagcgaaagaaattgtccatacatgaagaagcccagggtcgtcgtctgtgtataggaagggattaaaaaagatgttttgttttcttctgtctttctttgctttgcttgtgttcccgttttgacaatgagaaatatcgggtaaacacacaaccttccctattatacatttcccttcattttattatacatatatactctctctctctctctctctctttctttgtcaagaatgcaacagtccgggcagtggggattgaggaatcttcaggaggatctagtttttttttatatcataaatacaatcaggtgaattcctactttagatttattggaggagaatgataaactctacatataaaccagagatgctccaactcagaagctgctggtgctagtatagtattgatgaagcagga

SEQ ID NO: 20158 - DNA, 3064 bp, Zea Mays
ccaaatccgttgctctttcccccttgcccccttcccagtctccactctgagcactctcctccgctctgctcctttgctccccacggcaaaccgtaaaccctagcctgaggggcacccctgtcgcagccatgggcgccagccggaagctgcagggcgagatcgaccgcgtcctgaagaaggtccaggagggcgtcgatgtctttgacagcatctggaataaggtctacgacactgagaatgccaaccagaaggagaagttcgaggcggacctcaagaaggagatcaagaagctgcagcggtacagggaccagatcaagacgtggattcagtccagcgagatcaaggacaagaaggctctgatggatgctcgaaagcagattgaacgagagatggaacgatttaaagtatgtgagaaggaaacaaaaactaaggccttctcaaaagaagggttaggtcagcaaccaaaaacagatcccaaagaaaaggccaaagctgaaacaagagactggcttaataatgtggttagcgatttggaaagccagattgataacttcgaagcagagattgaagggctttcaattaaaaagggaaagcaaagaccgcctcgattggtacatttagagacgtctattacgagacataaagctcatataaagaaattggagtcaatcttgcggcttttggataatgatgagttgagtcctgagcaagtcaatgatgttaaagattttcttgatgactatgttgaacgtaatcaggaagactttgatgaattcagtgatgttgaggacctctatagcacattgcccatggagaaggttgaagcacttgaagacatggtttcacttgctccttctagtcttgtgaagggtgttgctcctgtttcgactactgcagttttgagcacaaagagttctgttgcaacttcacctactcagcctacagtatcaacagcttcttcacaaagtacatcacaggatcaaacagaggagacagcttcccaagaaagcaatcctgaacctacgccacaaacaccacctccaaaaggtggaaaccctggaccttcagtaccagctgtgcccattgttgtcagtactggtagtgcggctgtttctgtacctgcagaaacaattagttcccctgtgcgactaactgtacccgccacagcagccacagtgctttcttctgctattccacgaagtgctcctgagaatacacttgctgttacctcaattcctgcaaacttatctaccactttgaaggatgatgaaagcatgagtgttcctccacgacgaccatctcctgctactgaaattggaattggcaggggcataactcgaggaacaactagtcaggcattaggtacagctcccataactattggtccagtttcaggaaatggatcgcagttggttatgcctcttggtagtaaagttcaaccccagcaggttcccaggactaatgatgcaatcggctctgattctgctaacacaaatgaaaaccctattcttggtggaagagtattttctcctccagttgtttctggggttcaatggagacctcaagctgctgctgcatttcaaaatcaaattgaaactaatcagtaccgtggaaggcctgagatttctgctgatcacagggagaagtacatacagagactgcagcaagtacagcagcaaggtggcagccttctgaatgtttcccatataactggcataaatcagaagcaatttccaacaccacagccaaatccccttctacaacagtttaattcacagagttcctctatatcttcccaagtgaatcttgggcttggagttcaaggatcagacgcggggcatataaaaagtgaagatcaacaaattttggctgaagatgttggtgtggaatcttccgcaacaacaggagcaaataaacaaacaagtgaagatgacacaaagattccatattcgaatccttcagcacctgcagcagaaaacactcagctgcctagggatactgatctatcacctggacagcctttgcaacctggaatgccatcatctggtgttggtgttatcggccgaagaagtgtatctgatcttggtacaatcggagataaccttactggaacttctggtagttctggtcatgatcagaattattatctgcaaatgcttgaagctgcattccacaagcttccacagcccaaggactctgagcgtgctaaaacttacattccgcggcaccctgcagttacccctgctagctacccccaagttcaggcatcaattgtatcgaatcccaccttttgggaaagaattggtagcgacacattagctaccgacatgctgttctttgcgttctactaccaacagaacacatatcaacaatacttggctgctagagaactgaagaagcaatcatggagatttcaccggaggtacaatacctggttccagcggcatgtggagccacaggtcacgactgatgagtatgagcggggatcatatgtatactttgatttccatgtcactgaggatggctcaggatggtgccaaagaatcaagaatgacttcacatttgagtacaactacctggaggatgagctatcagtacaaacaaactaaagtgccatggcagtaggtctggtcaaacctttatgtccaatttgaattttgtagttctcataagagcttgttcggttgcttctggatcaaagaaggttggaggggattaaattccttctagtcaaaattgaatagaaattgatttaacccccctcaatctcctttatccagacgcaaccgaacaatgcctaaggtgactgactgactgttataatctggacccttgacaaaatctccagctgtaaactaatgtgtgaagttggatgcaccgaacatgctgaaattataatcgtgttatgccagccgaatctgtttgacgcagctgtacattgtcgttattatctggatgcgcctgaaaaatattttggatctttcttggcgcctacctgtttatttttagctaactcctggctggcgctttcgatctttctggttcgtttttttatcaaaaaaaa

SEQ ID NO: 20159 - DNA, 143 bp, Zea Mays
agtgtagtggtataggagggtatacgcgagagagaggttgcgagttcgaatctcactatttacaaaacatataagtttgattcaaaataaaagtgaaaaatgatagggcaacaggtaaggtaataaggtgggttgtagagttg

SEQ ID NO: 20160 - DNA, 843 bp, Zea Mays
aagaaatggaaaagttaaacctgggaatgattcaacatggaaccataaatcagttaaagcttgagtcggttcttctgtaaaggataattgatgcacaaagaagtgatgagggtatgaaacacattcatgagaaaataaaggtcggtaaagctaactgtttcagaaaggatgatcaaggcattgtatggtttaacaaccacatagttgtgctcaagaatgatgaggtctgccagcaaattttggatgaagctcatcttagccgctattccattcatcccagaagcactaagatgtatcatgatttaaagcaacattattggtggacaaaaatgaagatcaaaattacacgctatgtggcaagatgcgacacttgcagacgtatcaaagccatacacatgaaaactgctggtgggaaactggagggaaactggagggagcttggcggccatggctggagctccagcgagcagcaacagagcagggtacaaccagggagatgggtgccaagtagccgagttggagcaccatggcacgcaggaaggcaggccgggcgcggcagcaggcgcgacaccagggagcgagcagggcgtcgcggcatggacgagggaggagctcatggacaagagagttccagcaggcagaggggcaccgcagccatggatggggctgtacgggaaacaaggaacgtcgatctggagcaaggagaagggaggggcgccgcgagctggggcaatccaggagcgggggcgccatggggagcttggcaaggagggggctccggccatggatggagccgagcgggagcaaggagaaggagggggctccggccatggatggagccga

SEQ ID NO: 20161 - DNA, 2370 bp, Zea Mays
tttagccgcccctctttcttccacgatgtgggaagggctgattcagaaagctaaagacggaggcttggatgtcattcagacctatgtcttttggaacggacatgagcctacgcctggaaatgattcggatggtattttttttcgcttcgagcagtactatttcgaggagagcggcttcccagtttggttgaagtatgtaccgggcatcagcttcaggacagacaacgaacctttcaagacggccatgcagggtttcactgagaaaattgtgggaatgatgaagagcgaaaacctctttgcatcccaaggtggcccaattatcctctctcaggcaagtataatcttttccttagatttgattgagaatgagtatgggccagaaggcagggagtttggtgccgcaggtcaggcatatatcaactgggcagcaaagatggcagtcggattgggtactggtgtgccgtgggtgatgtgcaaggaggaggatgcacctgatccagtgatcaatgcatgcaatggtttctactgtgatgcattttctcctaacaaaccttacaagcccacaatgtggactgaagcttggagtggctggttcacggaatttggtgggaccatccgccaacgaccggttgaagatcttgcatttgctgttgctagatttgtacaaaagggtggttcttttatcaattactacatgtatcatggaggaacaaattttgggcgcactgctgggggtcccttcatcacaacaagctatgattatgatgctccaattgatgaatatggacttgttagagaaccaaagcacagtcatcttaaagaactccacagagctgttaagttatgcgagcaggctttggtttctgttgacccagcaattactacccttggtaccatgcaagaggcccgcgtcttccaatctccatctggttgtgcagctttccttgcaaactacaattctaactcctatgcgaaagttgtgttcaacaatgagcaatacagcctaccaccttggtcgattagcatccttcctgattgcaaaaatgttgtttttaacagtgccacagttggtgttcagacatctcagatgcaaatgtggggagatggtgcctcatcaatgacgtgggagaggtatgatgaggaggttgattctctggcagctgctccattgctcaccacaactggtttgcttgagcagcttaatgtcacgagagacagcagtgattatttgtggtacatcaccagtgttgacataagctcatctgaaaactttctacaaggtggcggcaagcctctgtctctcagtgtgcagtctgctggtcatgccttgcatgtctttgtcaatggacaacttcaaggttctgcttatggtaccagggaagatcgaagaatcaaatataatggcaatgctagccttcgagctggtactaacaaaattgcactgctgagtgttgcctgtggattgccgaatgttggagtgcattatgagacgtggaacactggtgttggtggtcctgttgtgcttcatgggctggatgaaggttcacgagaccttacttggcagacttggtcctatcaggttggcctgaaaggcgaacagatgaatctgaactccatagaaggctcaagctcagttgaatggatgcaagggtcattgatagctcaaaaccagcagccattggcctggtatagggcttactttgagactcccagcggggacgagccattggctttggatatgggtagcatgggcaagggccaaatctggataaatggacaaagcattggacgctactggacagcatatgcagatggggactgcaaagaatgcagttacacgggaaccttccgggcacccaaatgtcaatcaggctgtggtcagcccacgcaacgatggtatcatgtgccaaagtcctggctgcagcccaccagaaacctgctggtagtcttcgaggaacttggtggggattcatcgaagatcgccctagtgaagaggtcagtctcaagtgtctgtgctgatgtatctgaggatcacccaaacatcaagaactggcagatcgaaagctacggcgagcgcgagtaccacagggcccaaagtgcacttaagatgtgcacgtgggcagtccatttccgcaatcaaattcgcaagctttgggacacctacgggaacctgtggagatttccagcaaggagattgccactcagctaactctcacacagtcctagagaagaaatgcattgggctccaaagatgcgtcgtcgccatctcccccgagagctttggaggagacccctgcccgagcgtgacgaaaagggtggcggtccaggcagtatgttctcccgtcgcgtagccttacttctccaagcaat

SEQ ID NO: 20162 - DNA, 146 bp, Zea Mays
agcgatgacgacgaacagccgagtgcggtaaggagctggagaacgacgacgggccaagcagaggagctcgcgcgcgcacagggaagaactcacggccactagaacgagctgtgatattcggacttggcgacaacaacgagctggag

SEQ ID NO: 20163 - DNA, 2176 bp, Zea Mays
cgaggacggaggggcgcgcgcgtgtagggtcgcaagccgagccaaaagcagctgcactgcagaccgaccaccacgcgacgctcctgctggctgctgccgcggaacccgggacaagcgacctcctccacctccccagctagctatagcttcctgcttgcagctgcaggtgccagccgagccgcctaccgggtacagccgcacaggcaggcggcggcatgcgctccagcctccagcagtgagggagggagctgtcccgctcccgccccttctacttctacccctccccccccgcgggccgagagggagtccgcccgccggcgccgcgcgactcaccgatgcccagccatgaggcctgctgcggcaccatgttctgggtgtacctcatgtcctgcgtcggcctcgtcgtcttcgccggcctcatgtcgggcctcaccctcggcctcatgtccctcagcctcgtcgacctcgaggtgctcgccaaggccggcacgcccaaggacaagctcaacgccgccaggatcctccccgtcatgaagaaccagcacctgctcctctgcacgctcctcatcggaaactcgctcgccatggaggcgctgcccatattcctcgacacgctcgtgccgccctacgtcgccatcctcatctccgtcacgctcatcctcgcgttcggggagatcatgccgcaagccatctgcacgcgctacgggcttagcgtgggggccaaggcggcgcccgtcgtccgcctactgctcatcctcttcttccccgtcgcctacccgatcagtaagttgttggaccgcctactgggaaagggacattttgcactaatgagaagagctgagctgaagacgttagttgatatgcacggcaatgaggctggaaaaggtggagagctcactcgtgatgaaacaactatcattacaggagctttggagctgactcaaaagattgcaaaagatgccatgactcctatatctgaaaccttctcacttgacataaatgctaagctggacttacacacaatgggtatgataatgactagagggcatagtcgtgttcctatatactctgggattccaagcaatattattggccttatattggtaaaaaacttgattacttgccgagctgaggatgaagtgcccattcgtaatgttactatcagaaaaattccaaggctcatccccttcttatgctaacaacactgctggaagtcgtagatttaacatagagaagcatggagacgggcgctcatgtaataagaaatcagaaaagaagcgggaaaatattcttgattttaacacagatccacttccaagctattcaatggatgaggcggcagtcggaataatcacgatggaagatgtaatggaagaacttctacaggaagaaatctatgatgaaacagatgagtatgttgatgtacataacaagatcaggataaacatgttacctccaggcaaagcactgtcacctaccatatctcctggtggtggacccttacctcaggggctccgaaagactcctatgacatctccgttctcaccatactaccattgtaattcagtgttacgttccccagcttccaaccattgtcagtcacctgggactctaccgacaatactttcccctggaagatcacctactgcacaaacacctgggcaaagttcaccaaatggaagtcaggtttcaataaattccaacggtcaacataaaaaggacggtgagaactaacataccagaagattgttttccagacggtctcgtctcaagacgggatgcatgattaaaaatcatgaaattgctagcgtaggattaagctgcgaatataagtagcacagctctcttgaatggttagtggcccatgtatttattgattgtttgcttgtacatatatgcttcggcatccggaccttagtatggcctaatcctcactatgtatcatacataggaagtgaatggaagccaatataattttgctctagacaattttagcttgctttctggacccttatgtaagccttcaagatagtgaaaatgttaagtgagtagctcacgagctaaataatggctagatattctcggtaatgaccaaaatcgatcaagtacaacaccaaaagcaaataaaataaaaaacaacgctctcaattccaatcaagatgaaataagagcgaaa

SEQ ID NO: 20164 - DNA, 3178 bp, Zea Mays
tgtaactccccctctcacagtactagagggcccacccctacccctgcccccaaatcgccaaatcctccccaccaccgcacgctggtcctgcccgtctcccgcccccgccggccgccggcgactggccgccgccatgggctccgaccgcgccgagctcgcgcgcctctgcagcgcccgcaactggtccaaggccatccgcctcctcgactccatcctggcccgatccccctcctccatccacgacctctgcaaccgggccttctgctactcccagctcgagctccacaagcacgtcgtcaaggattgcgaccgcgcactgctgctcgaccccgccctgctgcaggcctacatcctcaaaggcaaggcactgtcttcattagataaaaaagaggatgctctagctgcttggaagcaaggatatgaaattgctgtccgtgacacaacagacttgaaacaattgcttgatctggaagaattggtttcttctgttaaaatttgcgggacaacccagtctgcggaccatgtcatggatgcatcaacttgtgataccaaagttgttatctcagaagatcgtgttgctgacacgtcgttcgctgcaactacaatggctgatacaaaaactgttgtctgtgaagaggccattggcagttccaaagtttcatcaaatggtgataccaagttgacgaattataataaaaaagcggaccataataaagtctctagcagttcagtgaaagacatcacagggactcaagctcccaagaaggcaccgaagctagataagaaaaacaaagcaaaagctgtgaaagaaataaatggccgagctgaaggtgtaactggcagagctagtactgatgaaagtgaaactatttcactggatcaagcactctttgctacaaaaatttcaaagtcatcaaaatctataagcttggatttccgactttcaagaggcattgcacaggtaaatgaaggaagatatgaccaggcgatatccatttttgatcagatattgcgggaaactcctacgtatcctgaagcactgattggaaggggcacagcttatgcatttcaaagagaattggattctgctatttctgatttcaccaaggctatacaatctagcccatcggctggggaggcatggaagcgacggggacaagctcgtgctgctttaggagagttcaaggaggccattgaagacttgactaaagcattggaatttgaaccaaattctcctgatattttacatgaaagaggaattgtgaacttcaaattcaaggactacaactctgcactcgaagatctttcgacatgtgtgaagcatgacaagaagaacagctccgctcacacttatttaggtcttactctttcagcacttggagagtacaagcgtgctgaagatgagcatgtcattggtttaaagtatgacgagagtttccttgactgttgggctcaccttgcccagctttatcttgatttggcatatccagagaagttgttgaattgccttgagaaagctattcaaattgattcaaggttcgcaaaagcttaccatctgcgtggaattctctaccatggaatgggtcgacataggagtgctattaaagaattatcggttgctttgacatatgaaagttcaagtatagagtgcctatacttacgtgcctcaagccatcatgcaattggagaatataaagctgcgataaaaggttatgatgatgtacttgatttggaacttgattccatggataaatttgtgttgcaatgtttgtccttctaccagaaggaaatggctctgtatattgcttcaaaggccaatttagagttctctcagttcaacattgatgatgatgttgacccactatttaaggaatactggtgcaaacgactacatcccaaaaatgtggctgaaaaggtttatcgccagccaccgttgcggatctcattgagaagtgggcgccttaacaagcaagacttcaaattcacaaagcatcaaacaactcttcttctagctgcagattcaattgggaagaagattcaatacaattgtcatggcttcttaccaaatcaacgtcagtaccgcatggccgggttggctgctattgagattgctcagaaagtgtccaaggcttggcgctttctaaggaatccgaagaacatcgcaaagttagttaggaaaagggataaacttaacatgagccagaacaggggaggttattgtagcactagcactttggctggatctccaacttccagcccaaatgaagacagggtctcctccgggatctctctttcctggcaggatgtctataacattgctgttaagtggagacaaatttctgaaccttgtgatccagttgtttgggtcaataagctaagtgaagagttcaattctggatttggttctcataccccaatgcttcttggtcaagcaaaagttattcgctactatccatattaccaaagagtcttggaaactgcgaagactataatgcttgacttgaagtatgtcaataatgcagaggaccgtgcaatttttcttacagatattgacaagttgaaaaagatagaaattgcatcgtcatgctcagatttgtaccatgtagttggtgagacctactgggttgctacaagatgtgatagtatggcgtttcgggggaggcgccttgaagggacaagaattaccactcaaaacataggcaagacaggatttgactttgcaattcgaacaccttgcacgccatcgagatgggaggagtatgatgaagaaatgactgcagcctgggaggctatttgtgaggcatattgtaatgacacaaaccccacacgagaccctggtgtgcttgatgctgtgaaggacgcgatattgcggatgacatattactggtacaattttatgcctctttcgagaggctcggctgttgttggctacgtagtgttgctcggtttattcctggcagcaaacatggatattactgccagcattccacccggtgtccaagttgattgggaggcgatcctgtctccagatcccggcacatttgttgacgccgtgaagccctggttgtacccatccacaaaaataagcaggtgcctgaaagattacacggacgtcagctgcgcgttcagcacgacagacgttccgtcatcatctcctcttccgcaagacggtgtcgat

SEQ ID NO: 20165 - DNA, 3424 bp, Zea Mays
cctagtttcatcctgtgggcttgtgagctgaagccatggtcaaacgggtgggagcttcttgagatcatcatataaggtcaataagtattctggaatgtttttccgagctcaaatagagaacttctggagctggatatcagtattctgttagggatatgctccaaccaagggaagctgatgtgcctgcactctttcttgtcttcattgtacttcccgtggtagcttattttcttcttgggagatggcatgactctgcaagtaagaaggcaagggcaagtgtgcttgcacagcgagctgcagaagaagcctatagagaggaaacgatggcgtgcccagacattattccgccaggcccttccttgagaactatgccctatttcaaacctgcgccttcgttaagacaggaataccatgagtgtgcaacttgccatgcccctgcaaagactcgttgctccagatgcaagtctgttagatactgctctgggaagtgtcaaatagtacactggaggcaaggacataaggaaacatgccaaaaatggcttggtagtggttctagcagctttggtggatctagcactgaggctactgaacagatgccgttcttggctaacttgaattcacctcttccaggtggtgacattcacttgcgtgacatgaacttcgatactttatcagaaccatcctttcccacaactgatggttacaatctagatactgacccatttccggcagatagaagcaacatgaatagatcaaatcaaggtattcatatgagcgaaaatggtgctgttggtgtatcttttgaaaagaataattataatgctgctgatgaaatacactcttcggagattttatctggaaacaaggtgtcaaacaactattttggttcagatgcaatgagtggtaatggggatgcaacttatcctgccaaaagtaatgcacagcagcctagcagttgtgctcctgacgtgagaaaacaatcaaaagcaagcatcacagtttatcagcctgacatgagtgtctatttaacttctgacatggtcagttcttgtgagggatcatatgtttctgccggtgagccactgcaaaggagcttgtcatctggaagaactattgggaaagtaactgtggtgaataaaaggccttcttacccatcaagtaaggtggtctcagcacaaaagtcacaggataaggtgtctacatcatatcaaaatgatgcccatgagaagaatccttgcaacaaaaatgaccaaagatctacccccacatgtgaatcaagtcaatcaacaagcagcaatctactgaagtctggaacatccaaggttgaagttttaaagaagccttcaaaatttctcaaaaccagccttgtggcattgatcaatgataataagaggaacaaggtattgttcccatatgaagatattgtcaagttttttcagtatgaagcacggggtgtttcccctagaggtcttttcaattgtggaaacagctgctatgctaatgctgttcttcaatgtctcatgtgcacaaagccactgatgatctaccttcttctgagattgcattctaaagattgttgttcaaaaaattggtgccttatgtgtgaacttgagcaatatgcttcaactttacgtgaaagtggtggacccttatctccaagtagaatcctttctaatctgaggaatattggatgtcgcttgggtggtggaactcaggaagatgcccatgagtttctaaggcatcttgtgatgtctatgcaagcagcttgcttggatgggctgggtggtgagaagcacgttgaaccaagtttgcaggaaacaacactgatacaacagatgtttggtggccgtcttaaatccaaggttaagtgcctcagatgctatcacgagtctgaaagatatgagaatataatggatcttactttggagattcatggctgggtagagtccttgcaagatgctttgacacagttcactgctcctgaagatttagatggtgataatatgtataaatgtggaaggtgttctgcctatgttaaagctaggaagcaactgagcgtgcatgaggtgccaaacattttaacagttgttcttaaaagatttcagtcaggaaaatatggcaagatcaacaaatgtgttactttccctgatatgttggacatggttcccttcgtgactgggtctggtgacaatccccctctttatttcttgtacgccgtggttgtacatgtcgatacagaaaatgcatcattctctgggcactatatatcatacgtcaaagatatgcagggtacatggttgagaattgatgattcagaggtccaggttgtatcagtgaatcaggttatgtcagaaggtgcatacatgcttttctacttgaggtcttttccccgaccaccaaggatatacatcgagaaggggctgccggttacatccgcaaagcggcacacgtcgaaatcttccaagggctctaaacacgatcgcaagcagacagagttactctttcctgcaaacgatcaggcatatggcgtctatgatttcagacccgatggcgaaggctatgcccaagatcagcatgcagagctgaggtccagagctttccatcacgccgacgatgcctttgcagactcggttagcgcggacttctcggaagcgacatcaagtgaatggtcgctgtttaccagctccgacgagtcctcgttcaccaccgagagcacaagggattcgttcagcgtcgtggactacggagacaacgccggcctggatccgatttcctccatattcgggccaagctatgctccggagcacggtgctcccggcagtttcgtctcgcgcacaaggttctcaccttccagtccacagacaaggtacttctcggagagcacaggctttgtctcggactcttccatgccggcccacccccacggcattgtacatagaggaaggtatccggatagtagggcgtgcgcctcttctgcggaaccgcttgcgtcggcggcgcatcagcggagcgggtatggccggtacccccttagtcgagatggttttgttcaaacatctggtttttgccaaatgtaatcggctcacatttcattagctgtagctggtgcatcggcagttgcggttcttagcactgccgttaatgctgcctcatgttcttttatttcagatgaggcttattgaatttttagctacatgtcgtttctaggggtagctcgattcgatgtagcgaaaaaaagttagattatgtctatatgcaggtgaaattttagagcatggtgacaagctctgtggcaaccgttttccaatgctaatctcgtaaccctggctgctgcttctggtcttagattaatgtatgtcccaagtgattattccccagcttgttactttctcggaacgttcatgcatttcttagagagaactta

SEQ ID NO: 20166 - DNA, 2101 bp, Zea Mays
taaaaaaaattctcaatatctctatgcgacgatcaccaagataaatagccgggcaccctcgcgcctccacccttgccttcagcacgaccaggacactgctcccgtccccgaaagacaaacaggcaagcagcaaagacacgcctccctgcctgcactccccacacgcccacacctccaacagacaaagacaatctagcaagcacacacagcatcaggaggaggagatcgagtacgggtttgaagcagagaatggggagggctccgtgctgcgagaagatggggctcaagagggggccatggacgccggaggaggacaagatcctggtcgcgcacatccagagcttcggccacagcaactggcgcgcgctgcccaagcaagccgggctgctgcggtgcggcaagagctgccggctccggtggatcaactacctgcgcccggacatcaagcgcggcaacttcagcaaggaggaggaggacgccatcatcaccctccacgagcagctcggcaacaggtacgtaacgtacctaccgctgctaattaatctcgcgccacccatttttctccgcatcgatcccttttctttcccctttctagcgtggtgttgctgtcttttcgggtgttttgctgaatcggaggagcaatgatggcttctgcttgttgcttcaaacgcaaatcactcttcgtcttcctcttgctcctgtcactggggcagggcatatagcatacacatacattatcccccatggccatgggccccccgcctcgaaagaaaacgcaagtgtggtggccacttggtcactagttaattaatcacactgacgctgcgcgagatgcgccggagattccacctgctctagtttggccgtcctccctcgagacgtggacgacggacactgctgcgtgccgtgcagggccgtctggagctcggtgcacagcgttaaacaagtgcgtgtgattccgcgaggggaatcaaaccacgcagccgagatagattaggagtagacagcagcgtggaacatgcatgctagctaagctacctcgcagagatagagaggtgcttaattaatcgaattccgcctttgacaaacctgtgcactgccactgatgtgatgagctctgaactgttacaggtggtccgccatcgccgccaggctgcccgggcggacggacaacgagatcaagaacgtctggcacacgcacctcaagaagcggctggagcccaccaccaagcagctggagcaggagcagcacggggcgcatgcaggtggtggcgccgccaggaagcgcagcaggcccaagcgcgcgggtgccaggaagacgacgacggccgccgtcgccccggccaccaccgcgccggcgtcgcctgaacggtcggcggcctcgtcgtcggtgaccgagtcgacggagcaggagcagggaaacacggggacgagctcgcccgggttccccaaggaggagagcttcacctcgtcctcggaggccgccgaggagttccagttcgacgacacgttctggtcggagacgctgtccatgccgctggacagcttcgacgacgtccccatggagccctgctccggcgcgttcggcgacgtggccgcctcctcctcctcgtcgtccgttggcgccgacgccgacttggactactggctcggagtgttcatgaagtccggcgacgcgcaccaacaactgccgcaggtttagagcgcgcacgcgcgcccgagaattttcagttccctggctaattgattcatcgttctttctctctccctgcacgtcttgcaatcggaattcggaggggacagtcacaatagcagctaattaatagaggggtgtgtgtgttgaggaccacgacgagattaggaagaaacaacgcgacatgccattgcatctatctcttgtttgccttcttgtatataaagatcgatcgatcgacaagatatcggtgatcgaaacctatatatgctacccattttgagaggaattcttctgcacgcggatgcggatttccatgtaacagtagtgatgagcaccagaaacgcactcggcgtctcggcctcttccaattcgttgattaaatccatctttgtgtgctactcgtgc

SEQ ID NO: 20167 - DNA, 2513 bp, Zea Mays
gccgcatgccacgcaggccctatgacgcccgccatcctcatccaggagtgcccccacccccagcgccccttccacccccgcaccgccgtcctgcccctctcccctcccacacccactcccttcctccatctccatgctcggcgccctcaccatctcccctctgcctccgctccacctccctaaccgcctccgacctaaccgcctccccccatagaccgaacgggatcttcgcgtccgacgcgcccatcgacgtggacgccgccatggaggacgagctacgggagaaggaggacggtgcgtatgtggaacgtctcagatctgccactctatctccggcaacctaggtcgggtgaggtagccccaggcaactcgaaagaggtagcagctgcactgtctcaggctttaagaaattctttagaaaggtattcttgtacttctttaatatttgatgcagaaagaaatcatcgatatttcttatcaatgcatgctaagctatcatttaaagtgccatgcttggtttgtgagggtttggaggatatgttggctcactttaaatatatactatgtatttttaaatgtaaggcatgaaatatgtaatgaatcctgctactcttgtgcttagataggcttttgtttttatattggtaccctaatctgtttgaacaaacctaattggatcatcaaactgcattataactatatataactttatggtctgctatttttcctttcaccataggttttggaaattatttttgtgccattttggttacctttattatgtgataagaacatagcacaagagtatttactcttgtatgacaaacaccagttctgaatctttaatgctgacggactggtcttctcatggctggtactaagactgacggcgtagcgaatgataaaagtatgctacattgcattttacactacttaaaggggtaggtcaactgttgtgtagagaattattaaacatgccatcattatattgtttcatcaggtgtggggttctcattgtgcaagaactattcttatgtatggtcacttgtttattgttaaaactttggaccacacaaatatcattagatgtatttctaatgatacgtacataggtggtagagaaaggagtagcacaatttaatttgatggcatatatatagaatgaaatagtagtactatcagctataactattgataaatgatgcagtctaagagcataccaatatgatttgccacactggtagaaactatgacttgtctgctgcatcctgcacatgagcatgtgatttgaagaatcgcaccatttgaagcaatcaatgggattttaggtctgcaagtaatgggtcttggatttactaggtactagcaacctcacaaccaaaacatggtgaccacaatatccaggattagatgagattagagtcaggtagttcaaaagtaagattagaccgcccaagacatcatcgctgatttattgaccaacaccaacgatgacccaaatagcgcagatttgccagttcatggagaggaacccggatgtgaggttcctgcatgcaggtgaactatgaggagcacaagtctatgcgctacaaccttaatgtccatgtcatccctttcttcacgttctacaggggagcttagggtcgactctgcaacttcagttgtatcaaggcaactgtgagatcctatgttctactgtcaatagttctgtgtccctattctaattgttgtttaagtaaggttgagtacaattattttggaagatgtttctgtggccaatgagcaattatattaactaattcagtgaaatgaaaagttttgagggtcttgttattatttgcaaatgaaaaaatggcattagtaggtggtcccaagtacgtgccttttgcaacgccttcagatctactaggcaaagaaatcaaggaggcccttgcggctgaatgcaataacagttccttggtctggtacttgtctttgatgtgccatctgacttccattgcaataacagttccttagtgcttcagcatagataaggtccaatatttattgttaatggctaccagttgatttaacttatacaattggtgactgttgtatgcagaatgagcagttcagagatgcacttgcgaagcacagacttctgacaccaacgacaccattagcaaggcagggatccgatgatatgtccttggtgtcatccgtgatataaaccacttcctttagtcatgtgctattcttcactgttattcatgtgtacagttgttcctttccatagtcacagagtgtaggtttctagattttttgcttgtgaagtctacccacgctgcctcgctcttgttctttataatgagatgaaattgtatggtggctttgcgagtgagatgaaatgtatggtggctttgtgagtgaaccattgtggtttaccaagtctatttcaactcaaaaaatggcatcgggaggcaaaacaactgcaaaagggagcaaggctatgacggtaccggtagcgaaggccc

SEQ ID NO: 20168 - DNA, 2380 bp, Zea Mays
cgaggcctacatagcgaggcacgcctcctgcagtcctcctcctcgtctagtcatctctcctccccctctcatcagacatcagagcccttcttcctccgcctccccttcacccccatctcgccatacgcttatcgcccatcccctgatcaccagccgccgccgccaccgcctcgatcccgtccgatccaatccggttttttccttgataatgcgcgtggcaaccttgtcagttcaatccgtccgtgaagaacttatccttattttcgtttgcatcgcatcgcttctgcgtttgggggaaaaagggccgcgtccttgatgtctactatcgcgaccccgccgccgccatcggcggcgcaagagaaggccgccagccggaataagcgaaagtaccgtgccgagacaccatccacggagttgggcccattcgggctggagtacccactgacgacggactgcgtgggattcgagtttatgtcgcccgagaaggttgccatggcagccgcggtagccgccgctgagggtgtcagccttgacctcctccagaactcgtgcgaaaactgcaaggatctccaccctactgcggaggacttgttggagtgccagcgatatgtgaattggggtgacccaaatgagatgcagctggaggagatccttctcaagagtctggacaccacctttgacaatagtgtgagtctgatcaccacaatgggctactctgaggcggccgcacgtgctgctattatgcggacagctgcgcaatacgactggagggagagccttgctgggtttggagaggcggcggttgaggttctcaagacggaaggggacatgttgccaagggagggtgcctctgttgaagacatgaggaagattgaggaggctgtgcttggcagtatggttacgttggtaactgaggctcagccattcaacaccccaggcgatgtaatgtattgcttgcttatgtcggatatgaatgtggcaaatgcatgtgccatggactataacagtttctccctcccagctgtgtctgctcaagttattgcccaaccagtcgcgggaaactacgaacccggttcaggttcaaatttgtcagtttctattaccaacccgcagactggcgttactttccgtggaaaacttaccccagtgccacctggctcgtatggtgctataaaagctgattcatcaacggcacaagcaagcccgaatgtatcaaataccgaaccctcggtatcggacaagactcagtgtgtcatcccgaatattgagccaaaaaaacaccatgttcctatatgtgatcattcagaggaccaaccatttgttgctgctgcgacacaatctgtgaaaaatgacaagtcgtccccaagcaagagggggggctctaagagggactcctttcatcggcagaagttgacgaactatgataaaagttcccgagcattgggttccaaaggctctcttaggtctggcaagcaaagctcttcagccagtgcagtattggagaggaagtgcaggtcattttccgattctactactagcaacttgaagggctcatcaagagttgctaaagggtttgctgcaagcatatctggatcagaagtatcagttgacctttcctttactggtaccctttccccttctccatcatttgatgccaaggtagttagtaactcaaactcagcacctgctgctagcacagatctttcattggcattgtcctcaagtgatagtttaacaccatctttgagtcatgattccaatactgaggtagtggactctagtagcaaaattaatttttcatatgatgaagaacagaaggtctggatcccacaagataaaaaggatgaaattgtcttgattcttgtccagaggcagaaagaactgcaagcacatacacgtgactggacagactgggctcaacagaaagtgatgcaggtcgcacaccgacttgcaaaggagaaggatgaacttcagtcactcaggaaagagaaggaagaggcagaccgtctgcaagaagagaggcatcatttggaagagagtactcggaaaaagcttctagagatggagtctgcaatttctagggcaaatgctcagttggagaaggcagaagcttctgctcgcagacgtgaggttgagaatgcacaacttacgttacagatggaagctgcaaagcgacatgcagcagagtcagcaacaaacatttcagagcttgtaaagaaggatgagaacagtcgcaaaaggtctcagcgttggcaatctgacagagccctgttacaagaggatcttgcagcacaaaagagcaggttatctcgggtccaagaacaccttcagcatgctaaagagctaaaggatcaagtgcagatgttgggatggaaattac

SEQ ID NO: 20169 - DNA, 1082 bp, Zea Mays
ttaaaaaggttcgaatgagatggtttgatgtgaaagacaacaataatatgagacgagagttcttgcgaggaacattacaagcccctcagctgcagttagtaccccatgttggctatgtcagcctcttcccattcatgatggggactattccacctgaatcatgggttcttgagaagcagctcaatctgatatctaacacatctatattgtggacagattatggccttcgatcactttctagaacaagttcaatatatatgaagcgtaatacagagcatgaccccccttattggagaggtgccatttggataaacatgaactacatggttctttcggcactacatcactatgcacataaggatggtccatatagcggcagggcaaaggaattgtatgacaagctaagatcaaaccttatccggaatatagtgcagaattacgatgcaacaggtttcttctgggaaaactatgaccagaaggacaaaggaaagggaaagggtgcacggtcatttactggatggacttcactcattgttctgatcatggcggagtcctacccaacattgcacaggtgagatatagatcgcgaacaaccacagcagaagatagctatggcaattggaatggaggggctggcagctggcgcttgtttagcccggtttgcaaccagaacactgggatagtttgattcgtagcatctgctgccttaatcatgaaaattttgacaacacctcctggtcaatctgttcagcatcatttatagagtgttagtggtcatccctgttcactctcatactgtaaactagctcctcgaagaactgattttggggggccaaaaccaccccaggaaagcatgagcatatggaaaacatgttcttgaaagctgacactacgtggagctgttacttgctattgagtgtaatctactgctactcttactatgcttggccatttgcacccccaatgatccccgaagaaacctgctggtccgagcatgtgacctatacctttgcatttacttgctagagaatcagttcaacacaatgcaagttgcaaggcacgtgttttgaaatggaaagcgg

SEQ ID NO: 20170 - DNA, 890 bp, Zea Mays
ccacccaatgtcttcacgggtggaaacccaatgcctttgggtgggaacgctggcagccattagatcttctttcgacggtggatttcgacagtaaagtcccgcgggccgcggtgacttgccggtgggcatgtcctcgtcctcttccttccccacctcccgcttccccttcgccgccggcgccagggcccccggcagcagacgcggtgccggtggaggcgggagcagcgtgcggccgtgggggtcgaccggcgggacgtcggtgtcttcatctgggaaacggatacagaaggagctgctggacctcaacgcctccgactgctccgcggggcccaagggcgacaacctgtaccactggctctccaccatcttcgggccccaaggatcgccatatgaacgagggatatttttccttgacatcgtgtttcctcgtgattatcccttcaaacctcccatggtaactttcaaaacaaggatttaccattgcaatattgattccactggtaaagtgcatttggacattctgaaggatggttggagtccagctttcactatttcaaaggtgttattggccatcaaagacatcatcaacaatccagatccatacaccccgcttgtgatgagcatttcacgtcagtatctgactgatagagctaaacatgatgaaacagcagctgagtggacaatgagatttgcaagatagaggattctgtttgcatctaagcacgattgaccttgtaaaaaaatcttaatgtggcctgacgcctgaaatggtgaatgttggcaaaggagccatcagccatgtattatttgatacaaagtatgtaaagcatgccattcatatctttcacttgaaacaaaatcctgctggttatcattcaggtagtgttgtt

SEQ ID NO: 20171 - DNA, 757 bp, Zea Mays
cattatttttaggtgcggtaattctaagatgttgcatttaaattaagaatgtattaaatcaaaatatgtgagttgatattaatcactttaacaattatttataaaaagcgtaggtcatcaatataaattagattgattagattatctggctaattaacattacttaaacaagtaattaattacttaattaaaacatgtggcataaaatgttattactacgcacgcaagattaatatgaacctaacataacttgaattaattaaaagaaattatttaacctaaaagatatcacatttttaattaattagtagggctgcacataagtaggtaacatgacgcgatctgattggttagatcgaggtcacacaaagaattagggataaatagacgtcatatatgtgatctaggtgtggccatcttatatcttcctccttttcttgaaactagataagaagcatagaaataaaatggagggaacgggaccgtcggctatggtttagtcagcctagagggctgcatgcacagggcccctaccgatgggagaagcgcagagggggtgctgtccacgtcgctccgtggatccgcgaccacgaccaggctccagtcggatgcggtatcggtatgctcccgagttgcttgaggtaatccccgaggccaaagcgacgacaagattatgactttgatcacgaaagatctctcctctctacctctcgcggtggtggtggccttgctcggttgttgggtaatgagggtgtcg

SEQ ID NO: 20172 - DNA, 140 bp, Zea Mays
cgctcgcgtctggcgtggcccgcgtgtgtgccccggcgtggcctgcgtagccccagctcgaattttgcgcggccctagcacaacagcagtctcgctgttctcgtgccttgccgcgagctcatctggttgtccgccgtcgt

SEQ ID NO: 20173 - DNA, 4094 bp, Zea Mays
gtgagggctcaccccgcagatccgttcggttttccattagcttggttcctgaggttcttggaattacgagggtttctgtcctgggcggtcaaaaattctgacttggaaaccctcggtgggccgcttcctggttcttgggagggagaggtgctttggttcctggatgagctgtgaaggaactgggagcaagaagaattgatgtttactccgcagggcaaaggatggaccggctggtcgacgccaactccggccaaccagcggagcggtggtggggctcctgctgcgtcggcgccccttggaaagggcaaaggaagggtcgccgagctcgagcaggagttgcatgaatatcagtacaatatggggcttcttttgattgaaaagaaagaatgggcagcaaaatttgaagaaatcagtgaagtgctgacacagaaagaggagatactgaagagggagcaggcggcacatctgaatgctatatcagagtatgaaaggcgggaggagaacatgcggaaagcactaggtgttgagaagcaatgtgtcgctgatcttgaaaaagccttgcgtgatatacgagcagagatagctgaggttaaatttacatctgagaaaaagataacagatgctcagtctcttgaggctagtttggaggaaaaatccttggagatcgagggaaaacttcatgctgcagatgccaaacttgcagaggcaaaccgcaagaagtctcaagctgaccgtgatttagaagaggcggaagctcgtcaacgtagactggagaaggagaaactgtattttgagacagagcggaaggcccgagaaaagcaacttaaggagcaggaggaatcactgcaggaatgggagaaaaagctgaaggaaagtcagaatagacttaatgagttgcagagatctataaatgagcgagaggagagagcaaataagaatgatcaacttttcaagataaaacaggacgaactggaggaggcacgaaggacagtggaggccgctaaagttactctgaaagtcaaagaggatgatattaacaaaagactaaatgaattacatttacaggaaaaggatgctgactcaaagcgcagtgcattggaagagcaggggaaaaaattggatgagagagaggcaaaggtcactaatagagaaaaggaggggctccagaagcttcttgaggatcatcaggtggagcttgaatccaaaagacgggattttgaattagaattagagagggaaaggaaatcttttgatcaaaatatgacacagaagcaagcggatttattgaaaagggagaaagatgttaaatctttggaggctaaactttctaaaagtgagcaggcattgaatgataagaagaaatcaatggaaaacttgcagaatgatcttgatgccaaatctaaggctctgaagagttgggatgaatcattgaaaaatgacgagaaaaggttactgaaagaaaagcagcaaatggatcatgaaagagaacaattggagacatacaaattggagcttgaaaagatcaaatcagcattagaagctgagaaggaaaaaatatcagaagagcagaataatctgaaactcacagcgcaagagaggcaggagcatagcttgttgatagcaaaacttaagaaggagattgaggaatacagaatgcgaagcaactccctatctgaggaaatggaggatttaaggaagcaacggcagaaatttgaagaagagtgggaacaactagacgaaaagagagccctccttgtagaggaggacaaaaggttgaacattgagaggatgaatttagaacggtggcgtgacaacgaagaaaaaaggttaaatgatatgaaactcaaaatggatgaagaatacaagcagcagctggagagtcttgagcgcaaggaaaaggctttgagtgatgatatgaagcacaagcaaatggaaaatgatgaatttctgaagggagaacgtgctgatgttcaacgtaaattgcaactcaaacggcatgaattggagatggagatggagcaaaaacaagccacgaaggagaaggaactggaagaaaaggaaaatgagttaaataagaaaatagattttgtggaaaataaactccgacatgcaattgagttgaatgagtccaagattgagaagttattattggagaaaagggaggtgcagatggaaagagaattactgctggaggaaagaaagaaaacggagactgacaaggcagatattagaagggatattgagagtctgcactcattgagcaagagtttgaaggaacgtcgagaggcatataacagggacaggagcagactcatcgaactatttgaaaagtacaaggcgtgcaaaaactgtgggatttctatttttgagggattggattctctgctgcttaaagacagtgctgaaattgagcatccaagtttggctgttgagggagatgatcatgccttgaccaccgatacatcaggtccagatacaggaacccttgttaattcaggtggtcgtttttctttgttacagaagtgttcaaggcttttcaagttctcccctagaaaaaagggtgagcagtcatcagaacaaccatcagagaggaatatatcttttggtgcaagactcgaggaagcaacacagagcgatggagattatgtgccaactcctgtctatgagatagcccacgattctttcaatgcagaggatgagctcccttctgacggtgaaaccagggagaatgaagagtctgaaaggcatgacatagctgataatgcccagatggagtcttctgttggtgtagcagataacagtatagatattctcggtactaagtcatttgatggtgctaacgacatggcagttgaagcaactattgtctctgttgatcaaaatggcgaggactctgtagttcctgctgaagcaggtgtagagcctgaaacatcagagcaaggtcggcgccagcaaaaccagagaggcagaagaaaaggtggtatgaaaagaacacggtctgttaatgctgtagttgaagatgctaagatgatacttggcgaggtttttgaggagaagactgatgatcagggagatacagtcaaggtgggtgctacacgaaagcggcggtttgctggagctacaataagtgaacaagatgaagaagggagcgaagcacattcagaaagtgtttcacttggagggcagcgccgtaagaggcggcaaactgctggggcagtgacagatgccccaggagaaagacgttacaatttgagacacagtagagctgcaaatgctggcgctgcaacagcccaagcagacaaaaaaaaatcttcaaaagcaagaaataaacatacagtagaagcttctgctgatgacaccgaaggaacatcaaaggttgttgaggaacctgcccctgagagcaagagggtatctgaatctgcagactacgatgcatcccagttgcatgagttttcccaggttgaagttggtgatgcccatgctgtagacggtgagggtgctggtgaggaagatggtgatattttggatggccaagatgcactgcctgatgtgccaatgacaccttctggaagcgagtttggagcggaacaggaagatgaggacgatgatgattcagagaggcgaaaccaatcaatcagcaagaagctatggtcattcttcactacatgacttgctgaagaggtcgtcatgtaggttatttctagcttttgtggtttcgattcatgataccccattcttggaactgtaggtcgtgtgcttttggtgattatgtactagatctcccacttgattgtgcttctctcccgtgtaattgaaatatatttgtagtggacatagtttgatggcactcacagaagtagctgatgagatgtacaatggcgatgatggtatgccctgtaaggctgtaacaccagtagcttggtttgtaattgttcttttcccccggttcgtgttacttcgttgaccttattccggggaaatattttagtgctgtgatgatggtctaaatgtttgttcgcctattgaaactaaatacaatgaattagaataccacagtccacaggagcttcggagacttccatcgtcaagattcc

SEQ ID NO: 20174 - DNA, 3127 bp, Zea Mays
ccataccccatgctcttctgcttttcgaaaattacaatcacccaccttccaataaaagcgcacacgccttcgtgcacctccccggtctctccccctttcctctcccttcccccttcccccgcctccgccatcgccgacgccgacccccacaccggccgacgcgcgagccccggcaccatcttcacacgagcataaatgggtgatgcgtgtttctcaacacagctaattgatggagatgggatcttcaacgtctccggattggagaacttcatgaaggatgtcagattgggtgaatgcgggctgtcctatgctgttgtatcaataatgggcccgcaaagtagtggtcacagactaccaaaggtatatggctagcgaaggcccagaatattgaaccgtgcacccttgtaatggatttggaaggaactgatggaagagagaggggagaggatgatacagcatttgagaagcaaagtgcattgtttgctttggccgtttcggacattgtgttgattaatatgtggtgtcatgacattggcagagaacaggctgcaaacaagcctcttttgaagactgttttccaggtcatgatgaggttgttcagtcctcgcaaaacaacattgttgtttgttatacgtgacaaatcaaggacacccctagaaaatcttgagccaattctaagggaagacattcagaagatatgggatgctgttccgaaaccccatgcccataaagaaactccaattagtgaatttttcgatgttcaagttgtcgcactgtcgagttatgaagaaaaagaagagttattcaaacagcaggtttctgatttaagagataggtttcagcattcaattgcccctggtggacttgctggggatcgtcgtggtgttgtcccagcttcaggtttctcatttagttcccagcaattttggaaagtcatcaaggagaacaaagatcttgatttgcctgctcataaagttatggtggctactgtacgttgtgaggaaattggtaatgagaaagttaccagctttatagctgatgaggaatggcaacaatttgaggaggctgtccaacatgactttgttactgggtttgggaagaagctcagcagccttctggatagatgtttatcagagtatgacatggaggctatttattttgatgaaggtgtcagaagctcgaaaagacaacaacttgagtctaaactgttacagcttgtcaatcctgcctatcaatctcttctaggtcacttacacactagaactttagaagcatttaaggagtactttggcaaggccctagaaaaggagggatttgctgttgcagcttgcaattgtactgaaactttcttggagaagtttgatagaggatctgaagatgctgctattcaacaagtgaattgggacacctcaaaagtgagggataagcttagacgtgacattgaggctcatgtagcttcagttcgggctgctaaattgtctgaactttgtgcgaaatatgaggcacaacttaccaaagctctggtggaaccagttgaatctcttctagattcagccagtgaagacacgtggccagctattagaaagcttcttcaacgcgagacaaaaactgctgttttaggtcttgaatctgctgtgtcagcttttgaactcgatgaagcaactgagaaagaactgcttgcgaagctggagaagcatggaaggagtgttgttgagtcaaaggcaaaagaagaagctggaagggttttgattcgcatgaaggacaggttctcaacattgttcagccgagatgctgactctatgcccagggtgtggacaggaaaggaggacataaaagctataactaaaaccgctcgctcagcttctgtgaagttgctttctacaatggctgcaattcggttggaggaggatggtgataacattgagaacactctttcccttgctcttgttgacacttcaagacatgggactacagataggagtatccaattgtccgatccactagcctccagctcatgggaaagggttgctgaggagaagactttaattacccctgtgcagtgcaaaaatttgtggaggcaattcaaagctgaaactgaatatacagtcactcaagccatagctgctcaggaagcaaataagaggaacaacaactggctcccacctccatgggcacttgctgcaatggctatccttggattcaacgagtttatgacattactgaggaatccgctttacctgtttgccatatttgtgatttatcttgttggaaaagccctttgggtgcaatcagaaattggcagggaattccaacatggatttcttcctgccatcctttcactgtcgacgaaatttgttcccactgtaatgaacatcctgaagagattagctgacgcgggtcaagaacctgcagcagcccccgagaggcaaagagagatggagctccaaccaaaatccaccaggaacggttccttatacagcaatgtgacatcggcagggtcatctagcgtaaccacttcggagattggacctgaatattcaagcccggttgtgcaatgattttgctgatctttagctttttggctggaaacatactctagcagttgagaaaaacagggtgcctcaagaacgtacgaagattttggtgccttgcagtttttgtaagcttgcccttcccagactgattcaaggtggcactgcccctcgttgttattcaaggaattttggggctggcggggttgtttgtaagagcattgtaaaataacttgtttcattttttggtttctgtaacatgaatacatgacatgtgatagttgtatataagatctgtggactgggggcgtatcagcgcattctacacagctaagggttgcatagttgcgagaactgaagcatgtaaatgtctttaaactgccatctgattgagatgcagtagtactgctgttctggaataagacatgtctgcttttggggaaaatgattcaaaaaatgtttcgtttgaactcagcgtctgctgaaaatgaatttggttcccgacccctgttctggttggccgaaattcacaagtttggtgttctttttgtgtactgtccgtacaataatacagtccaggcaaaggacaccagacg

SEQ ID NO: 20175 - DNA, 889 bp, Zea Mays
gatatatgtgtgtgcaaatgatccatcgagatgttggctcaatattataagatttaatgggctagcggagagaagcagaaattatttgacaagttggaaggaaaattccaggacttctggaaggacgggtgggcttcatatacaaggccaacaacagaacattcagtttggccgttctattcggatcaccctcttactggtgctgagtatctttctgattgtgccatttctcgcctcggcatgacaaggcatgtattgcttcaccggtgaggaacattggggcagcttaccatggtcctgctcgtactacatacagatcatgactggtggtgttctctcgccggcaaatgcagcaaaccaaccatgtctttcctgtgtggtgtggctgctgcatatgtgacaggaaaagaagcacggcggtgaaggtttcaactgtgcaatgcgtgatgctccgataccatgaactcctcaccgggcgcataaccatgctaagatttatcagggttatgataaatttgtgatggctgattgctgccaaaggaggtggctgttctcatctcactactctatatcccacgagtgaaagcaattgtaaaaagttctagagccactctatatcccacgaacgaaagcaactgtaaaaagttctagagctggtaggataagtcctgaatactgttattgataataatacatttaatactgtatttgccaaaccgttcgccgccgctcgtatggttttctgtttagaggtgctcttttgatccaggtttctgcacttgtcctcattttatggtatgcttgccattacccacgaactataattatatgtgccgtttggttaatgaaatgtaatgtaaatggtaatggtaatgattcatgctcaaat

SEQ ID NO: 20176 - DNA, 745 bp, Zea Mays
gtctgcgtgggtttgcacgtctgttgctctctaccggagacggatcagcgtgtcaactgacagccctatgtccttcgccgctttctcatggccgtttcgccgccggggcggggctggcagcagtggcgcaagcaagtccgccgccacggcagaggaggacgaggagctgggcgtgaccccgcagctcctcgacttcctccggacgctctcgcccgacgccttcaaggccgccgcactccagctccaaggaggctccacggaggcggccgccggcgacctcaccagctggcaggagcggcacgccgtgctcgtgctatccaaagctaaggaactcgccaagattcggtatgatctgtgccctcggcacctgaaggataagcagttctggaggatatacttcctgctcgccaagagttacatctcaccgtatgaactacgtgccatacagaaggaaaaactcagacggatggagacagaaaactgcaagccaaaacaagtgatctctgttgaggtggagatgcaagaatcgaagcgcactagtctctcacaagcatcagaagtagatctagaatctcaggtttagttttgcagttatagcttctaacagatctagcttaggtaacgcaatcagtagcccttttatgattcctccacacaccaaatagctccacgagttcttcagatcttggatcgactctcgctagactaccagtccgctgtgtgcttttgtcaccaaaaaaaaaaa

SEQ ID NO: 20177 - DNA, 2293 bp, Zea Mays
ttttgagttgatcggttcttctggacccgaggatataattaaccttttcttgcttaatgcagaacaaccgagaatactttgagctggctagtgcaatccgttctatgaagttcaacagtgatggtaaaacaattttttgtggattgcatgaaagcttaaaggctctttcctgggaacccaccatatgtcatgatgtgattgatgtaggctggtccacattagcagatctaactgttgacgaagggaaacttcttggctgctcatataaccaaaattgtgtcggtgtgtgggttgtggatttgatgagaaatgagccttatgttgatagtagtgctggatcacacttaaatggaagtataaataggccaattcaatcagatgatagcatgtcatcagtgtttgggaggctatcgatttccagaagcccagccaatgaaattggatcggatactctgcttggatgctcaatgtctggttcaaaagaaagtcctgtctcaacttctgcatcaatgaggggattgtcaaagccacctggaaaaggggacctccggctctcaagatctatttctacacctcttctttctcctagagttagattgaacccaaatttcattgacagacagaagaatcaggcagctactgctgtaccattaccagaaccaatagtccgctttaaagcgaatctctcttcagatgctggaatgttgtctcgcaagtcacatgcatcagcagctcccatgtatagatcaaggtccaatagttctcggtatggtattatggaatcatcttccatacctgttctggccttgaggcatagctctagaaaggatgctggtcccgttcacagtgaagctgccacaggtgagttagcagatattgagcctcaaaatatagaaaaggaaggtttagttgccaatcatggcaaagaagatggcaagttggtacctgtaattgcttcaaggagctcaaagatagtcgaagaagttggctatagaagaatcaccaatgatgtaggatgtaagagagtaaccctagaaagtggtttgagagttaattcagatatggactatagaagcagagctccagaaagccacgaggtgcagcagcttatacatctgtcagaacctgctggtttacatgggaaatttataagagaatcttcaggtgctggggacaataactgttctggttcaatatgcactgagagtgctgagtttaatgaagttgatatctggtacagggtatctggttttgataaatggaaccctgctgctgcaaggaatccagaatttgccagcatccacagaaatgaagtgattggaataagacagttgatggagtcaagtggaaagtatgttgttgacgatcgaccttcctcttctaattacgataacatccagtatgtgacaacactatacagctcgaggctgcatccttcactttctggaaaacttagtgcatctgcaagttatgaagatgatatttctggtctagtggaaaaccatcaagaattcattcatgtaatgaaatctcgactaacaaaactagaggtggtttaccgttgctggcaaagaaatgatataaaaggatctattgatgctacatggagaatgttggattttgctgaactgtatcacattagatgtttgcgcttctctcttacgtcttaccaccagtcttcttgaaagcacatatgacaggcatatgagcattgccttgaggatgattctcagtttcgtgaagagctttggtcccacaatttcttcagccttgttggctataccacctgttggggtagaccttgaagcagagcagaggatggagtggtgcaatctatgtttccaagaactgaagaatgtgagcgtcagcctcaagtttctgacaaggcggcaaggcgaggttgggagattagctcaggagctcagcctttttcttcaggatctctttcaattgtcaagcgtgtaaacagtgaccataccacgacgtgcaaaatattcacgcactcaatttcctttggtcataacagatatagcgacatatagtaggatttacctctagaaagaaagaaatatacagaaactatagggtgaagcttacagggtattttctccgagctagtttgggagcatcatttttttcatagaattcctatttttctaaggtctcgtttgtttcctttcattttaaggaattagaatcttactaatataatatgctattttttttagaatatgacatttcactacttttcaaagttatcatataagcttatcttaaattcatggggtgagag

SEQ ID NO: 20178 - DNA, 4846 bp, Zea Mays
caattttcagtgaatgttgaagcacattgattacagtttcaccagaaaaattgttgcccagggatacagatgaagatctgggtgggggtcatgtggatgacatgaccaaattgacatatctaaatgaaccaggtgttctttacaatctgaagaaaagatatgcattgaatgagatatatacgtacaccggaagcatcttgattgccgttaatccttttacaaggctgcctcacctgtacaatgaatacatgatggaacaatacaagggcatccgattaggggagctgagtccgcatgtttttgcggtggcggatgcatcatacagggctatggtgaatgattctcgaagccaatccatcctggttagtggtgaaagtggtgctggcaaaaccgaaacaacgaagcttattatgcagtatctcacctttgttggcggtagagccgctcttgatgaccggacggttgaacaacaggttctagaatctaaccctcttttggaggcatttggcaatgcaaaaacagtacgcaatgacaattcaagtcgatttggaaaattcgtagagatacagtttgattcaagtggtagaatatctggagctgctattaggacctatcttttggaaaggtcccgtgttgtgcaaattactgatcctgaaaggaattttcattgcttctaccaattgtgtgcctctggaaaggacgcagagctgtacaaacttgggcatataagcagttttcattacttgaatcaaagcaatacacatgatttggaagggacaaacaatgaagatgagtactggaagacaaaaagggcaatggatattgttgggattagcagagaagatcaggacgctatatttcggacattggcagccattcttcatcttggcaatattgagtttgtcccaggaaaagatgctgattcttcaaaaattaaggattcaacctcaaattttcatctccaaacagcagctaaattatttatgtgtgattcagatctattggtctcaacgctatgtagccgatctatacatactcgtgaaggaataattgttaaagcattggattgtgctgctgccgcagctaatcgtgatgctttagcgaagactgtatatgcaagattatttgactggcttgttgagaatattaataagtctattggtcaagatgtggattccaagctacaaattggtgtgctggatatctacggctttgaaagcttcaaaaacaacagctttgagcagttctgcattaactttgcaaatgaaaaacttcagcaacactttaatgagcatgtattcaagatggaacaggaggagtacaaaagtgaggaaattaattggagctacattgagttcattgacaatcaggatgtgctggatttgattgaaaagaaaccaattggaattattgcactgctggatgaagcctgtatgtttcccaaatctacgcatgagacctttgcgacaaagatgttcagaaacttctcttcccatcttaggctcgagaggacaaaattctcagaaacagattttaccatctcacactatgctgggaaggtcacgtatcaaacagattcttttctggaaaagaatcgagattatattgttgcagaacactgcaatcttctatcatcttcaaggtgcccatttgtttctggacttttcacttcattgcctgaagaatctataagatcttcatacaagttctcatcagttgcttccagattcaagctacaattgcaagccctgatggaaaccctaaactcgactgaacctcactatgtacgctgtgtgaagcccaactctgctaatcgacctcagctttttgaaaatcaaagtgtattgcatcaacttcgttgtgggggtgtcttagaggctgtccgtattagtcttgctggctatcctaccagaaggacttatgctgaatttgttgaccggtttgctgttcttgtgccagaattgatgattggaagttacgatgaaaaaatgatgacaaagggtattctcgaaaagatgaagcttgaaaattttcaacttggtaaaacaaaggtgttccttagggctggtcaaattgcgattttagatatgcgccgtgctgagattttggacaacgctgcacggcacattcaaggccgtttcagaacatttatcacacgcaaagaatttgtgaaaacaagggaggcttcaatttctatacaagcatactgcagaggctgtttggcaaggaagatgttcgcaaacagacgagaaacagcagcagctgtaattgttcagaagtatgtccgaagatggctgctacgtagagctcacctgcaagcatgtttggcagctctccttattcagtcttacattcgagggttcatcgctcgccgctatttctctgtcattagggaacataaagctgctacagtgatacagtccacatggagaagacggaagtttgtcatacttttccagaattaccggcaagccactgtggcaattcagtgttcttggagacagaagcttgcaagaaaggagctaaggaaactcaaaatggctgcaaatgaagctggtgcactgcgtgaggcaaagaataagcttgagaaaaagatggatgatcttgctttaagacttacccttgaaaggagactgcgggcttccagtgaagagtcaaaatcagtagaaatattgaagcgtgacaaaataattgaatcattaagtgcagaatgtgctgccgctaagtcagctgctcaaaatgaacatgccaaaaaattgctgctccaaaagcagttggatgattctttgagagagattactatgttgcagagtaaaaagattatgtcagcagaagcagcagaagaaaactccaacctaaagaacttagttgaatcattatctacgaagaactcaatactggagaatgaacttattgtgactcgcaaaagtagtgatgatacaatggaaaaattgaaggaagtcgaggggaaatgcaaccatctacagcaaaacttggacaaattgcaggagaaacttacaaacttggaaaatgaaaatcatgtcttaagacagaaggcatttaatatgccgacaatgaacaatctgtctgtagctccaaagacattatctgagaaattttctgcatcaattgggcttcccaacagtgagccaaagcatatatatgaaagcccaacacctacaaaatatctggcttctcttccacagactttgagtacatcaaggagatcgaggttgcctgttgaaaggcatgagcaaaatcatgaaattttattgagatgcatcaaagaaaatttaggatataaggatggcaaaccagttgcagcatgtatcatttacaaatgtcttttgcactggcgtgcttttgaatcagagcgaactgctatttttgatcacgtgattgaggccataaatgatgtcctaaaggggaacgaagctgatggtagattaccttattggttgtccaatacctctgcattgctatgccttctccaaagaaatctgcggtcaaatggattattcactaccccgtctcgtcgttctggtggagctctagggaagatagcacaaacattgaggtctccttcaaagtttataggccgcagtgatactctaccacatgttgatgcacggtatccagccatactattcaaacagcagcttactgcatgtgtcgaaaagatatttgggcagctcagagataatctaaaaaaggaaatatcacctcttcttaatgtttgcattcaggctccaaagtcaacacgtgggcaatctggaaaagcatccaagtcatctggagttggtgcccacccagcatcgaactccaactgggacaatatcgtcaatttccttgacttacttatggatacattgcgcgaaaattatgtgccatccttctttatacgtaaacttatcacacaattattctccttcatcaatatacagttgtttaacagtcttcttctccgacgtgaatgttgtacattctccaatggggaatacgtgaaagctgggctatcgttgttggagaaatggattactgatgtcacagatgagtttgcgggtacatcttggcacgagctcaattatatcagacaagctgttggatttttggttatacaccaaaaaagaaaaaagacgcttgaggagatcaagcaagatctttgcccgtccttgagtgttcgccaaatctatagaatatgctcgatgtattgggatgacaaatacggtacccaaggcatttcaaccgaggtggttgctgcaatgcgggagatggtcaacaaagatacccagaatcttgtgtcaaattccttcttgttggatgatgacttaagtataccattctctaccgaggatctatcaatggcaatcccgtcaatagattatgctgacgtcgatcttccagaatctcttcagcactatacatcagtacagtttctactaaggcagcaggatccacagcctgcccaatagaatgaatgtggtcagcctgccctgaagatctgtctgtcccctggttttattggggtaacatccatctgcgatgttgtattgatgtttagagagtacctagtttggtggagtggacacaatttaaaagcaaccattgttgctagatgccaattcattggtgttcactccccaagtatttttcattgtacaggaaatgttgtaagtctgttgactagcgcaaaattagttatatcagtggtaaattgggcaatgcgcatcagtgcatcaccgatggtatcttctacacatgaatcgttagccagttaaccgctaggtcgggcgatcataagctccaggctgtctgatatgggttcgtgtgggtctgtcgcgggacg

SEQ ID NO: 20179 - DNA, 234 bp, Zea Mays
ccacggcagccgccgcggtcgccaccgcaggcggaacaacaacaagtttcccctcgcccgaccctgcaacgtaccaacagttaaaaaaaacctcgggctatcgacttaccaacgagataatcgtccacgctaatatcggtggcgaagtcagcaacgcgcttgctcggcggaggcaattatcgggccttcgcaactccggccgggacagacttggttccgccggcggcggccgcc

SEQ ID NO: 20180 - DNA, 6165 bp, Zea Mays
tacatagagcctatccattccaccgagggagaaatggaccaactcataggttttcgatccgacgaccacgtccttcacacggagttgcttcgccttgacgcaccctccgcgatcacgctgcgtgccgcagccagttccctccggaaccgccaccgccgagttttgaggcccaaactctggtgggtttgaggcccaaaccaccaaacctgccgtgagcaccgcacttcgtgcacgtcctccacgatcagacgcgtgtcccgccagtccctgaccacaccggcaacatggtccattccaccacgtcctcgcataagtgtgtgtcacaggtgtcagccaccacgattggtcaattgactgctttgatccgccagtcaagacccatcactcgtcccttcaccgctccgggtccatcagtacgagcccgcatgactttcacctcagtcgtcgaccaccgttcctgtgctccacacctgcacaccacaagtcgaccgacatggttgcacaagcataatctcacactctggactaacatgcaaatacggcgcaaatctatggtgcaatgtggaaaagcgttggtcgggttttgcggtgccagcgacggacatgagcgtggagagcccaggggagctagggttctgaagcgcaccgtggggcacagcgtggcgaacgacggcccccgacatcctgctaggttttccatgggagatgggggagtcgcgtgcgccgtccgctcagtcgagagcttccgtgccggcgccctcgtgaggagaggaggagcgggagaagcgatgccggacaagggggagagggcccatggccaccgccaccagcaccagcactggaagaaccagcagtcggcgacagctgctgacctggaggagggggagctgcttaatggggaggccgggaccaatgggttgcccgagaggagcatgccacctaagaagtggaggaaggtgctggcagcctccgcagctgctgtggaggtggagcctggggagattgtgagtacaaagcaagcagtgccattgaagaaggaaagaagaaacggggacgttgagaaggtagagctgctgccagagaggcagaggaaggaaaagtcttctgggaagagcaccaggaagtctatcaaggatgatgtggagccaggggagattgcactgccaggaaaaaggcgggatgccaagtcccaactggcccatgataacagcaggaggccaagttcgtctgcccagaaaggctccttgcgggattctgatgaagaacctggtgaaattaagccagagagcggcatcagtggcagtgtaaggaagaaccggccaacagagcctcatagcagtaaccacaagcaccacactgacacctctgaccagtcaggatcaaaacatcgcaggaagggagaaggaaagagttcatctgctgccagacatttgtctgggagaattcgtgaggtctcgccaccaacacgggatcggcgtgataagcacgagaggagcccaggcatcttgggccgttttcctcatgaccgttttcgtcatgacaggtatgacaggagcccgagccgcttggagcgttccccacatcgcactcgccactatgatagcagagaccgcagtccatatatttcacctcgacatagagctcgtccgccccaattcagggataacacaccaagtcgtgttgataattcccctcgtgggagggtccagcatgaagatatcagagaccgtagcccatttcgtcatgacaggtcgccttctgaacgttgtcgtcctactgacacgcatgaagcaagcaagaagagcagaagtagcaacaactcagagaagtcacatcacaaaagcaaatcagcgaagcaatcttcaaaaatcaagagtggtagcaatgggaagaatgaggagaaaatctccaaagaaaagcacactgaaagcagtcagtacactgaactgccaccaccacctcctcttcctctaccaccgccaccaccaccgccgccgccaccgccacccctgccgcctgctgtaccacctccattgcctccatcaccagaacctgagccacctggagttctagccgaggatatgatagaagacatggatatctgtgacaccccacctcacactagtgcagtacctgaacccacagaaccaatttgtgatatagggaggtggttttaccttgatcacttcggtatcgagcaaggaccttccaaacttgctgagctgaagaagctggtgcaagatggatatcttctttctgaccatctgataaaacatgctgatagcaaccgatgggtgactgtagagaatgcagcttcaccactggtgccatctgatttcccctctttatattcggacacttcaacacagttggtcaacccaccagaagccccaggaaatttgctcgatgaagctctagaggaggcttctaacttggcatcaggagctgaggataaacaaatggaggaaacgtctgcagaagatagtgaagaattctgcattgatgatagggttgaagcactgatggatggatcaattttggtgcatggccaggagctcgagatcattggagagcttttaggtgcagattttcagcctgctgattggcaaagatggagtcgtcgtgaagattttactaggctcaatgtgcacactgaagtaaacaatgaaatcaatggaggcacagaaaatagagcaacagatgcttatggtcttgtttctgtggagaagaactttcatcataacgctgagtctagcgaatggttttctggtagatggtcttgcaaaggtggtgactggaggagaaatgacgaactaagccaagatactccattcaggaaaaaacttgttctcaatgaagggtatcctctgtgtcaaatgccaaaaggtagctgtgaggatccacgccggccctgcaaggatgagttgtactaccctgtacgtgctaaaaagtatgaactgccattgtgggcattctcattgacagaagaagatattgatagtgttaatgacaccactaaaagcggtgttgtgcctgggaggccaggtcagaccagacagccttctaggggagtgaagggcatgatgctttcagtggttaggataaattctcgtgttgttaaagatcaatcatctgttgaaccccatacaaaacccagaggaactgatcgaccactgtcgaggtcttcacgctcccattcaattggagctgagagaagttctgtccatgaaggttcgtctcatttcaggaagcaccatgaccatgattcacaaagttcgcacaagtccaagcctgttccaaacattccaaaggaccgtgtatgcactgttgatgagctgtcagtttatcggggtgactggtattaccttgatggcactgggcatgagcatggtccattttcttattctgaattgcaagaattagttaaaaatggcactatcattgaacaaagtagtgtgttccgtaagattgataacacatggtttccagttcttaaggatttaaaacctggaagctctgttcccagtgcagcacgaagctcaagttttactgctgctcttatgctcccagaccaatataattttggtgtgaaccaaggatcaggtagcttcaatcagttgcacccccagtttgtgggttatacacgtggtaaattacatgaactagtcatgaaatatttcaagagcagggaacttactttagctataaatgaggtcttggatccctggatctcagcaaagcagccaaaaaaagagtttgaagcatacttctcccacaattcagcatctagaaatttgctgccagaagatggtgggtctgcaaaaaaggcaaagttgctacctgatcagagtgatgaagatattcatttgtcacaagacattcttgccagtcggaaggaggacatctgttttgacgagctatgtgatgcagaaccttctgttgataatgattctctgaatcccggagcaggaaatgaaacctggggtctactaaacggccatgtgttagcaagaatcttccattttatgagggcagatgtgaaagcacttatttcttctgcagctacctgtaggagctggaatgctgctgtgaagtattacagaaacatgtgtagattcattgatctgtcttctgttggccctctttgcactgattctgtgttttgtgatattatggctggttatgagaagcaaaatattaggacccttattttagctggttgttcgaatcttagttcgcatgcccttggcagagtacttgagcagcttccacaaatatcttatgttgacatccatggttgcggtcatctaggggatctgaaaaataaatttcagcatgtaaaatggatcaggagctcattgaatccagaggagtcatatcggaaaattaaaaccttgaagcagataggtgatgggaacaactacgcatccaaagttgcaaggaacttcaccaatcatctggatggttctgatgagcttgatgggtattttgctgatatttcaaatagagagaatgctaacctttcatttggacaaggtttctataaacgatcaaaattgcttgatgctagaaagtcctctgcggttttgtcgagggatgcagaaatgaggcggttgatgcagagacaggcagagaccagttacagaaagatggaagagttcatcataaacagactgagagaaattatgaggagcaacagatttgattttttcattccaaaggtttccaagattgaaggtaggctaaaaaacgggtattatgctcgccatggctttcgtaccatcaagcatgacatccgtaccatgtgccaagatgcattgagatataaagatggcaatgattcgggagatataaagcaaattgttgtctccttcatacagctagcaaagagactagggaacccaaggtacatttctgatagatatggagcaggagcccaggacagcctggacattaatcaatattcatttgatactaaactcaaaaagaagcaaaataaaataagaggagcaaattcattggctgctggagcagataattcatctcgtgcatttgaccttgaaatcaaaagaagcctatctaaattaaagaaaaaggatgtctactctggtagcgaaacatctgatgatgatgatggctactctgaagttgatgaaactgagagcgaaactactgtttctgatactgagagtgaccttgatgtaaattctggagcctgggatttaaaaggaaacagtctaaagttaattgaacctggggaatctgtgaccgatgatcgtatattgggtgcccgcatgacaaaggccagccttgttcctccagttactaggaagtatgaagttatcgaggagtaccttattgtagcagatttggaggaagtacagcgaaaaatgagagttgctttacctgatgactattctgagaagttgctgtcacagaagaatggcaccgaaaacttggaacttccagaggttaaggattatcaaccccgaaaagtagcaggagatgaaattcttgagcaagaagtatatggcatagatccatacacacacaatctactgagtgacattatgcctgctgatcttgagttgtcacctactgacaagcatatctttattgaggagttgcttctgaatacattgaataagcaagttaggcatttcactggttcgggaaatacccctatgacttacaaccttaggcctgtcattgaagagatccaaaggtctgcagaggataatggtgatagacgaacttcaaagatgtgcttggggatgctaaagaccatgagaaatcgctctgaacagaacttcgttgcttatagaaagggtctcggtgttgtttgcaacaaaaaaggtggatttggtgtagatgactttgttgtagagttctttggggaggtttacccttcttggagatggtatgaaaagcaagatggtattaaacatatacaaaacaacagtgaagatcaagctcctgagttttacaacattatgttagaaaggccaaagggagacggagatggatatgacttggtttttgttgatgcgatgcacaaggccaactacgctagtagaatctgccactcctgcaacccaaactgcgaagcaaactgttctcgcatatccaccttcattctatttgatggagcacagtgcaattctg

SEQ ID NO: 20181 - DNA, 572 bp, Zea Mays
tcatatgtgcaccaagtaaaggtccacacatacaatgactcagtgtatagagacaaatgtcataatctttattacacaatgaaaatgtcttacaaaataattgataataaataaattgaactaagataattatttcctcggcgccaacaattgactaggagacgacacctagatctcatcgtagtagtctcctctggcgataccttttcttctcctgtggtgatgtcacgaagagatcgactcgcggtgtggggcagattcatggctgagacttccgtcggtgtgcaatccaccgtgagcagggcatctccggtcccgagtgatgtctgcactagcttccatggctccctggtgacatccacagtgcgctcatccaggatgaatcgatggcgagtcgaagattgcgtgcggtggccctgtactcgctttcctgcgcgtggtggtgatcctctcccataatacggtggggcatggcaagggctaggcatgggcatatagatgggcctacgcctagaggattcatggacggacggtactcggtggtggttgtaacaaagtccgtgtagtgtggt

SEQ ID NO: 20182 - DNA, 3073 bp, Zea Mays
ctctatccaacttcacaagcactgggttatcttgttgattggtccaggtcaagcaaattacgaataagcccacaaagtgagaaaggatcagaagttattattgatttagaagcactgtctggcttcactgaattttttcttgagatccaagataatatatttccccatcgtattgctgcttttggagtgtctttacaacctgtttcttataacttgcctgtgccatcacaagtagtactaatagctccaagatatgttctttcaaatgagtctgatgctgcaattgctgttcgtcaatgttttgttgagcacggcattgatggattgacagttgaagctaaacagcgggctgctttacagacatggaaacctgggaaaaaacgagaagtaaattactttgatttatttgttaagaagcacagaaatgtttttgaggattctcacatttttatccagttctgtccaaaagaacctggatacagttggtctggaccaatctgtgtttcatcaattggtcgttttttcttgaaatttagaagattagaaggaatgctggaagatggtattaaaagagaccctttgaatgctgggaagctgaaactatttgcttctgtcgatgttgctcaagagacaacttcttttgtgctacacttcactaaaccaccgaaggttacactcccatatcgaatagaaaattacttgagcgaatcatctatcctgtatttccagaaggattcagttgattcagatgtattacaccctcaagagtcagaacagtatgcttgggatgatttaagttcaccgcgcaaactggttgtccgaattgttgatacacctgcattgcgtgaaattaaaatagataaaatcagcccatggaagccatttttgaagatgcgccaaaatagcaggcttaatctggatttctcattcagtggtggactcaattcgagaaaacagagatttgatgaatcatttggcttgagagtgttcaaaattggctacgaagtgtatgccgatggtttaacaagagttttacgaatttgtgaacatgcagataatcccaaaattgagaaaattcaatggccaatagcaaatatacagttcagaatttcttatgtgtgtattcatcttcttgacaaggaccagaatggggaaaatgtccaattgccatctacaattttagcagcaagacttcagcatgtttcttctgattcagttgtcacaaatagattcaagcaagtatctgttgcaattcattcattgaatgtggatgaaaaatgggaaggggcttcaattgggacaattcttaggaggaacaagcttcaggatgctactctcgatgaaaatattcttcgtatgatctttgtactgaattcaactgactccagtgtcaaacaaatacagtattgtgccatcatcctacagcctgttgatcttaagattgatgaggaaacgttaatgaagctagtaccattttggagagcatctcttgcaccttcaggcacgacaagcacacaattttatttcagacgttttgaagtacatccaattaagatcatagcaagctttcggcctggtggccgacgcacaacatatagttctgctcaagaggctctgagggcactacttcatagtgttataaaggtgcctgaaattagcaactcagctgtggagctcaatggggttctcctaaatcatgctttagttacatttcgtgagctacttctaaaatgcgctcagcactactcatggcatgtttaaatttataagcaagaacatgaagtcgggtggtttttctggaacaaaacggtaccttggtgatctcgggaaaactgttaaaactgcaagttcgaacgctctctttgctgctgtcacagaaatttcagatagtgttgttagaggagcggaaacaaatggtttgaatggcatggttactggtttccaccagggcatgttgaggttggcgatggagccatctgtcttagggcaggctataatggagggaggtcctgacagaaagatcaaacttgatcatagccctggacttgatgagctatacattgaagggtacctgcaggctatgttggatgtcatgtataagcaagaatacctccgtgtcagggtgattgatgaccaggttatactgaagaatctaccaccaaatagcgccctgataaacgaaatcgtggacaacgtcaaaagctttcttgtgagcaaggcactgttgaaaggcgattcttccacagttcgaccgatgcgccatctgcgaaatgaacctgaatggaggattgccccaacggtgctcaccctctgcgagcacctttttgtgagcttcgctgtgcgtgtgctgcaccgggaagccagcaaggccatcgctggagtcatgtcgagagtgaagaaaccgaccggagaggaggtcgaaggcgactcgcccgcatctggtggcgtcctgtgtaagcggaataggctgtggactgtcgggaggtttgccgtctcgggcatggtcgcctatgtagatggccggctgtgccggcacatacccaaccccatagcccggaggatcgtcagcgggtttctactgagcttcatcgaaaacaggggcaacgaataagcgggcagccggacaggtgataaaagggctcgccttctgccacctgctaataaggcgtaccatggaccatggtaaataggcgtgcacgttgtacaaagaaccgaggtgtggtagtgctcttgagccgtaaccgatctctgcatagagctgtgcatcaattttgaccgccttcaggcccacgtttggtgtacagaaacactgggacagtaattccgcagatgctacttcctgcctacatttcgttgacatggactcgtgcttagagtaagtttaatagtccacaacgagccttttcacataacaaactcggttagaggccctttcacatagtctatctatatcatcttattatacttgttctacatgcaaagtgataaatagcatggctatgataaacgtatggagccgttggtgtgttgatcatgagtcactccactgggtatatctctaattttattgttt

SEQ ID NO: 20183 - DNA, 1293 bp, Zea Mays
atgcggtcaatcaagtcagttcttgcaaatcaaactttgcgacacttcagccatggcaaagaatgtttctagggcagcttggaacactgtgtatgagaaaggtctggttgatgtgctccttgaacataaggacaacccaaagttcaaaagtcaaaatggttggactgctgagggatggaacaatatcacaaacaagttcaatgagaggtatcctcttgcccattactccaaacagcaaatgcaagacaaagataaggagcttaaatctcattacaaggcagtaagagattcaaggaaagaaagtggggtgggttggaatgattccctatgtatgatagtggctgagccagaactttgggaaaagctcatccttgctcacccaaaggtagcgaagtaccaaaagaagccatttccattgtactactctttggaagccctccacgaaggtagtgtggccacaggagatttgaatttcacatacactcagcaaatgccacctccttctttcattcctgttcgtcctcttaatgcccctcctggtggccctcttgctgcccctcctagtggccctcttgctacagctttcggttctgctactgctcattcgaacaggagtacctctgaacaaagccactctcccttgcaccccaacacaaacccattctccatggatttccaagaaatatcaaatgaagctcaatcaggacatgtagaaggtggaaatgggagaaagcgcaagcaaagccaaattggagcagccattgaaagttttgtggattttaagaggagcgccacatccaaaacgctcgaaggtattgaagaagtgtctatggaaaagtgtctagacaagttggatagaattgatgggttcacagatgaggatagatcatatgcaatggaggtctttgaatctgcgataaaccgagaggtgtttatgaagtcaaaaaaccacaatgctagattactttggttgaagaggaaaattagtgtgttaagtggaagcaacacatgaagcagatatggagaaggaagctggcatgaaactaaaacgcattaagttgacacgtggtgtgcatgttttagatgtcttattctactgccaaacttcctaatactctatttttatattataatgtctatctgtacgtgtgaatggagataatgatattatgtgatgtgatgatggatggattagcttcgttgaatattacatgatattatgtgatggtgatattaagtggacattgcagtgttgatacatgcttcatatttctggatttttagtgatgtttt

SEQ ID NO: 20184 - DNA, 3052 bp, Zea Mays
cccaattcccaaactcagatccaagcaaagcaaacatcacggctcgtcgcagtcgtcttcctccccacgcgaggccagatccaacctgcctcggccgaccaccgccatggctcccacggtcccttcggcggcgaagaagagcgaggtggcagatctgaagcagcagctgcggcagctggcggggagccgcgctcccgatgcggacgaccagcgccgtgatgtcttcaagagggtgatctcctgcatgacggccggcatcgacgtgtcggccgcgttcggggagatggtgctctgctccgccacctccgacgtagtaaccaagaagatgtgctatctctatgtaggctcccacgcgcgcgcgcacccggacctagcactcctgaccatcaacttcctccagcgggactgccgtgatcaggaccccaccattcgcggcctcgcgctccgcagcctctgctccctccgtgtccccaaccttgtcgagtatctcgttacgccactcacgaccgggctgaaggatcctagcgcctacgtccggacgatcgctgctgttggtgctgccaagttgtatcacatatctgccacagcttgcattgatgctgaccttccggcttcgctcaaggcgctcatgctctccgatccagacgcacaggtagttgccaattgcctacatgcattgcaggagatctggaccctagaagctgctaactcagaggcagcagcaagagagattgagacattgtatagcaagccagtggtattttacctgttaaacaagatcaaagagttcagtgaatgggcacagtgtattgttcttgagttggcatcaaagttccttccatctgataataacgaaatatttgacataatgaatctgctggaggatagacttcagcatgcaaatggagctgttgttttggcaacgattaaagtttttctccatttgacaatgtctatgactgatgtccatcaacaggtttatgaacgtattaaagcacccttgcttactctggtgggtgctggcagtcctgaacagtcatactctgtgctatgccatctacatcttctggtgatgcgtgctccaatgttattttcctcggactataaaagcttctactgccaatttagtgatccttcatatgtgaagaagttgaaacttgagatgttgactgctatagcaaatgaaagcaacacatatgagattgtcactgaactatgtgaatatgctggaaatgttgatgtaccaattgcaagagagtctatccgggcagttggaaaaatagcactgcagcagtatgatgttaatgccattgtggacaggcttctacaatttcttgaaatggataaggattatgtgactgctgaaactctagtcttggtgaaagatcttctcagaaaatatcctcaatggagtcatgattgtatagcagttgtgggaaatatcagcagcaaaaacattcaggagccaaaaggaaaagcagctctcatatggatgttgggagaatattcacaggacatgcatgatgctccatacatccttgaaagtcttgttgaaaactgggatgaagagcactctcctgaggttcgcttgcatctcctgacagcagtgatgaaatgtttctttaaaagacccccagagacacagaaggcactaggggatacattagcagctggtctatctgacacccatcaggatgttcatgacagagcacttttttactacaggcttttgcaatacagtcctaatgtagcagaacgtgtagtaaaccctcccaagcaagctgtctctgtatttgcagacacacagagcagtgaaatcaaagatcggatattcgatgagttcaacagtctatcagttgtatatcagaagccatcgtacatgtttacagataaggagcatcgcggaccatttgagtactcagaggatcttacaggcttgactgaggatccagaaaatgtaatttctgcccaaagatatcaagaaaatgataatgatcttttgctaagtacttcagataaagaggacaatggtacaagagccagcaatggttcttccacctctacatacaatgctccttccgatttgattagtccttcattgataagctcgcaagcaccagctgaaacttcactagtaaatactggtgggacatattcctcacaatcaaacttcagtctcgatgaccttcttggccttagcgttactgaagctcctgctttaccacaaccaacactggcccttaactcaaagcctgtgctagatcctggtacgttccagaggaaatggggccagctagcattggcactgtctcaggaatgttctttgagtccacaaggggcagtagctttgatgaatccccaatcactcatccgtcatatgcaaagcaatcacatccaatgtattgcttcaggcggtcagcctccgaactacaagttctttttctatgctcaaaaagatggggctgctgctttcttccttgttgaatgtattgtcaacacagcatcagcgaaggcacagctcaaaatcaaggctgatgatggaactgctgctgaggcattctcgagtttgtttcagtcagccttgtccaaatttgggctttcttgatcctgagtaatttgtctgagcgattcaccggtccacagttttttatgggtttcacagtttgccccaactccactgtcttggcttgtccagtacttgtgatcatattattggagaatcagagtagaaggtgcaaaagggtactggagttttgcggagctaaaaatcctatttgtactatttgggtgaactgtgcatttgtacatgactacatgtcacccagataaatagctgggttatttaggactgtactgtttgatgttctgggttatttaggattgtgatagtttgatgccttgatctcttctgaagggtttcgtttccttgaaggatgtagaaacaacacgcaacaacccctttcatgtatgctatttaccatttcttgcacagatgatcaataagatgtttcgtcttccattttgattcgtattatttagtactattttgaca

SEQ ID NO: 20185 - DNA, 2130 bp, Zea Mays
cgcggatctccctgtcgcccccaaccaccttccatccctcgtgacctgttcatgccgtcgccgcctcgatcctgtggatctccctgccgcctcccacgtccgtgctcatgacctgttccgcgtccgctgtcacccccagatcgcgcgaggcccatgtccacgcagtcatcgtcgccgccccctggccacgcgagatgccagcgccccctccaccttgcgtgagcgaccccttcatctaccttcaccaccatcttcaatccgcctctgcatcaccgccaaaaccctacccacttccctgctgcccaacaatgaatctgcctccgcaccaccgccaaaactctagcaactatggcagtgaacaacatccggtttcaagtctttggcagctatgctcatggaaaatacgtctatgttgatggtgaccgatctgttctcgcagaatcagcaaaggcttgatatcattgttgttttgctttatcatttgggcatttgaagcaaagctctatggagaaaaggcagggaaatgttgtctttctcatttttgcaggctgacgaatttaatgcagtggcaagagttggggttgctgctgaccatcgtggaatcatctgcagtcgtcgtgtgtccacactccctaacatgttgagcctcttgctgatcagatcaggcttgagaaggaaaatttggttttaataagtgttcttgtctggttcgattaaagaaagattcagtaattgtcttttttaggaacatagattcttcatctgtgtataatgtatttttattatctagattgtgatagttatttcaaggcctggtgatcgtatagcttgaccattgattgatgattatctgttgtcttaaggattggtacactgtatgtgttctttggtgttggtggtactttgctgacttctctatttatggtatcaaatatatctattgagtgttggtacttcaggtgcactatttagactattgggatcaatgctgtcagagctcataataaattggacgatatacgagaacaaggtcaattctaaaatatatgcagtattgcaatagtggatggaaacagaacaaaatagttgttccttgcaggtattgcaatatctcaaaccagataaaagtaaatttttactcaggtattttcacctatcttattacaattcatcaaggtattttcacctagcttattacaattcatcaatcttgcttcactacccatggtaacttgattattttcatgcactaactttttgacgtcctatttcttttcttttcccctttcacctcaaaacactcattttcatctcaaagcactaattaccagatacgccaatgtcatttaaattaattttcagcagtgctattattttttctgctatttgttttggaccgattaatattttgtgtactcttcctatttattcgtgggactgtaactgcaaagcttgtaactcaagtcatatgtgtcttgtgcctgctgttgtagctatggagcagaaaattcatgtgaacccactgaagatactaagccaaacgaagtgtacacatattcagaattctagctcaagctgccctaatcaactgaggaggataaggatgccgtggattttgagagggaggagcccgccaattgccagaagtctgtgcaagctgatgcaaatgcgacagctgccccgtctaaggctgttggcttcttcgggaggacattatacaccacattaattctgcttgttgcgagccatccagatgtacgatgacactatcatgcaaggcccactatcctctttgttgtcctctcatggatcctggtccagtggtggaggctgaggaatcagaaaggccctagatcatggccagtcatcgacgcaacggtggagcttatggctggaagtaatatgaagagtctatatctgacaaaaaatcatctaaaattaaatagtgagataagctttgaatagctgatgtaaaattatggagtaacattgtattagttgttgacaaaaaatgtgagaaatttaggtcaataataatatatgtattgtttgtttatatgtacttattgtgcactaatattttatcatataatttgtttgttgtcgtaacgcacgagcgtgcattccgac

SEQ ID NO: 20186 - DNA, 3939 bp, Zea Mays
gaaaaacaaccaacattttcctttcccattttctccacccacacgatctcgtcgtctcccatcccggcggccgccgcctccccctccccctccccctcccctccgctccctcaccctaccaaaaccctagccgctgaaccccaagcgccctcgcgctcgcctctccccgccgccacggcagcctagatccccgcgcgccccgcgtcgccagcttcggagcttccgcatctgggttggtggtgttctgttagggttggcccaccatgcctcggagttcgcgtcacaggtcgcaccggtcccacaggcggggagggtccgctgaccggtcggagtcagagggcgaggagtcggctccggcctcgggcgcgcgggaggaggccgcggcggcggctagggtttccaaagatgccgagcccgagaggcgtcgttcgtcctcggggaaggagcccgtgagatcggggaacgggtacccggagcacgggaaaaagaggaaggagagggttgaggatgccgtggtggatgtggtcagcgaccggtggaatagtggcgtctgcgacgatcacctggtcgacaagaggtccaagagtgagacctttgggcatgctgaaatggagaaactgcccgacaagtccaggggatcgggggatgagtccaagaggtcaagcagacgggcgatgattgtggatgacagggccgaggaggttgcgtccaagagtgactctgggaagcggaggtcagagaaagagaaggatgggaggaaggagagtgctgggcattataaggatgacagagatagggagagggagaaggaaagggaaagggacagggaaagggaaaaagaatgggagcggcagagggagcgagatatgggaaggagtagggatagagagcgtgagaaggaaagagaacgggagaaggagagggagagggagagagaacgggaacaggaacaggaacacgagcgtgagaaagataaggatcgagagcgggatagggaaagggagagggagcgtgataggcagaaggaccgtgagagggacaagaaagattatgattccaagcatgagaggtatgaggatggcggtagcaggaagagtggctcaaagacgagtagggcggaagaggatgcctacttgtataggagagatacagatgtcaatgaaatttcagcaaaagggaagtacaataatcctgatatgcaagctgacaaacacagccgaagaaaagatgattctgaagatacagataagtggcccactgacaatagagacagcgatgacagaaagaccctgtccagatatgaacatggtaaatctaggagttctaaggagcaaaggtttgatgatgacaagtataaggaaaagtacaaggacgaatatggaagggataaaaggcaacatgatgacaagttttctgatgagcgagtggctcgtagtcatgaaagtgatagagctaattataagagtgctaaagatgggcacaaaagctcagagagccattacagaaaggatgcagttcaagatgatcattatgaggattatggcaacaggtataaagaaagtagagggaaaaaacgacctcctgaggaaaatgacgaccaatacgatttaaagcctccaaacacacgtgatcaacgtgtgcatttggaaaaatcttcaggcagtgggcgtctggattctttgattgagagagcaagacctgatcgtagttgtagtccaagtaaaatccactcaagaagttcacctagcacaagttcttatcatgataaagatcaaaaccggcatggatctaaagtggtagatcatggaaagagagaaatgccatatgatgagagaaatagtcgaccaagaacatcttctgctagagaaaggacacctgcttctagacttcgtgacagggatgcagaaaattggtcttctgaaaggcttaaacagaaggatgaccagccttgtgatgtagcattggaaattcctacatcatcacactatgatcgcacacctaggaaagataagcatacttcaccaaaacaactgtctgaaaaatctccctcttcaggtgatcagaggttttcaggcaggcctagtggtgggcgcagtctagataataaaggagaaagaaacagccttacgaaatacagagatagagatggcgacctagcccaagaacgatcacatcatcaagatcgaacaccagctaaagttccattcagagagctaacaccatcaaattcatccataagtagaagttgtcatttttcaggcagttcaccaaatcatcctctgccaccttctgcaaggaatagcgactcttccttccttagtctgcatgatgatgaccgtaggcctcaaaatggagataggagattccatggtcatcaaaagaggaatgacatgaattcggttcgtggacatggacatgcctggaacaatccgccaaactgggcttctccagtttctaatggatttgcccccatccaacatggtggtcctccttgttttcatccgcctgtccatcagtttcgaggcccacctatgtttaaccttagacctcaaatgaagttaaaccagcctggagtttcatatcccatgcatgatgctgtcgataggttttcaacccacatgcacccatttgggtggcctaatcatctggatgaatcatgcccacctcatatgcaagtttggaatggaggcagtagtgtgtttccgggtgaaccctatatttacggtagacaagagtgggatcagaatagacctcatggtggcagcagagggtgggagctgactggtgatatatccaagggaccaaatgatgtgccggatgctgaacttctgatagctaagaaggatccttactctgcaataactgctgtttctgattctggtggacaacataatcttcaaccccaggctgagcaaaaggagattggacacttgactgctgaaaaatttgaaacaaaggatgattctaaaagttcaaaaagtttggaatctcttcaaggagtacaacatgtgacttctatgctgacaaagaatggtgcggtcttttgtaaagactatctagccagaatcaatgtttcacatgaccttgttgagtctgagttgtacaaaaggtgtatatccttgctgggagacttgggcgtaacaaaagcctctcatttggttaggaatggaattcaggataacgaaaatattgaaaaaatgtctacaaaatatggacacctcaaccctttcagttcacgttacctcaagagtgacagtactatctttcagagggctttggcccttcgtaacaaccagactcgaaagggtttaattattgtctccgcatctgtaaaaatggaagcgaacatggatgtactagaagatgaccatggcaaggaaatgcttgaacaagtggtgagcaatcctgctctgcaacgtcacactgaggtcatggaggaaggatcactgtcaaaacaggaacttggtgatggcatagaggggactattccagcaactataggatctgggggtctggatgcacctccagaaattccccaacctgaggtggtggtggcaacaacagcaatcacacagtttaacaaggacatggaggatgtgttacctccagcaattgaggatggtgcactacaagcaaccctcgaacatgctgttggcatactggaagttacacctggtgatggcttggggaatgttgcaccttcttcaggtgatgacatggagattatgccctctgctatgacagaacctcgactaggcaaagaaactgctcctgttgctagccctcctgacagtcaagagaagccatccatcatgcatgattctgagacagcgacaagggccgaggaagctcgagacatcgctcccctacgtgtttgtgaaggcaccatgggagatgggttgtgaggagtccaatggattttaaatacctaagattttt

SEQ ID NO: 20187 - DNA, 506 bp, Zea Mays
gcatagtgtgaaatcttgatatattgattactaactcagatttccagctaaaaagcttagggcactatggttttccccgcccactaatgatggctactctggaactggtacatatggacctttgccaaggatattcatttcagaacttcttgtggatgagttgactactcaaagccaggaaattatacataaatacattaaaacttctggcaatggaaataatcatgctgctattgcaagtacatctggggagctaacatgggagaagcccatttattcagatttccagattttgtctagggaaagtgaatatgctgcatggactcttgttaatggctatgcactaaatcatgccacaattgccacccatcgcctagaatcagatatcagaagtattaataagttcaacaaatttgtggaggacaatggcttcaagttaaattcagaaggagggattctgaaaggcctgctgcaccagatcattattgtccttcagtacgagttcg

SEQ ID NO: 20188 - DNA, 1832 bp, Zea Mays
cactgatccaccgaaagcacaaccgccgccgtttcttcatctcccatcttcgtcgtcttcgcagcaccggcgctccattttccgctctcggcacgcaggcgacggcggcggcgctcaggcttgggatctcaacgacggagtcagcggtttcccctccccctctcgccagccgcctcgcgccttcgcctccggtcctccgcacaccggctggtgaccctgcgtgcgtgcctctctctctcctcccgccttcggtggatcgtcaacgccgccaggccccggcatctgagccgcgcgcggcctgagggcagcgagagccagcagatgctgctccaccaaggtggtcgcgcatgcccaaagcgaagcgttacccgtcctcttagcgctgaagcgtgcgcttagtgccggcttttggaaccctgtatcataccgaattgcgcattatagaaattggctaggactacactgggtttgccattggccatgacgtgtgctgcttacagtatcagaggtcctctcatgcttgctgcaaggcgcagctcggatgtgttcgctagtagcaagtcgtgcaatggcaagtcttcggtgtcttaccccgttattcagtggtggagcagtaactgctcatccttcacaatgcggcatgtcgcctcccatcatcacttgattgttaaggcttcagcaacgtggcactcaaaagcttcagcaactgatgcagccactgcttccgatgagaggataactgtactggtcattggtggtggaggcagggagcatgctctttgttatgccttgaaccgttccccatcatgtgctgcagttctatgtgcccctggtaatgctggtattgctcagtccggggatgcaacatgtatttcagatttggacatctccagtagcgatgatgttatctcgttctgccgcaagagggaagtgggaatggttgtagtgggtcctgaagcccctcttgtcgcgggtcttgtgaatgaccttgtcaaagttgggataccaacctttggcccttcatcagaggctgcagcattagaaggatcaaaggacttcatgaagaagttgtgtgataagtacaacatccctacagccaaggttctgatgatgcgattagaatctgatttggcacaagttctgttatctgcttgccagggagagttaggcaatgtttcactaacctggtcacccgaaatggcaatggtggttgtgatggcaagccagggatacccgggcccttataaaaaggggaccgtgataaaaaacgtggacaaggctgagcaggtgtctccggctgtcaagatattccatgctgggacagcactagatggagacggcaaccttgttgccgttggagggcgagttcttggtgtcactgccaagggcaaggacattgaagaagcaagggcaagagcatatggtgcggtagacgctgtcgagtggccagaagggttcttcaggcacgacattggttggagagcactgaggcagaagcaagcggcaaaataggtagcagctacccatgaccacgagattttcctagactaccacaactacggtgagcttgtagtgtttgcaagtaataaaaagggaaacggtgtaacgttcactgatttttttttggttgtggaacagcaggttgttcaaattttaacacctgcggatttcagcatgatttggtagatgtttgaaccgagattatgttcagagtctagacaagcgctagcgtgaaagcagcgccatctgaattctgaccatttgtctttcagttctcggataagtggacctcctatatgactgtgatatctcaaaccaaacacttcagagtg

SEQ ID NO: 20189 - DNA, 3286 bp, Zea Mays
gtgtagcgccgctcgccttgccggcggagggaagacggaagacgagaggtatggcgggtgccggtgcgatgggcttcccacgggagctgatggttcagcgtatacagagcttagtggaggaggggttctgggacgcgctccgccgccacaagctcgacgtcctcggcaccgacgactcccccatcccaatcaccggttattatactccgcgccagcgtcgcccgatggcaagcttcttcaacctacggtccggatcattggtgccaccatctcacagttctgttggcgacaggaacaattgcccagttccagggaccctcataaacactaataacatgaggggatttgaaaacctagatagagaacaacttctgaaagcagaagcaaagaaggcagcatccatgtatacatcattgcaaaagtggcgtacttctagtgaaacaacagttattccattctttctggttagtatatcctcagattcctctgcctctataagacaacttaaggaatggaaagcttgccaggggaactatcaaaagctgctatttggattttatgaccatggatgccgctcagattgccctggctgggttcttagaaactatgttgcctttctgagcatccgatggaagattgagaaagcccagattttctgctaccgtgaatataaagggaaccctgatctagaacagtccctcattggtgaagcatcatttccatcaccttatggttgggataaccctgaatttctacctgatgctattggatgggaaggagtaaagccagggaagggaacaaaagaaatgaaaccaaaagaaatagatcttcaatcaatgaatccagcaagtcaggatgaagaaaaacaattgatgcacttaaagcttatggggtggcgccactttcctgtgaatatagacaggttatcacatgttcgagttcttctcttgggtgctggaactcttggatgcgaagttgctcgccttcttatgacctggggtgtacggaaactaacggttgttgatagtggtagtgttgttatgtctgaccttgccaagcaatcactctacatagataaggattgtggagttccaagagtatctgcaatagctccacatctgaaagaaagatgtcctgcagtggaggttgaaagcatccaactggaaataccgatgcctgggcatcctgtttcttccagcaaaatggcaagtgtgcttgatgactgcaagcatctgcaaaccttagtggctgccaatgatgcaatcttcttgttaactgacacatgggagagcaggtggcttccaactcttctctgttcaagtgaaaacaagattgctattagtgcattattaggacatgacagttaccttgtcatgcgacatggtgctggaccaggaacaagtgggggtacagatgaagtgactactcagaaattgtccacagaaaatgctcttggtcatcaaagattgggctgttgtttctgcaatgataccgcttcccttattaatccaatttcttatgaaacactacctggacttacctcagttgcatctggcaaagcagtggagctctttgctaggatgttacatcatcctgacgagatacgggccccaggcgatactgctggtacagaaacagaacatcaacttggtctattgccacatcagctacgaggatcactccccaagtgtgatttatttgtggagctcaacaattcctcagtcaactgtactgcatgttctgttgctgtattgtcggagtatagaagaagaggattggattttgtcatgcaggctatcaactatccagcatatctgaaagattttacaggcatttctgattcgaaaagaccagatacttgtcctaaaataccgcccaacatctctgtaaattcagacaagatttctgatgtccgatgtctactattgggtgctggaactcttggatgtgatgtcgctcgcattcttatggactgtggtgtacggaagataacagtagttgatagtggtcatgtagttgtgtcaaatttagcgagacaatcactctatacttctgatgaccgtggtgctccaaaagcaactgcaatacttaggcatctagtggagagatgtccttcagtggatgcacaaggcattaaaatggaaatacctatgcctgggcatcctgtgtctcctggtgaagcagcgggtgtgctccaagattgcgagcgccttaaggaattggtgttgtcccacgatgctatcttcttgttgaccgacacaagagaaagcaggtggcttccaactctcctatgcactaacgaaaacaagattgctatcactgcagcattagggtatgatagttaccttgtcatgcgacatggggctggccctggcataagctgtgaagcttccagtgtggtcactgccatagacaagatgtccacggaggatgcccttgggcgtcaaaggctggggtgttatttctgcaatgacgtcattgctcctgtcgactcagtttccaatcggacactggatcaacaatgtacagtgacacgaccggggttggcctctattgcatcaggacgcgctgcagacctcttcagaagaatgttacaccatcctgatgggatacatgctccaggagagattgctggtacaggcagtggtcatgagcacggccttttacctcaccagatgcgtggatcactatcgcagtacaacatattaaccctgttgggctattcctcgagtaattgcacggcatgctcccatgcggtattgtatcaatatcggaggagagggatggatttcgtgatgcaagtaatcaatgaaccaacctatttggaagacctgaccggcctcacggagttgatgaaatccgcgtcttgctcacaggtcgagtgggtagatgaaattgatgaagacgatttcgtcgaggtctgatatgttacatggttttgacgactggtagatagtatcattctttacaacatggtaaagagatgacgaagcaatcaaagcaaccaccctatatatttgtaactcgctgctagctttttactctgtccgtcttaaaatgtaattcgttttaggctaaacctacattcattaatctgctccgtctcaaaatgtaattcattttaggctaaacctacattcattaatcaggtactcgtgaatgtagcttgaatgtatgtctacatttataatcattcaaataatttgaatgtggacttaaaaaaaagagggatatatattttgatacggggtgattatatatttgtaacgtacaaaaacaagtctag

SEQ ID NO: 20190 - DNA, 3766 bp, Zea Mays
cgtttcgcccaggagcgacaggcgcgggcgccacggagtgtgtgtgagagagagatagagagagagggagatgcgagaggaggtgaggagctcgtcgggggcggtggcagaaacgccgatggccgtcgcccggtcctcgtcgccgccgcacaccccggtagccagttccgtcggtgcctcgtcacctgctatgcaaactaatgttgcaagcatagattggttgggtggcaaacaagcttccagagttgactcgtcgtcgcaagttgctgcacatgcttatcacccttcccatagttttgatgcagctggcactgctatggattctgcaccatcatgcagaccatgggaacgtggagacttacttcgtcgactggcaacatttaagccttcaacttgggcttctaaaccgaaggctgctagttctttggcctgtgctcagagaggttgggtgaatgttgacatggacaaaattgaatgcgagtcatgtggcacacatctaatcttcaatgcattgacatcctggtcccctgttgaagttgcaaatgctggagaatcctttgccgagcagcttgatgcagcacaccagaatagttgtccctggagaggcaataactgtgctgacagcttggtccagcttcaccttacacaatcagctcttattggaggttttaaagaccgctgtgatgggcttttacagtttacctctcttcctgtgattgcaccatctgcaattgagaacatgaagcttacaaggagtgtacaaattgatcatctgttgtcccaatcaattacctttttatctggtattctgggctgcagagcagagagtacagcaggaattgatatccaccaagatttctcttgtagctactctcaagagctactaatggagaaaatgactatgaatcgggtctgctggaatttgatcctgttaagcatcacaatacttactgcccatgggtgaacgggaatgttgcagcggcttgctgcaacaacattggctccagctcaagtagttcagcgccctctggttggcagctaacaatagatgcagtcgacacgtaccaatcacttggtcaagcccaaaatcaaataatgcaatctgattctgcagcttcattatatatgcaggatgaccaaataactcataaccgcaaggtagggagacggccttctgtgagcagaagctttgggaagtgctgatcggaactcctgtagctcaagtgtttcctagacagaaacagcattacagaagttccagattggtgtaacaggagaaacaaaataatgatagtctcagtagattgttatcaccccgtgggtgtgagcttatagctgttttatgttgttgcatattgatacatcatatatatgtgtatttatattccgaaagggtttattcaacagtctttcatttgacagtaacattttcaagcgaactaggtacattattatggtgagattatgtaaacttcatattcatatatttatcgccgttcttgttgcgtccatgtacctcatctaatgatatggttgtgttcagatttttcttcttctgtttctttgtatctggctgactgtttcttcgcgcggggtgctatctgagaggccatcgccctcgtcaaatctcagcagccaatgagcaccacccagagtgccaggtcgtcagcaacgaccagataaagaagtggatgagatgccacttcacttcactccacccctgcttgtattgtatcctcgtcttttcccttctctccgtctatttccaagctttctccagatcaaatcagaaaggggaagggaagaacggcccagcaatgccgctctgcagcttctacgcctccacctccgttcccgtcgtcaagccccagcagtccgtcgcctcgtccaagccccccaccacggcggtggcctccgtggcgacaactgtgccgatgcgcagtgcagcgacggtgacgccagccgtggccacaacaacgagcctagcgctgtctctgcacctgccggagctgccgtcgcaggtgaaggacaagatcctgagcctggagctgatgggcgtggactatgggcgcgcgctggagcagaacccggcgctccgcgacgcggcgccggagtccatccacgcggtggtgtcgttcctccagtcccgcgggctccagttcaaggacctgggccgcgtcttcggcatgtgcccgtccgtgctgaccgccagcgtccgcgccgacctccgccccgtgttcgccttcctctccgcggacctgggcgtgccggagtcggcgcaccggcgcgtggtgatcaagtgcccgcgcgtgctggcctgcagcgtccgcgaccagctccgccccgcgctcatctacctccgccgcctgggcttccgggacagccgcgcgctggcgctgcaggacccgatcctcctcgtctccagcgtggagcgcaccctggcgccgaagctggagtacctggccgggctcggcatgtcccgcgacgacgcggtcgccatggtgctgcgctgcccggcgctcttcaccttcagcatcgagcggaactaccggcccaagttcgagtacctggtggacgccatgggcggcggcgtcgaggacgtcaaggccttcccgcagtacttcgccttcagcctcgagaagcggatcgcgccgcgccaccgcgccgcggaggacgccggcgtcgcgctgccgcttccggacatgctcaaggccaccgacgaggagttcagggagatgctcgacaaggagcgggagctgcacgagcaggcagcgacgacggactgatcgatcggggggctagtacagcggtttgcacctgatccgactctccgaagcatccaaccgccgtcttcgtggcgatcgagtgtcctggccatgacggtagccagcacatgtagtcatttgatttgagtaattagtagcctgtacatatatgcattgacattatttgctatagtcacgattcgtagctcatgagagaatatgcctgttctttctccattccaagtgaataagcacagagctggaagtcgtgtcttgtacacacgtgtaatgaatgaatgtaccaagttcattagatattatttgctctgagctgcacgcttgcgcaacacgtcttgtctcgtgtggttgtaattaatggtgtcaaaagctatggttgaaatccaaaggacaagcaaacaaatgctaatggagcatctccagtagacaaaaaaaagtttttcaagtcactaaaaagtgtagagctaaatgttggattttttcaaaccgtttccaatatctcgcctctaaggaaaaattcaagtgaagtttccttggcagcaggccagcagttcggtctccttcacgcgtggataggtcttggtccaatatgcttatgaactagtaaattactcgcgcctagcgcgagtctttgagcgatgtggttacagttacacaattctaaaagtacaatttggtaatatattaccaaaaatatattcaaattcgtcttttgagcggtgtggctatttttggtaatacatcatcaaactaataataacctttggtagcaaaggaaatagctgtcatggtgatcatgattgcagtataagttgaaaccttatcaccatgcaaaagtgatttacaaccaaataggtatgatccgattaataaatttgtagcatggaaatttaaagattaggtacaatatggcaatacaactgcgcaacatgcaacatgaatatgtggaaaaataaattaggtgcattaaggcagaggcaaac

SEQ ID NO: 20191 - DNA, 1970 bp, Zea Mays
aacaaaatgtcccaagcagatccgcaagagtccagagagaggctcggccactgcaggcgggccccacctgagcaaagacaggcgaccatttcctttccttcacctcactggctcgctcgctcgcctttctctccgtgcggcgaccacggactgggcaaccgccaccgccctccctttccctgcgctagcgacgactgggcgaacgctgcctcgcttcgtcacctcttcgccggcggcgacgatcacccaccagattactaacttctatgatcctgagggcaagaagtaatgatccgcccaggctcaaaggactcgcaaaattatgataacaataatcaaagagtccatcctcaaccaatcgacgataacatgaatcagaacggggactcaatggacactgtgatcgggaggatattcaacaacatatcctctttaaaatccgcctacattcagctgcaggaagcccacaccccatatgaccctgacaagatccaggaagctgataaacttgtcatagaggagcttacgaggctttcagaactcaagcacgcttacagagaaaaacatcctaagccaatagctgcatcccctcaagattcacgcttgctttctgaaatacaagagcagcagaacttgttgaagacctacgaggtcatggtaaagaagttccagtcccagatccagtccagagacactgagataacccatctacagcagcaaattgatgaagctaaacttcggaaatcaaagctagagaagaaactgaaacagaggggcctacttaacagggagtcggaggaatctgacgaagaagagaactacttttccattgaattgacaccaagtttgtttacatctgccgttgataatgcctaccagtcgatacatgacttctcgaagcctttgatcaacatgatgaaggctgcaggttgggatcttgatggggctgctagtgcgatcgagcctggtgtggtttacacaagaagggctcacaagaagtttgcttttgaatcctatatttgccaaagaatgttcagtgggttccaagaagaaagcttttctatcaaggattctaacatcagtgtttccaatgaggctttcttccaccaattcctcgcggtgcgagccatggatcctctggatgtcctgagccagaaccctgattcagtattcggaaagttctgcagaagcaagtacctatcgcttgtgcatcaaaaaatggaaggttctttcttcggcaacgtggatcagaggaactacgtcatgagcggcggccatccaaggacacctttctaccaggcattcctaaagctagcaaagtccatatggttgctgcacaggttggcgcactccttcgatccaaaggcaaaggtgtttcaagtgaaaaagggaagtgaattttcggatatccacatggagagcgtcgtgaaggacatcatcctagaagatgtcgcggagaggccgaaagttggcctgatggtgacgcctggtttcctgatcgggaccagtatcatacagtcccgtgtgtacctttcaggtgccaagtgtgctgactgactgactgactgaagatgcagcagctacacaaggagctagatagagggtcatttgcttcttggaatcttgggagagcttcagagctaccagctgcataagtttaaggtggactgtgctgtcctgtatgtaacgcgtgagagacctgttgtttatctgccgtgctgggttggacgccttttgccttttgtggagttttccatgtgccatgcgattctgtctaatggtacgatatgtttctgttcccctatgctgggtttccgtgtgctatactgctatgtaattctgcccaaatgtttgtacatgttatcagtgtgattggagagcctatgtgatgctcgtataggatgcacttttcatccgaaatgttttattttttttgacagatcagatgattgtattgtattgtcgtgtgc

SEQ ID NO: 20192 - DNA, 1242 bp, Zea Mays
atggatgcttttctttacatagttatgaaatttcagtgcacctgtgttgcatgggttccggagcgtgaaggaatttttgttgttagtcatgctgatgggaatctgtatgtgtatgacaaattcaaggatggaaatactgattggacatttccaactgttaaggatcaaagccaggtgctaatttcacatgcaaagtcgagtaagggcaatccaattgcaaggtggcacatctgtcaaggtgcaatcaatggcatttccttttcaccggatggtgcttacttggcaactgttgggcgagatggttatttaagagtatttgacttcacgaaagaacaactaatatttggtgggaaaagttactatggtgcactgttgtgttgctcttggagtgcggatggcaaatatttgttatcgggtggtgaagatgatcttgtgcaagtatggagcatggatgacagaaagatagttgcatggggtgaagggcataattcatgggtgatattatccttacaattgtttttggctatcatcacataggcatttttaattgaaacttgcattttgagtcaaattaatttgcgattatacaggttagcacagtttcttttgatccgtattggtcccaattaatttgcaattatacaggatacccaactgcttctctgggatctggcattggacgagattgctgtccctctacgccatccttccggtgggtcaccgacattcagtagtggaagcccttctgcacactgggataatgcatgccctccaaccggtgttctccaaccctctccacggatgcgagatgtgccgaagctctcacctctcgttgcacaccgggtacatgtagatcccctatctggcttggaattcaccagtgaatcaattgtcactatatgccgtgaggggctaatcaaaatttgggcacgacccatccatagtgaaaacaaccagcagccagattcttctgaacaggttataggcagtgccactgctaaggataagatgttaacatcgtcaaataaagcagagtagcttgggaaggcttgcagtaaaggattgaagaggctttgctagcatttttgttagccatttcttatcctgcttcatcggcaacgtttctagttacagaagtgtcattgttgccatcaatgttggcgaaagaaaataacagaacttgctcctgtacatatacagacattgccataagatgaaatattacaagcttactggtttgat

SEQ ID NO: 20193 - DNA, 1268 bp, Zea Mays
gaaacctttgaccatttctgttggggctatttaaattcatacccaccaccttaaaaacccgtttctgttgccgttcgaagattgtggcctgggaggtttgacactaagatcttttgcttataaaagtctaaaacttgaattgccttttctttgagttaagtccttttcacctttcaatgattttattacaagtctgcgaggcaggggagttttcgggtgtgacggtgacattcagatctccgtcgcggctacctgcggctaccttcaactgttctactaaaactctaaagtttggagaaaatgggagctcttgactggaataaaattgttcatcaaaaccaagggtggcgccttattagctgcatctggctccatgctggcctaattcatttggttgtgaacatgctaagtttgctgtttattggaatccgtcttgagcagcaatttggatttgttcgcattggtgccatatacctactgtctggttttggtggcagcgttctgtctgcactcttcctacggaataactacatctctgttggtgcttctggagctttatttggcctgcttggatccatgctttctgagctactcatgaactggactatatactccaacaaggcagcagctataataacactcctgtttataattgcactcaacttggctattgggatactacctcatgctgacaactttgctcacattggtggattcgcaacgggtttcctcttgggttttgttctgttggcaaggcctcaatttggctggatggaacaccacgagctgccgcagactaaccaacctcccaagtacaaagcgtaccagtatattttgtgggttgtggcactagtcttgctgttagttgggtttgtgatttcacttgtgatgcttttcaaagggaagaacgggaacgacggctgccactggtgccactatctaaactgcgtgccaacatcaaagtggaagtgcaacacctagacacctcaggtttctgttactctggcgaaacatgtagtattcagattcagaagaccattttttttatgcgtgtttgtctgtagatataaacaagttctttgttctttactgggttgaagttatgtaaactgctttgttgagctttgtatgtttataactcgaggttgatgcctattcaaaatcgttgtttagaatgctcgtatcttatttttgtttatcaaggtatgctgcagctttgaattgttggaatcagctaatataacaaaacaattataactatcatatat

SEQ ID NO: 20194 - DNA, 693 bp, Zea Mays
taggcatgggggcacgacatggaagaaattctctactggccatccacacagcattttctggggctctatgacttcaaaagcaagacgcatcaagatgcgtgctgccctgagggtatgtgcagagctgcagtgtttgcgctgcatgtaaaggaagagctggcctcatggcctgagcagagcacccgacagaggacctggctcacggtccctgaagctgcatcaagttgccgataccagtggatgcaagaggccttgctgacaggcttctctgactggcacgacaagtggagcagaggcggcggcggcacaaactgtgacccggcctaactgctgacaggcccatctgcagtcgtccaatttgttcatctcctctctttccctaggcccccaaccttgcagaatgcaataatacagtgtacttgtcttgatgctgggttggtcattgacatgttatcttagttgtagtgggacgaggtacatctcatcaagacgagaattctcacaacttttaagtgtcaattctcgtgccctattatttctcggtttcatccgctgtcgtcgcggtgctgcagcctgcaggcacgcgccgcacgcattttgtaactccgctcctgattctggagatgcatatgctatatgtatgaactggtataactttgaaatcaaaagttgccactgttgactcgagtcgcc

SEQ ID NO: 20195 - DNA, 3694 bp, Zea Mays
ggtgtaattttttattattctaatttttattataatttctatcatgcgtgtatatgttctaataaatagaaaagtgtgaacatgtggcagagtctaagtaatgccttgtacgctatgtcgtggacctatgattgaattagagaaataaagtccaaccctagaaaactctcgcatcgtcactccaaatcagccgctagggctgcattcatccacctcgtgcttatcgcctactccaacgccgactcctgctcgtcggtcgtcgcctcgtccagctctctccgcccctccagcctagcctagcccctcctgctcactgcgtcgtctccagaatccggcctacgaccgttggcggctggtgcccccaccggcaatcggtggtcatggtctgtccctgctcactccattcagatccgctatgcgcgaggcgcaactggatctatcgtattcctggttgctctctccctctccgcgggcgatgcgcctctctaggttctaccggcgtccgtccaaccggtgttcagcgtgccttcgcaggcccccttctctgccttcgatgagtgcatttggtgagtggtgacacaactgggcggagtggtgaactagtgattgatgcgcttgccggcgacttgcaaactaagtcagaatcggcttctcatcttcctatccctttgtgtgatactactactctgtatgtggaaaaaataattattccctggtttaatattatttgttcttaagtctgaaaattcactcatatagttcatttgtgcagtgttttttagtccttagctattagagaatgatgcctggtaatacctgaatcggccactgcattttattatcctgttgttattaaatttggctattagataatgccagcgttttttattatcctgaatcggccactgcattttttagtccttagctattagagaatgatgtctgaaaattcactcgtatagataaggaacgttgtctagcaacaagagagatcatgtcacaaaaaatcctcaagctaaaacaagaacatgttacactatattttattatcctgttgttattaaatttggctcggggcttcggtaatacctgaatcggccactgcatagagtagtaaacctaaaaaaaatcagactcttattgttatataatttccatggtttcttcctctatgaataggagagaaaaattgatcctagattgcagtctactaagatgcatgcaatgcgttatctccttatacagttactgttacaagttcttctccatccagatcagtattgggaggctgcacttgatgtgactatatgttggaagaaatcctttcttgtcattgctcgaggtgataactccagtgactatattgtcgaccttcacttctcgctacaacaaagatgcggtccttcttaccatccttttactatctgatttccctaaaataattttgtttgactattcaaatcatgcttggagaggatcatggcgtgggatcagaaagagcaccaacaattttctacatgttgtacaatggggttatgattacttgaattttgtcatttgttttagtaattatgtgatctgcaattgatctagcacaagcacattcaaattgaccaatttctactagtgctataactttattccgaatggatggcttccttccggaaagactaaactgaataattatgtcaaagttgtttcactagtttggcctaataggtattgatctatggtatctagactacatattgtactatatggttgattgttctgatttcgggcttggttaatctgacgtttctagcatccaaacatatagatatatgtcagctacctgtgtaccatgcacgaataatcctataaattcaggttgaatattttctgcatgtaacctaaaacttctacgctatggtctttcacttacaggttgttaaagaagagcagatgtgctattttggttggtctaaaatcaggggtggaccaacagggggtccaggggggccacggcacaccctaggccagcccagcaaggaccccacccctttgtcgcccagccgctagcacgtagctaccacgactagtgcccaggtcaccaccgccatgcctagcgccaagccaccactcacccgcacccaacaccaagtcgccgcaatcctagtgcccattgtacatgtgaacatataaagctaccatgatcatggaggtagcaggtgcagagacacccatcaaggtttcttcgtctctagtcatttgttacgcaaattcaaatacaggcttttggaaagttgaggcctatttgtgcacaatagtatactaaccattgaagattattactctcatctattgcaggtacattattctgaaactcagttcatgaaatggaatgagttcagtttcaatatagcagaatagcatgctagcagcaaacatgcacgtgcccagacttcattcaggtgacatctttcattgtctcttctcaatcatttatagtgtcatttcgagttttcatggcttgtattgtgctatgagtttttagtgcttcatggtgggcttagttgcatgaagggttctcagctttgagattaattaccaatgcaccttttgagagctcaaaagatggtcttcgcattgagctagtaagttagaattttgttaaaatttgcagatttagtaaagttattatttattggttttttaaaaaaatttgactcggcgaggataaaatagccctgggcatcatatatatagagatgaccttcttgtagtatcttatataaaaaatttgttacggcataccctatataaaaaacctaggtccgccactgcctaaaatcatatagaaaagagtgttgctttggtctacaagtctgaatctatattattgctatatggatgagcttcttactgctaattaaattacagtaacatgtggtggtgacatggcacaacaagaacttgaagaagtagacatgttgctgctgcctgcagggtgacgtctatggtgttgtgctgcgggcaaggcccacacaatgtgatcgggctgcacgccaatgttcaacatgtgccccaaccagaatgtgtatgctactactaatataacattcgtcattggttggttcaccccaagaggtttgctgcatgttcatggagctggtggataataaattttagttgttctttttgtggtttattagatgacatcaattagtgttcaattgagccttagagtaggatgaatacaactgtcttaagtttctttgttccagcagattgtttgggggcaaggttacctatgaacttcaagaattggtcttatgatattgttagtttgtacaacttagtgttaggttgctcgacttcttcatgaatgaggtgttagacattggtcgatcatgcagggttgaaggtgcttcatataactaaatctaccatgactttctaggaaaagatggaatggaactcaatttttggtggccgtacaagtgtggaaacttgaattcatatatacttacaatcaacattagcgcaaacagttgaccaagtttttcaattagtattttagtttgaatttagtgtgcaataatgtatgagttatttaacaatgcttattcatgacatattgaatgatacttatatttattatatcaattatgatgttattaaatatatgtgtgcatgtatatttctctttaaa

SEQ ID NO: 20196 - DNA, 1709 bp, Zea Mays
gctggcaaatagccgcccccgcgcccggcggggctgccgcgtgcccgcgtctgcgcagcctcggctgccgccgcctgctcccacactcaccctcacacgcacgcacccccctctgccgcgggtctccccaataaaaatagcaagccacgacgccagtgctctcccggcccgcgcctcgctctctcttgtctcgcccgctagctcccatcccagcctcccaccgcgcccgcctgccccaacatcccccctccccgctccgctccacgcacggctccagatctgctacggcggcggccggtggacgccgcgccgcgcgtgccggaggcggtgacgtgagcggcggatcctgcccggccgtgccatcctggcgacgatgacagcaaaatggcgatgatggtggatccccccaatggcatggcaagtcaaggaaagcattactatactatgtggcagacactgtttgagatcgacaccaagtacgtgccgatcaagcccatcggaagaggagcttacggaatcgtttgctcatctgttaaccgcgagaccaatgaaaaagtcgcgataaaaaagataaacaacgtctttgacaaccgtgtggatgcgctaaggacgctgagagagctgaaactccttcggcacctgaggcacgagaatgttattgctctcaaggacataatgatgcctgcgcatagaaggagcttcaaggacgtttacttggtttatgagctcatggacactgatctgcatcaaataattaagtcatctcaaccactatccaatgaccactgccagtatttcctttttcagctgctccgaggcctgaagtacctccattcagccgggatactccacagagacctaaagccagggaacctcctggtcaacgcaaactgtgacctgaagatatgcgacttcgggctcgcccgcacgaacaacaccaagggccagttcatgacggagtacgtggtgacccgctggtacagggcacccgagctgctgctctgctgcgacaactacggcacgtccattgacgtctggtctgtggggtgcatattcgcggagctgcttggccgcaagccgatcttcccaggaaccgagtgcctgaaccagctcaagctcatcgtcaacgtcctcggcaccatgggcgaggccgacctcgcgttcatcgacaacccgaaggcccgcaagtacatcaagtcccttccgtacgccccgggcgcccccttcaccggcatgtaccctcaggcgcaccctctcgccatcgacctgctgcagaagatgctcgtgttcgacccgtccaagaggatcagcgtcaccgaggcgctggagcacccgtacatgtctccgctctatgacccgagcgcgaaccctcccgcgcaggtgccgatcgacctcgacatcgacgagaacctcggcgtcgacatgatcagggagatgatgtggcaggagatgatccactaccaccccgaggtcctcacgagaatcagcatgtgagtatgtgatgtgaccagacaggcagcaatgaaacatgtggacagaggtctgctgcgccaggatcatcacatgttcgcccttcttacgagcttaactgcgattacggcaccgagtcgaggtatcactacatgtatcggaaccgtcaggcggtctcttgtgtaaatatgcgctgaataagatgtgtggcaatctcttgttttttggttgtaaaaata

SEQ ID NO: 20197 - DNA, 852 bp, Zea Mays
tgcaccaggcctgccctagttgatagagacaccactgggctaacgaccgagaacagtgagctgaagattcgcctgcagaccatggaacagcaagtccacttacaagatgctttgaacgacacactgaaagctgaggtccagcggctgaaggtggcaacagggcaggggccggccaatggtggtggaggcatgatgatgaactttggcgccgtgccacgcgcgtttggaggaggcaaccagcagacgttccacagcagccagagccaagcgatgcaatccatgctggcgacgcaccagctgcagcagctccagctccactcccagcctcagcagcagctgcaggcgcagcatctccagcaggtggcgagagacctcaaaatgaaagggcatctgggcgcccaaggccagtggggcggtgggaagtctgggagcagcggcagctgaggctactactggcactggagttttggtgtatgtggttactggttagctaggagtggagatccccttgttctaggggggggggggggggggggtgctgccgtgcatgtgtagttaccgttagctcgggctatctatctacaggctcagttcagcttcagttttactgttaactcggtggctcagctctcctgcagcgtactgtgtccagaaactcggatggtaacaggtgttttatctgtcggaatctgtctgtatctcttcgctagtttaaagggtaaaaatggttgggatttcagggcttcaaatgaaatctcccgtattgagcaagagtgtgtagttggatgtacaaaaagggatggaaaaaggcaacgtttgatgagagtcacggagtaattttttatggcggcg

SEQ ID NO: 20198 - DNA, 2690 bp, Zea Mays
gtccaacgcagccaggatgcgacaatgcgaggcaggctgcttcatgcgtgaaaccaatcgtttcttcggcccggcacatgcaagcagccatgggcgagaaagaataggaccgccgccgccgctttgtccctccgttcacaaccttgtcgcacgagtctcttattcgcaactggacctgttttgtttaacaaatttaaatatcctgcatggagatagtggaaagggtattatgcagactttggaaagggaaggcgttatcagtgatctattattcagttgttagcttggctctttgggcatgtaagctgaatgtacgggatttttggtacccttgaacaagttgactcctgctgttttttgtcgaacagtggtgcttcttgatctgtaaaccatgttaacttcatctttatgcaatattgtggactaggactagcccctttaactcttcaaataaaaggtctacttgtgatctaatgttgctatactcaagtgatttgttattgccgtgtactcctgtgatttgctgaaagttttagttgtgttcaaactcatgttgtcacttcattcataaaaagatcaaagcagtggtaacttcaccaaaatgagaaatagtgatcaaaccaaagtgagtgcagccttccaaacacagagttcagcactgacatatgcagtccaagccagtggcggacccagaaagtttcaaaagcctgggcaaagattacaaaagctgaggcttgcccaattgttatgtatcctgaaacgtattttactcctaaattatgtatacatgtctataacttacaacacgggagcctgggcagccgcccggggtcgccgggcggtgagtcggccactggtccaagccacaacctagacaaccaatcaccagcacaatgcagcctggctcagcaatactagcaaaccaaacatgattgcctgcattcacacaagctggccacgcttggcctggttctactccccagccacactcaaccaatcaggcccattctgaatgagccagtgctgcttctcttccccacgacacatgaataataaactcgtgaaacatgttttagtcgtccgatccatcttctggtgcatcttgactgttcatattaacaccttaccccatacttcggacttcggagtccccttaggttttggccataactacatcacacatcacaccacatgagccggaaagtcattgaaaccctcttattaaaaaaaactgaagcaatgttgccaccaccgccatgccattgccgccacagccagtccgtcgctcttgccctatcctgttagccgtcaacgacacctgtggtgtgacgaggatgacatcaacatgtgcggcaagggtaccgtctctgcggtgggcgccacaacgtggctgggtgggttcgtgggtttcagtacgcccagcgaaatgcaggacatcgggaggacatgccgttgtgtgcgctgctgttagcttcagaccatgcattgacattcacaagggaaaagttaaacagattgttggctctactcttcgggatttagcaaatgatagcatggaacttgtgacaaactttgaatcagacaaatctcctgcagaatttgctaaattttataaagcagatgaacttctaggaggacatgttataatgcttggcgcaaatccttcaagccaggctgctgcactggaggcactacgtgcatatcctggtggtttgcaagttggaggtgggataaatttggagaatgcaatgtcttaccttaatgaaggggccagtcatgtgatagtgacctcttatgtgtttagtgatggcaagatgaacactgaaaggttaagaaaacttgtcgagctggttgggaaacagaggctcgtgctggacctcagttgtcgaaaaaaggatggccgatataccattgtaactgacaggtggcaaaagttcagtgatgtgtttgtggatgaaccaacattagaatatctcgctgcctttgcagatgagtttttggttcatggtgttgatgtggagggcaaaaggttaggaattgatgaggaacttgtggaactattggggcactattcaccaatcccagtcacttatgctgggggtgtgtcaacaatggacgacctagagaggataaagaaagcaggcaaaagtcgggtagatgtaacaattgggagtgctctagatatatttggaggagatttgccttacaaagatgttgtcctttggcacaggaagcaaagtatggttggtcaagtgtgaagaaacacaaggtattgatcagtattaccagttcatttgattcaagcttctgcacaaagtatattttctgaacatttttgttcaaataattcagttaggctatctccaacagatcctctatctcatctcctatttcaaactattttgcgtcccctattttacactacactggagacagtcttcagtgatgtaattcaaatctgaggagcatgacttgtttgggtttggacaccagggttggcgctaactcaaaaggtggtcaatttgtgagtaatgtactgttcttgacagtttctgacctcgatttgtctattgtaactgaataggctgaattgatgctgatagatacattttgcctgctacaacactgacattctgatttttaagttcctcgtttgagaaaataataatattgatgcaaattttggctct

SEQ ID NO: 20199 - DNA, 1560 bp, Zea Mays
atggtgtttgcattatgaatgcatgttaccatgattttaggatttcatagagttttaaaacttcgctgccgttgaaatactaaaatagatgctcctccacatgatacttatcttttctgctcttacgatattctcctcctttttggttgttgattcattgtatatgatgcagcttacttttcatattgaacctgtactcttgtagtgacttatcttcactgcatatccctagcttgtagtttctactggtttgattgttcagtcctgttctcaggtgttagctgttgtttatgccatcatgacgacaagaaatgaggatctaacttggcaaatgagggcaatacgagtgctacctatgttcattcttcctgctgtatcctctgtcatatattcaacagttgttaacttcacaaggatgtttgagcagaaagaccagaagacccttgaaaaattgagggctgagaggaaagccaagattgatgagcttaaagagagaacaaattattatctaacacagcagcttattcagaaatatgatcttgatccagccgcaaaggctgcagcagcttctgttttggcatctaagcttggggaggagactggcttaaaagttcatgttggagaagaaccaaagctggatgctgcagtggccagaagcaatgatgttgagatagtaccttcagatggtttgagaaacaggaagcaacccagtgcaagaggaagcaggactgggagccccacttctcataccccagcacagggaactgaaactaatctacctcctgctcctgctagtgctggcctggaaactgcaccagctccagtggtggtagagcatcatcaaggttcaggggctagtgatggtggtggatggattgcaaagattgctgccttacttgtgggggaggacccatcacagtcgtatgctttgatatgtggcagctgccatatgcataacggcttggcccgaaaggaagattacccacatgttacttactactgcccgcattgtcatgcattaaacacatcaaaacagtccatggggcaatactcaggctccaactcaggccggagctacccgaggaaggaaagacagacaagcaacaagtggaggcaagttgatggttcttatgacttgtactgttgatgtgtgtggaactagtttatctttagacttatatcgtcatgtgttcaactggtggagccacaaatttagcactgttgtaaattggaaatagtgagtgatatgatcctcggaagcatagcacgcaaaaacaagaaatgggacatggtgtacatccttgagtggatgattttttgttgtcatatagagcgcgaagtcttcttcctgcgagacaaaaagctatatgacgttcagacaagatggtggtgcaggatataacataagatcattgcttgttcagagaacagcgacatgtagaattttttgcgtttgtcttgaccttcggtcttttctttgttgtttgttacattaccaccttacagcatttcgtacacagtttccttatgatgttgaaaccgtacttttcatttggcgtt

SEQ ID NO: 20200 - DNA, 2962 bp, Zea Mays
tgaacagggcctttggtaccattttcccccctagaatttaaacttgctactgtgggtgcttggctgtggtggtgagtgtgatcgtggtgatgctcaatgggaccgcgaggacctcgctttgcctcgctggagctgacggtgtggcagagtacacacagagagacagaggggagattgtagaattcgatactgacactacagcttcgaataaaagcaaggatgtaccaccaccaaacagtgggatgatcatatctgatctactggacttaaaaatcacatgcctccctgaaaataaggaaacatctccaagttccataacaaaggagcaatcatcttctgtggatacactaaatttatctgctgctaacttagattcatttttcattgaaagaaaagaagagatgacttctgcttctcttccacaaactcattttttggagcaggaaaataaaagaacagatagcaaaagccatgaatctagattggaagtgcatgctgcacctaaaagcttaattagttctcaaagaacaaatcagattgaagctactccagcatttgcaagttgggatgctgattttcagtctgctagttcagaaaatgctgccaaaaactccaagcaacctgatctatttaagagcacttctgtggccgagtcttttagtttcccagcttcagagattgccatcaaacctgtagtaagtactgaaagtaaaacaaatacgagaagtgccatcctagaacatcactcagaagttttggcttcagcaagtagcacattatttggtgatgacctttctgatcaaaaggttgtccaccatatctttgagagcagcaacgctcctgggttcactgaatcctctctccccatggattttgctaaaagtgatcagttacatggaagggacgatgatggattcaatgatgatgaagcttttgatgaatggcaagaatttacaacaagtggcaatcaaggcagcctatcaaatgcggaacatattgaggaacctttaaagagagatttgtctgagaatgatgtaatagatcccttgcgagtaggcagcaaggaatcacccaacaatgttattgaaaaatcctctaatgaatggcaaggttttgcttctgtgtctggtcaaggaagagattttgtgacatctgtggaacgatcaacaagtgaccacagactaaatttggtgggaccagttggagatgaagagacaatgagcagcatctcacaccaacattcttcagaaattaatcctgttgatgtatggcatgtgggcaatgtgaaggctcaaaatactgcagaaatggttaaggaaaaaaatgattcttttgacgattggcaagattctactaccaccggtcaagtccaggacacttcgttgaatcaaactggggacatgatggaggtctcaaaagccagtcacaaagaaacagacatggactcatggttcattggacattctagggagccagcaaatacgggtaccatgaatgcaaataacatgttggacgattggcaaggtttcactggttcagatcaagcacagcaaaattcatctagcactggtgcagaaatgataagtgtgccatttgagcagcatggtggaactgtttctgccccatcatgggcaaatggcagcagtaatgatgccgcaaaaacatcctcaacaagtatagaaagcgacccatttgatgtttggcaaaattttactaaatcaggtcacctgcaagaaaatatgtctagtcttgggagagaaccgagtagtctgtcgcctgaaccagctaaaggaaatgattccttggatttgtggattaccagcaacttcaaggaatctaaaagcaatgatgttgggagaactaatgcctcatctgatggatggcaggattttgccagttttgatcaagctcagagaattactaaagttcatgtggaaggacatgttgtaaaagatccttcaggggctgaaactttggacttatgggcctcaagtcatgttaatgaaaagaaccttgaacagataagtgaacataatgatctattcgatgactggcaggatttccaaaactccaatccacagcaaacaaccttacaagtttcttcagatgcttcattatttgatataaccttggcatcaaggcctgatgcttttggagagcaggaaattgggagtgttttgcaggtagcttcatccgaaaactcaaaggataaaaaggagggttctaatgaatcaaaagcatttccatctgatgaccacttgaaaagcacaagtggaatgcagcagatgggtgatgttgattcgctgtcttcattatggccagctaataaaccagagcctgcaaatacaaatgtggaacagttgcttgctcagatgcacgatctgtcctttatgctcaaggatgaactttctgtccctgataaacccatcgatcattcaaaaccctgaagtgacaacatcaaaaattgtgctctgttactatcagccaaggaagattgttgttgcaagtccaaccttttgggtgctggacgaattgcaacgaatatcccttgagtggaaaatgcaagtcaagtcacagaaaaccctgttgttccaacagtgccttttatcagagtattggtcagcagaggattgtatttgttttctctgttgcttcgttgcattgatcgtcagagactcagagtcgggttggttccttgactgtccctgagtgaggctgaaaaccacgttttatgtctgcctcttacatgtatgtaccattttgcggtctgtattttgtagagtcgaactgagctcaccaatcaatgaattccatttcatcagattatttaagctatataatataagttcgtccttggtactaggctgccttgtttgtaacatcttattacaatgtcttgtttgcagcagatgatgttggcttccagtaattctatagtactacatcattgacctccttgcct

SEQ ID NO: 20201 - DNA, 1302 bp, Zea Mays
ccaccctcccattgccgcgcgcgcgcgcctccgattcgcgtcctcttctgcagcgccatgtccggccggttgcatgcgtggtccggaggtttctgcgtcccatcattcctggccaccggaagcggttgttggtttcggctcagctgtgcgctgctctgtggcggtgtgattggaattggacatggtctgatctgttgtttctcttcactctatacgcggtgtacagaacgataggccagaagtatggggttgattactccgaggatgagattctgatgcggtatcgctgggcgtatgcgcagccttggggtagatcacgtctgaggtatgtcaatgatggaaggcccttctggcaatacatagtgagttcatctactggctgctcaaatctagagtactttgaggagctgtatcaatattacacaactgaaaaggcttggcatctctgcgatccagatgctggacgtgtttttgaggcattgaggaaggctggtgtcaaaacagctgtcgtgtccaattttgacactcgtcttcggccacttttacaggcactgaaatgtgaccgctggtttgatgcagttgctgtatctgctgaggtcgcagcagaaaagccaaaccctacaatattcttgaaggcctgcgagctgttaggagtgaaaccagaagaagtcgtgcatattggtgacgaccgtaggaatgatctatggggagctagggatgcaggctgtgatgcctggctttggggcagtgatgtttactccttcaaggaggttgcggagaggatcggggttgaggtataggaagaagtcgctctcctgagccgcaagaagactcgtccttgtacatagtgttagggcgtcctgtacatagagacaaaatcctgtgtgcgactgtgccaaggccttctgtagcaaatactgatgtacatctttgcgtttgaatgttcgttgcggctgtgacctgcagaatagacctttggagacccctgcagcatctttcacgtttcatatcctgaagcatcatcagcgtcaccaattcatttttcatgccttcatgtattctggcgctgagtttaggccgagatcgcctgcaaaaactgctccgactgctctttttttttcatagaggctgcatcatctcgtgaactgagaggtgctcccactgccctcttttccgtgaatgtgcttctcggttttgtccgtcgcacgtgaatcaagcaaaagaatctgcgcaagtgcattcacctgctgtgattcagcatatagaaaattttcttgctcacgcatgcagatcgacgagttg

SEQ ID NO: 20202 - DNA, 1230 bp, Zea Mays
attggatattagaatgaattttcttaaggtcttctaaggactttgctgatgtccatggacttgtcatgcatgcttacaacccaccaaatgcagattcacttgttgatcatcttggtttgcacaaggcattgtgtgttcttatgggatgggattatacaaaagtccctgagaactttaagggctaccaatcattaccttctgaccttgtccaagcaagtagggaggacctcattgtctggccgcctactgttatcattcacaatacttcgactgggaggaagaaagatggtcgcttggagggtttagggaacaaagaaatggataaaaaaatgacagaactagggttttctggtgggaagtcgaagtccttgtatggaaaggaaggacatatgggtttgacacttatcaagtttgcaaacaactcatctggcttgaaggaggctgagcgtcttgctgagtatcttgagaggcaagatcgtggacgtataggttggtcacgcgctcatgccagtcgttctgtagattcagatcagaaccctttgttggtcgagacggataccaggacagctgagaaaaagaggatactttatgggtacctagcaattgcatccgatctggacgaactagactcagattctagaaaaagggcttccctccagagcagaagagaattcgacccaaacgaatgatctcttgtcataaagcccacccccatcagttcattaaatttgcactgaggcgtgcatacctatctctgatcccaatttataaattcatactgctgctgtggagaaaaggtgttaccttgaatataatatctgccgctagttgagttataaccactagttctggaagctgtatttgcactatgtgtattttcttgcacgcgtctatggctcacgatttgactggctatttggaagagatctgtcttcctatttaagtatcgcccgttgcatgattcattgctcttcatttggaagtgatgttgcatagacctcctgattggtatcttttatgtattatagcattccctttctttcttgacttcccatgaatatttaaatttctgctaagacggtagtggctacatattccttggcacttctgaacatgtctggttctttgaatatcagagtatattgttgcaataggttgttgccactcttttgggcattcatgctgtttgtgttgttttatgtaagagggtgtaatattcagaaatccttg

SEQ ID NO: 20203 - DNA, 1794 bp, Zea Mays
ggagctacctagcaacgcgcagtaagcagcgtgggcaaagctacgagcgcccggctagcttcgccatgaacatgggtggggtgtccccgtcgacagtccggtgcaagcactgcagcacgcagctcaccgtgtgccccggcgagcgcgccatccagtgcacgcaatgctgcggcgtgacgcgtatccggcggcggcgggtccagcggccggcggcggcgccgcccaccacgggcttcccgcgcgcccgcggcaagaagcgggccctcctgatcggcatcacgtacgcggcggggctgcggccagctgaggggggccctcaacgacgtcaagtgcatgaggcaactcctctgccagcgcttcgccttccccagcgactgcatcatcatgctcactggctgcccaccaaggacaacatccggttggggatgcagtggctggtggaggggagcagcgagggcgactccctcgtgttccacttctccggcctgggcgcgcaggtcgccgacgacgacggcgacgagctggacgggtacgacgaggccatctgcccgatggactcgttccagaagggacccatcctggacgacgagatcaacgagactatggtccgcccgctggtccacggcgtcaagctgcacgccgtcgtcgacgcctgccacagcgccaccgtcctcgacctcccgttctgctgcaacatgtccagaagcgggagctggcagtggaaggacgagagccccccgtccggcgcctacaggggcacgagcggcggcaaggcgatgctcatcagcggctacagtgacggcaaagccaagtccagcgtggccagtgcgcagaaaccggaggcctgcgcgaccatgggggccatgacgcacagcttcatcacggcggtggaacgcgagccgcagggtgtcacctacggccgcctgctcacctccatgaaggccatcatgaccaactccggcggctgcgccgtgcagggtcctattggcgccggcgcggccgcccgcaaggtcgccaacttcagcggcgtggaggaacccaacctgtcctcctcggagaagttcgacatctaccgcaaggcctttgtgctgtaaacctcctctgcatcggccattgcaaactaccgtctggactctttaaattgccgtgtcgggataataaaccagacgggcctatgtgtcaacaatgtgtcgtctttgtgtcatcagtcaccggaggagaatatttgtgtttatgcacacgccaacaatggctccttgctactaaaccttatggcccattgtaataaggctattgtatctcttctacatgtctctaaaataaactaagtgttatggtggtaattaatatcactttcagcatacaagaatggacatagctttatacgatcagaatgatattaaaaccaataatgagatttatatgagcctactaaaccttatgtaccctagaagcttcgatcttcctagacaaaaggagttgagcacaccataggacgaaattagatttagccatttgaattatgatgacttggtgtatgggggatcaacactatggtggtagaagcagtggcatctgacatgtgaggaggaagaaggatgtgcggtgggaaattagaaaaaaaaaatcttggctttgatgccatgcaagacaatatcctcttgaggctgtactcatgtacatatagatatacgagagcattatttacatgagcactacctagattaggggatgtagccctaaacctttacatggcagataacaacactatcaagattaggcattgtcctttgc

SEQ ID NO: 20204 - DNA, 2747 bp, Zea Mays
ggccgagtcggggcctcgatctgaccttctcttcaatcgcatccgcccgcgtcgtctcgtcacccccgttgtggtcgcctgggaagaggagggaggccagcttgccgctagggttagggtttcgggcgggagggacagaggcggggctgcagccatggcgctcaagttcctgaacaagaagggatggcacacggggtccctccgcaacatcgagcgggtatggaaggcggagcaggcggaggaggcggagcgccgcaagacggaggagctcaagaagcaggtcgcggccgagagggagaaggccgagttccgggccatgcaggagcgcgccggcctcaggccggcgcaggagaggctcgacttcctctacgagtcggggttggccgtcggcaagagctccgaagggttccaggcgctgcagcaatctgcaccgggggcagctgccgcgtccacttctgcacaggcagctacaccgggagctttatttgaggataaaccccaatctgcaaatgatacatggagaaaactccactctgatcctctactcctaataaggcagcgggagcaggatgcgatttcaaggattaaaaacaatccaatcaagatggccgagataaagaaatctgttgaagctgagaaaaagcaaaaagaagagaagaaagcgaagaaaaagcacaagaagcatcaccaccataagtcaaagagtaagaggcatcactcagatgagaattctgattcagatgaaataagtgatggcaaagatgagagaaggaagaggtctcattcttctcttcataagaaagaagagaacatgtccaggcataagaagcagcacagagaagattcatcagattcagacgatgaaccgcagagaagaaagcaggatgtatcagaaaatgatgaaccgaggagaagactacatgacgacaatgaaccgaggagaagatggcaggatgacgttgaaccgaggagaagactgcatgacgacgatgaaccgagaagatggcaggatgacgttgaaccgaggagaagaagacaggatgatggtgaatcaaggagaagatggcaggacgacgatgaactaaggggaagacggcaggttgatgagaaaccaagggaaagaagctacgttaatcgtccaagatatgaccgctctgacgctgatgataggaggagacaccattcacctcgagacactaagcccaaaagagtggatgatggccacaaaactggaaattccacttctgaacaccattcccgctctgaacaaggctctggcgagcagacaaggcaagagagcgaacatgacaggaatagtggtccttcattgaaccgacgacgcggtggtgtccaccatatgtcagaagaggagaggttagctcgtctgcaccagatgcaggctgacgctgaggtccacgaggagcagagatggaagaggctcaagaaagctgcagacgacgatgctaaagaggcaacaactgtgaatgcaaaccagttcaaagggaagaacttcttggaagatgaaaagaagagcatatttggaacagataagggtggcagtgccacgattgaagagagcatcaggcgccgcgctttctactcgcagggtgggcgtgatgccgagggcaatgccttcaggcggtgaatatattgttttgttgtttgctgccttgttggactcatcttgccgtcgtgttcgttttattattgtacgtgaaagttgagaactatgtacaacaatttctcaataacagcaattttatatgcaacttcaaatttttgatacagaatttggcctaaactgcaccgaagagtgattgcctcggatttgatcttgctgacgtttcttctgggttggtaatgcaaaaaccttgcttattagactgtctccagccgcgtcccctaaaggaatattctctgtcctttacagaacactctaaaagattctgtcctctatatattctccgtctccagcagcgtcctctaaattccgtcctctaaagctacagtgttaacagattcacattttccatttctttttcatttttctttgttttgttcgcatttcacgctgcataaatgatacgtaaaaattgtattcattaattttgaaattaataaattcgaattgtcaatattaattacattgcttgttttgttgttgtgtaattgttctcgataacgcgccacatagtataatatccttggcaaaatatgttttcaaatggataagcttgcaccgtaagccagtactcttcttcgagaagccatagcctagcttcccttgcacggcaaccgcatggcttgtatccgaagcgtacttcctctataaatatcgagtgagccttccatacttcactcaaccttgcctttacaaactccacaaccatgaatccctacttagaaaacaattttcttgtgcggttgatggaagaaatggaagaggaagaagaagagttgaagttggcgaggcacatggtcaataggaggcgacgtgcacacaatgagtgtcgtcatggtggttcgattccagggcgtgttaggattcatcgtgatcacatgagcggcgatgcaagaatccgagcggactactttggagcgaacccggtgtacacggatgctcaatttcgtaggaggttccgcatgcgtcgccatgtgtttgagcgccttgttgatgttgtgcaacaagtggatccatattttattcagcgtccaaactgtgcgggtgagattggtctttctgctct

SEQ ID NO: 20205 - DNA, 1175 bp, Zea Mays
tttcagacaagaaaaacaagctacatgtatcaagaaggacatgcgaaacagcactggaaagatactcagcattgctattcgctagatttggaaacacaacgtgtttgggactatgttggtgacagttttgtacatcggctgaatcaatccaagagtgacgcaaagcatgctaagttcaaatcaaaaagtaaatattctggggatgaatgtgtaaactgctcgtgcaatgatgactctgatatgggtggagctatgttcagcagcaaagctgaaacaattgtggacgagtacaatcgtctcctggcaagccaacttgaaactcagagagaggtgcagacgtgcagttcattcctgctaagttttctatgtcactattgaaagcaaagtttgtctctgatgtataggttgtatagactttgttagccagctgaaaatgtggttatctctgatgcatccatctgcctaatgttcatgcttgcagtattatgagggcctgttgtctgaggctaaaagaaacaaggagcaccagatttctgaagctgctgataaagctgtaagtgataagcttgaagagatgcaacttaagctcgagaatcttattgtggagaaaaagaaagttgcagatatgaacgaaaaactcactaggagccaagacatgtggcgccagacactaagagatatagaggaaagggaaagagcacagttgaagtcgaaggacgaaatgattctcgatctggaagaacagataaaggatttcaaattttccatcaaactgcagaagtcaatagagaagaacgatggtgtcaagggtggtacgctggttccactccctacggtttcagattctggaggcaagggtaaaaggtcatcaagaacaagcaagaggaggaattagtatcctttgctgagtagcaattagtcttgactggaacagacgtatacgaaccttattggcatgtatttactagcctgttatgatgaactacagcgtgatgtttgatttgtcacgaaaattagtacgatcataaactgcttcgaagatttgaacttggatactacatgtggaaaatacaatctaaatcgaagtacagccagttatttcgtaaccacatatagccaaatcttgaagcgtttcatgtcaaacggtggaattagagatagatccctgcacctaa

SEQ ID NO: 20206 - DNA, 2440 bp, Zea Mays
acactagacatgcaagatgacactgagaatatggaacaaaatgaggacgatgagctgattttgggcgaagatgatgtctctgcatggagggagcttaggctgcaccctctgcttctcaaggcgatgcgcagacttggattcaaagagccaacacctatacaaaagtcttgctttcctgctgcagctcatcgaggcaaggatgttatcggtgctgcagagacaggttccggaaagacacttgcttttggcctcccagttttgcaacgtctccttgaagagcgagaaaaggccacaagattgcagcaggaagatgaaaaaatggaggaacgttcttgtggaagccctcttcgtgctcttattctgacacccactagggagctcgccaaacaggtatgcgatcatctaaaagatgtggccaagttcttaggaatccatgttgttccaattgttggtggtctatcaatggaaaaacaagagagacttttgaaaaaaaagcctgaaattgttgttggaactcctggaagattgtgggaacacatgtcgatgaacaatcaacacctagttgaggctgatagaatgatcgaacgaggccatttccgtgaattacaatctatcattgagatgcttccactgaccaatggttctgatgaacaagctgcaagaacaatgccaaactgtgagactgtaccaattttgcaaataaagaagcggcaaacctttgtgttctcagccacacttgcactctcatctaattttcggaagaagttgaagcgtggcctatctacttcgaaggcatcgacgcctgatgatgtcagctctattgaagcattgtcaaaacaagctggaatgaaatctaatgctgaaatagttgatttgacaaaggcttcaatcttgcctgagaagcttgaagaatcttttattgagtgcagtgaagaggataaggatgcctatctgtattatatattgagtgttcatggtcaaggtcgcacaataatattttgtacatcaatcgccgcattacgtcacatttcttccatactgcgcattcttggaattaatgtattgacaaaccatgctcaaatgcaacaaagagctcgcatgaaggctgtggatcgcttccgtgaaagtgaaaattccattttggtcgcaactgatggttttgcaaggggtatggattttgatgatgtgcgaacagttatccattatcagttgccacattcaactgatgtctatatccacagaagtggaaggacagcacgcaagtcattggctggctgcagcattgcgttaatctctcctactgacaagtccaggttttattctctttgcaaatctttgtcaaaggagaatctccagcagtttcctgtagatcatacttacatgtctggagtgatgaacagactctcacttgctcggcagattgacaagattgcccgtaaaacttcacaggaaaatgctaacaaatcctggcttcaaaggaatgctgaatctatgggattgattttggatactagtgacagtgaagaagaccatgtgcagggacacaagaaacgaaaggctacttctgcacatctccaaaagcttcaacaggagttgagtgatctcttgcaatgcccattgcagcctaagactttctctcgccgctatttggctggggctggtgtctcacccttacttcagaagcaactagaagagttggccaagagaaatgcaagcaacaatagcagcaagagtaagaataaaggatctgggtttgttgttattggtcaggatcgtgtcgagcccttgcaagcacttcaaaattctgggcaagaggtctgtgtgaacatagacaaagaaagggaaaagcgaagagtcgctgagaactggaggcggaagaagcatgaagaaaagaaacgtacacaagagcagaagcgaaaggataagagaaaagctaaagagatggcttgatgacacatgagatagctaggggccttcaaggggtttacggaagctctttaagctcgcgtcaatcctttcagaaaggaaaggaatgcattcatcaatgttttgctgtaatacaatgcgtgcgctaagttagcgcttgcctttaacagattggaggtggtagtttgattttgttttgcggctgaagaaaataaacttagaatgcacgagcactggctctggatgagaaaagaaattaagcagatagctcacgtataacctcattggatctgtaatatgtacgcctatcagatttaaggtacaaattaattttattagggatgggaatcgactgacctggcctatctttggacttggacctggcccattgccttaaggccaattttaggagtgatggagattatgatcttgctggctatcatgggtttggcctagatatttttctgctataatgcatggacatgaatcctatcaatatttctataaagtattg

SEQ ID NO: 20207 - DNA, 1819 bp, Zea Mays
tcacctgattgctgtatagatggatctgaaaaaaaatgctagtgctactgccagttatcagatgccatattcctcgctgtgaacaaacaaagtgccatctgcagcagccgtttattgccaaatgaatacatacatgattgaagatatggattcagcatacgactccgatgcatctgaagaaggggatgatgatggtgatgatctctctgtaaggcagggcacaccatatactcacattcatgagatagttttctccacaatcgataagccaaagctccttagtcagctatctgcattgctatctgacattggattgaacatcagagaagcacatgttttctctacccatgatggctattctcttgatgtttttgttgttgatggctggcctgttcaggatgctgatggtttgcacaaagcactggaagcatccattctaagaaatgagggttcatggtctggttcatctcattcctcagccgctgaaagaacactgcccttccaagttaaaggtggtgagtgggaaatcgacaaacgacttctgaagatgggagggatggttgcttctggttcttgtggggacttgtatcacgggacttaccttggtgaggatgtagctgttaaagttataagagctgagcatttgaataagaatgtttggaacgagtttacgcaagaagtatatatactaagagaagttcaacataaaaatgttgtgcgattcattggtgcatgcacaaaaccaccccaattttgcataattacagaatacatgtctggaggaagcctatatgactttgtgcacaagcagcataatgttctaaacctcaggactttattaaagtttgcagttgatgtatgccgagggatgtgctacttgcatgaaaggggtatcatccatagagacttgaagactgcaaaccttctaatggacaaagatcatgttgtgaaagtggctgattttggtgtagctcggttccaggatcaaggaggtgtcatgacagctgaaactggaacatacagatggatggcacctgaggttataaaccatcaaccctatgataacaaagcagatgttttcagctttgctattgtcatctgggagctgataacgtctaagatcccgtatgaaagcatgacccctctccaagcggctgtaggtgtgagacagggattgcgcccaggacttccaaagaagacgcatccaaaggtattggacttgatgcagagatgctgggaagcagacccatctgcccggcctgctttcccagacattttagccgaactggaggatcttttggcacaggttcagggaacaccgggaaagacggcccatgctccatcaaataactcgaacacgaaagattaacccccatgcacacatacctgacgtttttctgaattcagtgatctgccatgtttaggattcgagtcgctaattacgaggaatgtagcatatcgatttttttccctggatggttttgcttgtgtacatttgaacaatcttcttggggcctattttttatggtcacctcattgttcttacataggggaaattggctcgagcgtttgggaggattacgtattatgacaacggctgataatttaccgcctacaacatgggtggatatttttcatgcattattatcccagtagctgccattccaagaaaggcataatgctttactcgccttaggttccttttggaatggacactggcgtgttcagctccagtggtcaaagcaccactccctcccgtttagaccttgttcgattgtttccattatagattacatgagattagaaaaaaattatgaaa

SEQ ID NO: 20208 - DNA, 962 bp, Zea Mays
gtgaatttaacccagaaacaaaagaaacatcggtgaactcaagaagctagtggaggaaggaaagataaaatacattgggttatccgaagcatctgcatcaacaatccgaagagctcatgcagtccatcctatcaccgcggtacagcttgaatggtcgctatggtctagagatgcagaagaagatataatccccacttgcagagaacttggaattggaatcgtggcttacagtccactaggcagaggtttcttctctagtggagcaaaactagttgactcactatctgagcaggacttccgcaagcatatgcctagatttcagccagagaatctcgacaagaacgctcagatattcgagcgcgtgagcgcgatggcagcacggaaaggatgcacgccatcacagctcgcgttggcctgggttcaccaccaaggaaacgacgtttgccccatacctggcacaacaaaaatcgacaacttcaaccagaacgtgggggcactgtctgtgaagcttacaccggatgagatggctgaactcgagtcgtatgccgcggctggtgaagtcttgggtgaccggtatggcgatcaattggccaacacttggaaggactccgagaccccaccgttatcttcatggaaattttgagtagccagtatctggtattttcaactgcgtcctctgttcgttgacgtatctccgagttgccgggatgcagaagatctccatgtgcactttgcaaaagcatccatatatatgatgttgggagtttatgatgtttggtacagagtgcgtattgtattgcatacttatctcattttgtttttgtgcgtatatgcttaaatgttaaaacctctgacgggatgaccggatgaatagaataaccatgtgtgcattgtatcaagacttcaagagtttctaccatgagtaaaaaaactcgacctgcccagcccccgggcattttaat

SEQ ID NO: 20209 - DNA, 308 bp, Zea Mays
acccttgcatatgtcaaccgttcccacagatcctccacaacgtgaatcggtccgcgctacccgggagcacagtattcctccatccagcctccagccaggagggtacacgctactcccaccatctcccatgcccagtgcgcggttgtcttttcacgtatggaatagctgggttcaagcttaccctgtcccatatccagggcatgtgaccagttaagatagtccttgatcatacaggcctacatacgcatccaatccttaattaacctgggcggagcatcacctgttcctagcccaagtcccgatttaag

SEQ ID NO: 20210 - DNA, 2374 bp, Zea Mays
gtaggttagctgggcggattgctccgggtatgagttggtttcgtaatctccatccggatcagcgcagccggagctcaaaggtgcctgtggagtttattacatcaagaattttggcaagccattgggaacaggagtgagtccaaattctcatcggtggcatatgatagcatcatcaccggtgtgggtgagaggtttggcgtggtgatcgaccggaacaatataaaaaatcgcctaaagcatatcaaggaatcgttcaatgaatgtaggaacctccttggtgaagataatcggtttaggtggtgcccagagagcagaagattcaatgccgacccaaatgtttggagggagttgatcgagagaaaaccagaagcaaagaaatggatgatgaagacgattgaccattatgatagcttaatggatctatttggtaagaatagggagaaacgtcaagacgttgagaactcaaaaggtacctcgaagaaaaaggcgcgaacagaaccgccaaaggagatacttcaacgtactccattaaatcggaaggggtcagctcttgccgaaagttcagataagacggtggacaaatgtgagatccatgatgagataaaaacaaatgtggaacttgatttgtcagaatcgtgcagaactgataatggcattgttgccatacctgttcgtgcctattcatacggtaaaggtttgccctatgctcctgaaaattggccacgtcatggagacatatggcactggaaagttggaagcagggcttctggagcaggccattgggctgacaggtatattatgccgccatcccgttttcgtggcgctgctcctaagaagttaggatttgcaagtagaggatttgcaagtaggttacaagttgaggaattcgttaagagagaatttccggatgttgatcctagcacattcttttctatgtttatctggaagatccctgctgaaggatacaggatccaaaaaggcacccgacaagtgaggatccatgaacctgaacctgtggtggctgatccgggtggtctctgcaaggctaggaatagcttgtgcaatcttcaaagggaaggttttgttgaatcatcaccagcacgggtttgtaatatctgctgcaaagagcctggtttctgtcgtgagtgctgctgccttctctgtaacaggaccgttgattattctcttggaagttacagctgcataaaatgtgaggcagttgtggaagagaacttaatatgtgggcattttgcacaccttgaatgtgctcttcgatgttacatggctggaactgttggaggaagttttggcttggatgtccaatatttatgcaggctctgtgataacaaaaccaacttaatgacacatgtggagaaactcatggaaacatgccaatctcttgaatctagggaccaaatcaaacctatgctgaatttgggattatgcctcttgcgtggatcaaaacaaatgagagcaagaaacttggagaaccatatgagatcagcaatggaaaagctggaatgtggatttgattttgttgaagtctggaaattggaaggtgacgagggcaggacaacactcaatgcaggagagaattccccaaccaccaatggtgtgactgtgcttggggctcggcaagttcctgaagcgggtgcacttacagggcatcctgatctgatagatccactggttgataatgacttcgagacggttatagaaaaccttccagtgttcattactggagatcagaatgccgcgtctgctaaatttgaggatgagatagatcttgctcttcaagaactgaaaaaatctcaggaagcggaatatagcgtggcggagcagaagctttacgcccagaaagaccacatcctctgtctgtacaggcagcttgacgctgaaagggctgaacttgcagatcccatgcccttgtctgatgcttcaaattatggtgcgatgctcgctaatgttctaagccgcgtggaccaagtcaagcgtgaggaggagaaatttaggtctatgctgaaagttgctggcggatttgcgaaagcaccacaaagcgtcaccagggagatgttcggattacctgctgataagtagttgtaatagcagacttgcttggaacttaactatctgtagtttaccatagaaccaaacttggctgtgttgttatagctgtatgagctgtacatcctaccgacgggttaccccataaagactggtttggatgaaaccagcaagtgctgcggatgcgcaggttctctatggacctgcttgtactaactactaagattcgttaaatgtgacattctaaatggaccgaacctggacctccacattttccttaccaggcgataattatgttacactcgtctaa

SEQ ID NO: 20211 - DNA, 4131 bp, Zea Mays
agccaacaaagaaaatcggcagccatttcttccccttttgccttgcctcgctcctcctccctcacctctcccccccgtctgcttccagtccccagaaatcaaaacctccaccaccacagagctccgagaccctcaccctcctccccgtctgctcgctgcgtggatctaccggcaggatgctctctccatcgcgcgcgccgcccggggagcgcctgtgaagaaggaacggaagagattatgtttttgcttcaaggagcaaaggcatcaagagaagctggcctttccatccacactcgttgcagctttgcctggagcatggtgtgaaggatccattgcctccatttgagcctcccgatttgatccggtctcagccattaaatatttccacagacattaagcaatctgctgcgtgctcagaacccatcattagtgttggtctggtgaagaccaaagatgccggttcgtcaaacgagtatacaggcgatatcaacttccagtcatgccagccagtagatgagtcacctggaccttcgccatacacatcaccggaggatgggaaatccggtatcgaccaagtgggaagtacaaatgaatcagatcatactgacgaggctataccaatagatctgcaagataatagctgtacaagagcaagtcggcgaactgaggttgctgtgcccttgcggcggttgagaaatcttgactcatcgtgcgagccatctgaaaagaagtgcaaatttgttgtcaagttaggtgcctcggcagatattcggcggccagaggatatagcatctaactctagctcagtttcagatccgatggcttcaaagacttgtcctgtgtgcaaagtatttgcttccacttcgaacaccacattgaatgcccacatagatcagtgcctttctgttgagtctaatactgagcttgttgaaactgtccttgtaaagcctaaagtgaagccaaggaagaagcgattaatggtggacatatacaagactgctcttccatacacccttgaggatcttgatcggaggaattgcactaattgggcagttgagttggctatgtctccagtgagcaaagaggtttgcactgagaacggaagcccagaagtggtatcatttgacagaagagatgatgaaagagaaggagatgtttatgttgattctaatggcataaaaattagaattttgtccaagtgtaatgatgtacctttggtgttgaaagatgaccttggttctagcaaagttgcgaagcatggaactggaaaaggtatactgatgagcaaaaagatgctgaagtcaaagcttttgaagaataagaagctgaagatgcatggaaagaagtacaacaaaacaagccatttgaactcccaggttcaagcagacccgcatgacgatattaatgaggaaacctccgaggaggagaggaatgcatggaatccttctgaaagcaccagcaattgtggttccaggactatgcagcagtgggtatgctccaaacgatcagatatcaacaagaaattaagcaaaaaccatagtggtaaaacatttgacaaagtggcacctggagcacagaaatcggataggagcagcatgtttggctttaatgattctcaagttccagaaagtcctgttggggtgttttcttctgagtcattatacatggccacaacttcagaagccactggtgttgagcagagtaatggtccttcaaaagtgcttagatcgattcctacatggtcttcaaaaactcatcttcagagcagtgtcataccaaaagtacctagatcagctgctgctcttgcaaagagaaaaattaaggagattgggaggagagaagctaccaaactagataattatgatgtagtgaggaatcccacttcagtgaaaagatttgaagctaggactctttccttctccactgcagggccaagcaatggaccaaacaggtcagcatctacatcaaagaagatccggaagcaccgatctccgttgaggactggcaagcgtgcattttcaccttctagtactagattagttcatggctttggtgacgagcatgaacctgagaccagacatgtaaataagaaattcaggattactagtaatgaggctcccaagaagtttttgaagcatactgaagaggatactgcagataatgacttctcttttgcaagtgacatgccagtatcgggacaacagaatgatcaatatgatgttgcacaggaaacagagggtacacaaatggattgtgaaggtgaagatgctgaaactgatgtgccatatgattcagtatccagaagtgatcctgctgagtgttgcaaccaaataagtgatgtttctctgagtcctgaaaactacagaacagcagacgatgatgttttggttgaaggctgtagtgtagctgtggaggatccaaactccagtgagcaattagcacatggccatgaatccaacagtgctgccaataatgaaatggatgaatggcagatggatcctacttcaacaaaggaatctagtccctgcttaactagtaacagggacatgggccctggaggtcatcaagataactcatcaataacatcaaatggagaagaagactttaatgaagagcatggtctgccactcggaaggggctcactagattctcccatttcgactgcctcaactatggcccttccagctgctttgaaggattcaaggactaatgaggaagaacctggcccatctactggtaggactgttgaagagcaaaccaccgggtgcttgaatcaagaaaccaattcaatacctatggccagagaaggtgaactgcccagtgagaagccttttcgttgttcttgccaggaaaacattgccagagagtctcgtcaaagtcctgttgccagaccaatgctgaattctactgggaagcaggttccgcaattgcacattggttcgagggcatcatcatctttcagcacgtaccaaagaaccagcgcaaagcccaacccttgctttgatccacatgatcatcttttagcggctaaggtcccagcagaatctgctatcagcttcccttactccacagactgtataagcccctcattccaaactcagcttccttcaccatcaaatcctgtcttgaggctgatgggtaaggatttgatggtgatgaacagtgaagagagtgtgcatcctcaagcaccaagttcagactacatcttgagagggaattatccagcacctgttggtttcatgcctccaaactaccaacatctcagtaattctgcatttatcaacatgccgccgaccacagccagccaccagatccctctaccaagtgttcaagctagcggcttcgttgctcctccattgcgtggtggttctgtgatgcaatctgaccatcactcccagcagaagccctacagaaacatcatgcctgccatgcatcgcccaacctacatgatgaaagaagtgatcgtgatcaacgactctcctgagcgcagaagtgagccacaaggtagcatgctgttcccccctgctccgcctccaccacttccggtagtaccaaacaacatgccaccccgtccgttctactgctttccaccgcagagcccagttttgccaagggagaggggggctgttgggtccatgctcgtgtacgcaaacgttggctcaatggtcggcgtcaattcgtcgagtcaaggaagccaaacggaagtcgccagtccttacatgccaaacccgttcttcgtgcagtctcgagccggttacatgaacccgccagtgtactactcgcagaatctggggtgatggtttctcagtaactcgaatgaccaggagaactccatttggcttgccggtcgtcatcgctctgtaaaagtgggggtacatgggagtttcgtgatgggtctaaaatgctgagactagtcagcctgcaagatgtctgagtttcatgaggattttcacataggttgctttagattttcttttcttttttttggttccgacttaaaggtacaacatgtttgccgtcaaaagtgttttaattacttccctgcaaagtcgcagtaaattatagtatgcaattcccaacagttctgcaaaggaatatatctcagtatttatcgaaaaggcagctagaatc

SEQ ID NO: 20212 - DNA, 360 bp, Zea Mays
gaaaagtcggccgccgacagcaagtgccgcaagctggcggagaaggtggccgcgctggagggcgagaggaccgacctccggcgccaactggcggaggagagaagggaggctaatgaggccttcgccaaggcgcagtctgcgcaggcggaggccaatttggcacgggtggagggtagccttgccagacagcgcgccgaggaatgggaggagcggttcaacgctctgcagacccgtgtggagagggccgaggcttcgacgcgcacggaggctgagcggacgcgcaaacagcttatggactcgtaccacgagctgggcgcgcggaccgctgacttcgaagtgccagatcaagagcccggactt

SEQ ID NO: 20213 - DNA, 1690 bp, Zea Mays
gccgtcccttcgcttctgctgctaatgccgccatgttgataagtctcgtcgggttgccggtacaaggaggtcgtgggatcaggggccttcaagacagtctacaaaggtttcgacgtggtcgaaggcatcgaggtggcatgggctaaagtggagataaccggccggaccatgggatcccccaaggagctccagcggctcaagacggagatccagctgctgcggtcgctccatcacaagcacattctcaagctctacgcctcatgggtcgacaacaagaagagggcggtcaatataatcactgagcttttcacgtccggcaacttgagagagtaccgtacgaagcacaagaaagttgacatgaaggcaatgaggcgatgggccaaacaaatactgacagggctagcctatctgcatagtcagaagccaccaatcatacacagggacttgaagtgtgacaacattttcatcaatgggaaccatgggaaagttaagattggagacttcggtttggcaatggtgatgcagcagaggaaaacacagagtatacaaggcaccttagagttcatggcaccagagctgtttggtgaaaactacaacgagttggtggatatatactctttcggcatgtgcatgcttgagatggtgactggtgagtgcccttacagtgaatgtcagggctttgttcagatatacaagaagatatctgaaggtgtaaaaccagttgctctctccaaggtcaaagatgcagaagtaaggagtttcatagagagctgcctagcttcagctgctgatagattgccagcaagtgagctcttgaagagcccttttctcatgatagatgacatcatcatcaatgataaaacctctaatcctgtgcaagaacctatagcattcccgccaaatttggatctggatcttgaagccacaccaatttttatatctttgctaccaaatggaaccgttgataatgggaagggatctttcagcctagtgcttcgaaggggtggattcgtactagaaggagatatgagtggtagcaaccctgttaatttattactaaggattcctgtccccaatggtaaatgtaagaacattgagttcgcgtttgacctggagaatgatacaagtcttttggtggctacagagatggtgcaagagcttgaactaccttcttggagcatgcctattgtggcaaagctggtagatgcgttcctgctcaaaactgttcgtggttggaggccgtgtgttcaggtcggtcagatgattcaggcagtgcaaaacactgcatccgtgaatggaaaaagcatctgaatcaatgtttgtagctgatgcattattctgcaccttatgtaaatatatcatgcccgaatgcaacgccaggccttgctgactaagcacatcttcttttatctgatgctggttaaagtttgggcatgattcctaattagaatagtggtatgtttcgtattttttttggttcgtattgttagaaagaggttcagagataagagaaattaagaatgctgtaacagccatccttgctttttttcagttttttttaaaagccttaccatgtgtctatttggtactgctcaacttcatgatttgcagcttagctttacaagaagtctgttgttcacttgttaccaaatgctatggataaaaaacaagacaattgttaaggataaag

SEQ ID NO: 20214 - DNA, 1546 bp, Zea Mays
aaaaccaaacgctttctaaaccaaacactccttgtcggtcgccgctagctcctccaacctcgttggccgttgccgtctccgtctcgcccgcccatctacgcggcgagatctgctcgcgccgcgccgagggttttgtcccgggatgtcgtcgtcggggaagatggaggggccgtctgccccggtggtgcgtcgggatccctacgaggtgctcagcgttcccagagattcctccgaccaggagatcaagtccgcctaccggaagctcgcactcaagtaccaccctgacaagaatgctagcaacccagaagcatcggaactcttcaaagaagttgcatattcttatagcatcttgtcagatcctgagaaaagaaggcagtatgatactgctggttttgaggagttagaaaatgaaggaatggatatggaaattgatttgtccaatcttggaactgtgaacacaatgtttgcagcactttttagcaagcttggtgttcctatcaagaccacaatatctcctactgtgctggaagaggccatgaatggcacagttacagtgagaccactccctgttggaacatcagctacgggaaaggttgataagcaatgcgctcatttttttggcgtaacaataagtgaagagcaagctcattctggaatggttgtcagagtgacttcacctgctcaaagtaaatttaagcttctttacttcgagcaagaagttaatggaggttatggacttgctttgcaggaagatagtcaaaagactggcaagttggcaatggccaaagatcctgaagctgccttctttaaaaggttggaaggtctccaaccctgcgaagtttcagctctcaaatctggaacccatatatttgctgtatatggtgacaattttttcaagccagctagctatatgattgaagcgatgtgcgcaaagagttatgaagacacaacagagaggctgaaagagatagaatctaaaattctagctaagcgaaatgatctgcgtcaatttgaaactgagtacagaaaagctttggcacgatttcaagaagtcaccaacagatatacacaagagagagaagcggttgatgatatgctgagagagagggacaatatccattgctcgttcacaactgaacgaactttggcaaaccctgttggtgtcggtagtagcagtaggtataccatcgagcagagcattcctgagagccctgagaatggtagcgtagatggcagagacaaatctggcaaaaagaagtggtttaatctaaaccttaataggtccgacaagaaagcctgatgaatcttttgtcagggaacgtcatgtgttttcactttgttgtacattttggaatccctattgtattcatgccgtatgagttctttggttcccagttctctgggagttttgtagcatatagcagttttgggtacaactttctattctcatgtatgtattatcctaagtgactgcattgaccccatgcatcccaggcgaagttgaatcgcccgaccaagttattttatcgttataatttcttctatc

SEQ ID NO: 20215 - DNA, 4676 bp, Zea Mays
attccgaaaaaaatcactaacagaaggacggttcaggaagcattgacagatagaagatggattgctgatatcacaggatcactctcggtgggagtattattggattatcttcatctttggaatttaatttcagattttgagctgctgccagatatagaagataaacatacttttagtattgctgcaaatgggacttattctgctaaggctgcatatgatgggttgttcatcggggctgtgcatttcggtcactatgaaagagtttggaaaacttgggccccctctaaatgccacttcttcctctggttatcggtgctaaataaatgctggacaacagataggttggcaaagagaggacttgatcatccggagaagtgtccgctttgtgaccaagagtctgaatctttggatcatattttggtttcttgtgtttttgcgagagaattctggttccggctgaaggttgatgtgcattttcagactacaaaatctggctcctacacctagtacggtgtcttttacgggttggtgggagatgatagacaatggctccggagatatgattatgaagggtgtcaactcccttattgccttgggagcctggattatttggaatcatcggaatcaaattgtctttgatggaatctcccctagtgtttctgcagctctttgtcaggcaagggaggaacaacagttgtgggaaatggcaggagctaagggtctctcctttcttgccgcaaccatcaggggcacctagctgcctggtttatcgctgatgggctggttttgtttttcaggatctgtttgttctttttttgtttttttctcttcttttttctttggtttttttatcccctccggggaggtcttttgtactttggtctattttggaccctcttttccttctacttaatataatgatgtgcagttctcctgcgctttcgagaaaaaaaaacgtcatccgcggcctcaacgaatgctttgccaacattggtcttcacctttgacgtgggcgcctttccccacctttttcgatgcttgctctgagctccttcttgaagtgctcaggccatcagggcacctccattgacccctactgcccttgcggcctctatcattccgcctgctcccgctagtgcgcccttggtcttcggggcctgacctctggcttcctctcgtagtcttgtgtgctttgtggagcgtcggggggctcaggcctagggcctttaggtcccgtaggtcatgagtgggactcaggcctaggactcgactcgtcggtcgtgggtgggaggcggactggctccttcctacaccgcggctcggtgctgggcgcagttaatgtggcgtgcgtagtattgatggtgagagcagccctagggccagatgtggaatccactcgagtggctctctggcggttcgtctgatctccttgccaggcttcgcctcgtccgacctctggcgcggtgcataggggtcatctgggtgcagattcacataggcgagcttctccctatcttatctctcactcgtggtctcgtgggggcccggggatccgatccccgacactcgggatatggatcgccgacgtggggaaaggaggcgctggggtggcagctacacccgcgggaggctagggaggcgtaggccgagcgccgatggccgggtgtagggggatgccgccgaccgcaaccgagaaggggaggtctgtcaccggaggaggaggtgcggcagcggccgtaatcgcaatcgtccgcgcgatggctgcagcggtggttggtgcagtggacgttcgtgccgcttgcgtggggagggaggcgagcacatgaaaaggagaaagggagggaggcagtcgtggacgccgagaaggtgcgggcggacgcggtgacgatcgctctgggagatgcaggggaaggagagggaggggttgccggaggactgctccatgacggtggcgatggccgggggtgcgccgacggctagagtgcctggtggttagggaatgtagaggcttgataccatgttggaatagaaaaccctaaccagagttgatagtgcattaatataatagagttaggtgggtctgaggcccattacaatagaggcattacaatagagcatacagttacgctaacagtatcaaatgcctttgaaatctctagcttcaaaaggatgtatggttctttacttttatgtagggtctgagcaagctgctgcacaagtaagaaattgttgtgaatattcctcctaacaaaggcgctctggttgttagaccagcttaggcagcagggtgccaagcgataagcaaaaatcttggttaccaactttgcaaagcttgagttttaggacttgagctttacaagatgagtttacagcttggacttgatcagatcccatctgaggaaaaggatctccagttttggcacttgaattatcaccattgtcgaatagccaccctaaaatcaaagtatttaatttcttctgtgactgctaaaaggttgaaataacttttctaaaagaaaattgcttgtccatgggagacccctgggcattttttagtttataagttagcaaattacatcctgattggtgattggctaggaaaactagctaaatcagtttccagggaggtaaccacaaattgctgagtcctggatttgagcacaggtggccttcctctcaactgggaagtactttctaatttccttttcagatgtagatgtaatatttccaagaagtacaacccttttccttttttccttgcaccaaaccttttgtaactttgttcccagataccgggttctcggtcttgttagaagtatattactaaacaatctatctgcctacactgcattgttcagcagatgctggattagataaaatgtgattttaacaagtactccctatgttccagtttattaggtggtagtgcatttttgagaaagggcagattgttaggcggcatacatagcaaggcattgcattataaattcctgtggaagaaacacagccgttttatccgacccgatccaacaagtgaatgcaatgcaccagatcagtgtggcacctggcgtgaattaaatcttgctcacactctggtgtgtgtactcttagcgcctttaaattgggtgtggagggagtgtatatgggtgcaaaaataacatagctttgtacaagtaaacaaacatggttggacatcacttttacctaagatttttattgaggactaactgtctctgcttcttacatcctagactgaaaattttccattagatgtccacattgccttggaatgtattgattgtgctatctctttcagcatcaacatgggaaataaggactttgtatacatcaggatcatcgagtccaaaatgtgttgttactcttatgttggagattgctccaagtttttggggcagatggaagagaaggcactcaaattttgacaaaagcatcccttttgctttgctcagccaagtagcaggtataagagagtacttcgcagccaatccagccttgacatctgagctgccttcaacagtagtgaagtcaaaagcatctgaaactttgatcatccagagtgaacatgaagattctgaacttggtgatgaattttatgatgcacttactagaggtgaatccttcgaagatggggatagtgatgatgatgatgatgccacaactccaaaggctagaaaagtaaagttgaagaatgtgtcatgggctattgcaggcttggctttaaagacaactaaaggttgttggcggtgatccacttctagagctacttgcggtcgattggttcaaagttaatgaacgctttgattcagttgccttacatcccaaaagccttgtgcaatcagaagctgcaaagaaacttcctttcatattggttataaatttgcaggtgccagcgaaaccaaattataacttggttatgtactacgctgcagagagaccagtgaacaaagattctttgttgggtagattcattgatggaactgatgcataccgagatgccagatttaaacttataccaagcattgttgagggttattggatggttaagcgtgctgtaggaacaaaagcttgccttctgggcaaagcagtaacgtgcaattatcttcgccaggataactttctggagatagatgttgacatcggttcatcatccgttgcccggagcattattggtctagtattgggatatgtcacaagcatagttgttgatcttgctattcttattgaggccaaggaagagaaagagctccccgagtacattctgggcactgttcgtctgaaccgtgtgaatcccgacagtgctgtatcaatctaattacgtttctagccgatctatgcaaatttactcttatcctcttttattctgagagaaacagcgtggcattttgaaaatgtgaaatagcattactatttgctgatccccaatcgagggtaacatatgtaaattggcatgaggcatgactacgtgacgcctttcgtaaatagaataaatcaatggttatgtaatattaatatcccatatacgcgtgtcataatctatgtggcttaaaagtggcatcaagtcatctagtttcctgtgttaacttcttattccttaggtagtcagacattaacagtgtgtttggtttgaggaatgaagtgatccatctttttctcac

SEQ ID NO: 20216 - DNA, 2559 bp, Zea Mays
ggaactgataactcgaaggggacgattgagaaatttgtccgctcaccatctcggtcggcgacagcgggaaaccactgggcctcctgcacctgcagccagcagccccgccgcgacacgctcccccgagatctccagcgcccgacttggcagatccagcaagctgcacccaccgcaggcgtgatctcctctcttggatcccgaagatggcggcgggaacggaggcctttgaggcatacttccgccgcgcggatttggaccaggacggccgcatcagcggccaggaagctgtcgccttcttccagggcgccaacctgccgcagccagtcctcgcccaggtatggatgcacgccgatcagaacaagactggtttcctcggccgcccggaattcttcaacgcgctgcgcctggtcaccgtagcgcagagcgggcgtcagctcacgcccgacatagtgcagtcggcactgtatggtcccgccgcggctcgaattccagctcccaagatagccgcgggggcggctcgttcacagatgggtgctgcgggggcgcctaggcctcaggggagcgctgcgatgacgcccgggcaggttggagcagctcagatgaatccggctggcacaccaaggccccagggaagcggtatgatgccgacatctacccaagttagtatgctgcaggtgaaccctggtgctgctccaaggccccaagggatcagttctatgatgccagctgcgagtcagggtggtgctctacaagcaactcaatttgctgcaccaagggcaatgcagccacagcctcctaacctgggaattactcaacagcaaccttctagtaccggtttcatgcggccaccacaggttggaactccagcagcttcatttcaagctcaagcgcctggaatcaatcaaggtttggtccatggaggcagcatggaaggatctatcagttggcaaggcggtaatgctgcctcagttggaggcatcccacgagctataccaggagctgctccttctcagacaacacgtggatttggtccaggtttacctagcacaatgggcatggtgcctggacaacaggtacaagcaatgtcttcatcgccattgcctccacagagcaacagtgctgttttgcctcagaattcaaaagctttggtactgtctggaaatggccctgccagcagctctggatcaagcacagacatcttctctgcacttacacagccaaagccaagcttatctgcacctcagacaagctcgattccgagttcatccagttttatggccacgcctactggctcccagaacctgactaatctcactcagtttggttctttgcaaggtagcagccaacctcaacagactcagcctatcgtaaagtccattcctgctccagctacacctgttgtctctgctgggatttctaattcagcttctcaatggcccaaaattactcaaccggacatccagaagtacatgaaagtctttggggatgttgatagggacagagatggcaaaataactggtgcagaagctcgcactctgttcctcagttggaggcttccaagggaggtcctgaagcaagtgtgggatttgtctgaccaagacaatgatggcatgctttctttgagagagttttgcatcgctctttatttaatggagaggcaccgagctggaattcctcttcccccagcccttcctgactctcttaggcatgatgagacactgttacgagctacaggcttgccttcaacagcatacaatagtccatcatggcaacacaatcaaggaggataccacaaagaggccctggagcacctggggtgcctgctggtggtgtgcggccacccttgccatcacatttgcattcacaaactgatggagctagcagacaagggcaaccaagatctcacatgcctgggatggataatcatgtggtaattcaaggaaacaaagatgacaaaagtgcgctgaaccaggctgcacaggaggtggtggatgctcctaagaaggttgaggtggagaagcaggtcctggattccagagagaaattggagtattaccgcacaaagatgcaagatcttgtcctgtataaaagtcggtgcgagaataggctgaatgagattacagaaagggcgtcctctgataaacgcgaggtggaatcattggctaagaaatatgaagagaagtacaagcaagtagctgagttagcttccaaactagcagttgaagaagctgcatatcgtgatgttcaggagagaaaagttgagctgcatgatgcactgattaaaatggtacaaggtggaagtgttgatggtttacttcaggttcgagctgatcgaatccaatatcaattagaagagatggaaaaagctcttagtgaacggtgcaaacactttgaacttaaattcaaaccatctgcatcagttgagcttccttccggcggtaaggcgagataaggcgctggaccaccgcctagacgcctaaggcgagcaaggcgacgccttatcaacctgagaatcagcaaaacagccccatggaggaggaagaaaaagaaaaaaagaaa

SEQ ID NO: 20217 - DNA, 2543 bp, Zea Mays
ggaactgataactcgaaggggacgattgagaaatttgtccgctcaccatctcggtcggcgacagcgggaaaccactgggcctcctgcacctgcagccagcagccccgccgcgacacgctcccccgagatctccagcgcccgacttggcagatccagcaagctgcacccaccgcaggcgtgatctcctctcttggatcccgaagatggcggcgggaacggaggcctttgaggcatacttccgccgcgcggatttggaccaggacggccgcatcagcggccaggaagctgtcgccttcttccagggcgccaacctgccgcagccagtcctcgcccaggtatggatgcacgccgatcagaacaagactggtttcctcggccgcccggaattcttcaacgcgctgcgcctggtcaccgtagcgcagagcgggcgtcagctcacgcccgacatagtgcagtcggcactgtatggtcccgccgcggctcgaattccagctcccaagatagccgcgggggcggctcgttcacagatgggtgctgcgggggcgcctaggcctcaggggagcgctgcgatgacgcccgggcaggttggagcagctcagatgaatccggctggcacaccaaggccccagggaagcggtatgatgccgacatctacccaagttagtatgctgcaggtgaaccctggtgctgctccaaggccccaagggatcagttctatgatgccagctgcgagtcagggtggtgctctacaagcaactcaatttgctgcaccaagggcaatgcagccacagcctcctaacctgggaattactcaacagcaaccttctagtaccggtttcatgcggccaccacaggttggaactccagcagcttcatttcaagctcaagcgcctggaatcaatcaaggtttggtccatggaggcagcatggaaggatctatcagttggcaaggcggtaatgctgcctcagttggaggcatcccacgagctataccaggagctgctccttctcagacaacacgtggatttggtccaggtttacctagcacaatgggcatggtgcctggacaacaggtacaagcaatgtcttcatcgccattgcctccacagagcaacagtgctgttttgcctcagaattcaaaagctttggtactgtctggaaatggccctgccagcagctctggatcaagcacagacatcttctctgcacttacacagccaaagccaagcttatctgcacctcagacaagctcgattccgagttcatccagttttatggccacgcctactggctcccagaacctgactaatctcactcagtttggttctttgcaaggtagcagccaacctcaacagactcagcctatcgtaaagtccattcctgctccagctacacctgttgtctctgctgggatttctaattcagcttctcaatggcccaaaattactcaaccggacatccagaagtacatgaaagtctttggggatgttgatagggacagagatggcaaaataactggtgcagaagctcgcactctgttcctcagttggaggcttccaagggaggtcctgaagcaagtgtgggatttgtctgaccaagacaatgatggcatgctttctttgagagagttttgcatcgctctttatttaatggagaggcaccgagctggaattcctcttcccccagcccttcctgactctcttaggcatgatgagacactgttacgagctacaggcttgccttcaacagcatacaatagtccatcatggcaacacaatcaaggaggataccacaaagaggccctggagcacctggggtgcctgctggtggtgtgcggccacccttgccatcacatttgcattcacaaactgatggagctagcagacaagggcaaccaagatctcacatgcctgggatggataatcatgtggtaattcaaggaaacaaagatgacaaaagtgcgctgaaccaggctgcacaggaggtggtggatgctcctaagaaggttgaggtggagaagcaggtcctggattccagagagaaattggagtattaccgcacaaagatgcaagatcttgtcctgtataaaagtcggtgcgagaataggctgaatgagattacagaaagggcgtcctctgataaacgcgaggtggaatcattggctaagaaatatgaagagaagtacaagcaagtagctgagttagcttccaaactagcagttgaagaagctgcatatcgtgatgttcaggagagaaaagttgagctgcatgatgcactgattaaaatggtacaaggtggaagtgttgatggtttacttcaggttcgagctgatcgaatccaatatcaattagaagagatggaaaaagctcttagtgaacggtgcaaacactttgaacttaaattcaaaccatctgcatcagcggtaaggcgagataaggcgctggaccaccgcctagacgcctaaggcgagcaaggcgacgccttatcaacctgagaatcagcaaaacagccccatggaggaggaagaaaaagaaaaaaagaaa

SEQ ID NO: 20218 - DNA, 2443 bp, Zea Mays
  misc_feature (2442)..(2443): n is a, c, g, or t
gcagcgaggagagagagagagggcagaggagagaggaggtggggtgcagtgcagtcaaagctggcatcgcatttatctctctctatccctgactccgaattgtattccccccatttctttcccactcgattcaagcccagaaaaagcttatgaaaatagagtaccccgggagagaggcgatagatttgggagctagtaatggccccatatatataacctcctccctcttcacgccatctcttgccttcgattgcccttccggcgttcctacctcctccccctccccatctcctcccaatccgtgtcctcccctcgtttggggatcgacacaggctacgcgtgggttgcgtcgattgatgcgagggaggcaatggcggtttcttctgctccggagaagaagaggaagtggctactcagctacaggaagttgacgtccaaatgccaggagggcgtgaaaccgtttggatctctgaagctcgctgtgcgtgccttgtgtttgtttcgttcagcaacagcttggttccagcgcattctgtgatcgacaagtacctgcgggaggcgaggaggattcttgcggcggcgccagagggtggcggaggcggcgatgcggcggcggcactcggcctggtcgacgcggcgctggagctgtcgccgcggatggaggccgccctggagctgcgggcgcgcgcgctcctcgcgctgcgacgctacagggaggtggcggagatgctccgggattacatccccagctgcggcaagtcgtgctctggggaggacacctcgtcgtcctcttcggcgtccctcctgtccaccggctccggtgacctcggcacgatttcccgtgccaagctcctctcgcccgaccgccaccgctctgacgacgcggaacctgacgctcgccctgtccgcttcttccgctgcttcgacgtctccgagctcaagcgccgcgtccttgccggcctctccaagaacccgaacacggacacccagtggaggtacttggtcctcggccaagcttgcttccacctcgggctcatcgaggacgctatggtgctgctccagaccgggcgccgcctcgcttcggcggctttccgccgcgagagcgtgtgctggtcggacgacagcttctcgtcgtcgtccgccaccgctgccgcggctccctccgtcccgtccggcaaaacatccaagtcgagttcggcgtttttcataatcccggcgacggagtcggaggccgtgtcccagctcctggcgcacgtgaagctcctgctccggcgccgcgcggctgccatggcggcgctggacgccggcctgcctgccgaggccgtgcgccatttcaccaagatcctggaggcgcgccgcggcgtgctgccgcacccgttcgccgccgcctgcctcgtgggccgcgccgccgcgttccaggccggtggccgtccggccgacgccatcgcggactgcaaccgctcgctggctctggaccctgcctacatcccggcgctccgtgcccgcgccgacctcctccagtccgtgggcgcggtcgccgactgcctccgtgacctcgaccacctgaagctcctgtacgacgccgcgctgcgggacggcaagctcccggggccccggtggcggccgcagggcggcgtgcggtactgcgagatcgccggcgcgcaccgcaagctgacggcccgcatccaggggctgcgcggccgcgtcgccgccggggaggcgtgcaacatcgactactacctgctgctgggcgtgcggcacgggtgcccgcgctcggagctggagcgcgcgcacctgctgctctccctgaagctcaagcccgaccgtgccgtggtgttcggggagcgcctggagctcgtggacgagcaccgcgacctcgaggcggtgcgcgaccaggcgcgcatgtccgcgctgctgctgtacaggatgctgcagaagggttactcgttcgtcatgtcagccgttctggacgaggaggccgccgagaggcagagggcaaaggacgctgccgccgcggcggccgcgctggcggccaagcaggaagccgcgacgcaggagccaccacagccggtgcccgggaaatccaagaacaccgagagcggcagcggccgtccaagaagcccgccaggccgcgcgcagacggcgaaaccgaaacccaagtccaaggccaaggccaagtccgcgaccgcggcgacaatgccgaaggcaccggcagccgtgaattccacagcccccgtctaccagggggtgttctgccgcgacatggcagtggtgggaaccctgctgtcccgcggcggcgcgttcgaccgcgctctccctgtgaagtgcgaggctatgagctgctgacggggaatcctgttcccccccgtcctacacaacaccacatgacatgtgcgacgtggtgtgcaccgagacggagacaggcgcgacgtgagagtgatnn

SEQ ID NO: 20219 - DNA, 974 bp, Zea Mays
gaaacaaaaaacattcggggacgcgcctgcttgcttctttccccaaaccccaaaccgcaggtaggaagcaaaccgcacgccccgctccagaacggatcctcatctctcacgttgtcaccacagtctgaatccagaatccaactagtagctccataaaagcggcaatgatccagctgctgttcgtcgtgctggtggcggaggcgtccctgacggcggcgctgctcttcaagacgccgctgcggaagctcgccgtgctagtgatcgaccggctcaagcgcggccgccacgcgcccgtcgtcgtcaagacggtcgcgggcgtcatccttgccctgctcgcttcaacgctctacagcatgacacagatcgccggcagcacgagcgactccgactctggcggcgggcccacccccaccgaccaggtgctcttctcgcgtcacctcctggaggcgtgcctcatggggtactccttatttcttgctctagtgattgaccggctccaccaatacatcagagatttgcgccggtttaaaaaggacttagaggctgtacgtaagcataataaaatgttggaggaggcaaaacatggaaactcggaggaggcaaagaaataccaggaagagattgccactctgaacaaggagatgaagaaactgaagctacaagtccaagaaaagacagaagaggtccatgtttcagaggacaaggcacttgctatccaaaaacaatccgaaggcttgctgactgaatatgaccgcctgctggaggataatcagcatcttcggacacagctgctgtcaattgaccgcaggctttccaactcttcttgaacgaagagtctatttaggggatgctgaagaatttctgtggaagatcatgttaccacccaaagtacgggcattcacatgttgaaatcatgaactctgctccatgaggttcccagactattttaaaagttgttattgagtaaaaaaaga

SEQ ID NO: 20220 - DNA, 1776 bp, Zea Mays
atcggcctctcgaatccatcgcccctgttccctctcccttccgtcggacttcaaaccctagcggcgatggcgtccgcggcggcgggcacaccgaagcgctgctactacgaggtcctgggcctatctcgcgactgctccccgacggacatcaagcttgctttccgccgcctcgcgctctcgctccaccccgacaagcagccccccggctccgacctcgccgccgccaccgccgccttccaggagctccagcatgcccactctgtcctctctgacccgcaggagcgtgcctactacgactcccaccgctcccagatcctcttctctgacccagcctccgccggcgccaaatccgcttccatcgtccccgatcttttcgccttcttctcttcgtccgctttctccggcttctccgacacgggccgcggcttctacaaggtctacggggacgtcttcgacaaggtattcgcgcaggagcttgcctatgctcgccggatgggggttcccgaccccgctgcgccaccggtcattgggaacctcgattccccctatgcgcaggtcactgctttctacagttattggcttgggtttggctcggtcatggatttcggatgggcggctgagtgggacgctgcacgtggggaaagtcgccgtgttcggaggctcatggaggaggacaacaagaaggcgatgcgcaaggcacggcgggagtacaatgacgctgtcaggggcctggctgccttctgcaagaagagggataagagggtggtggacatggttttaaagaagaagctggaggaggagaagagaaaggcagaggagaaggaaaggaagaaggaggaggacaagaggaagaaggagcgagccatggcatgtcaggaacctgagtgggcgagggcagaggaggtagaggagggactgtatgatgaagatgaagaagaggagatgagggccaagaaggaggagctgtactgtgtggcgtgcaataaaaagttcaaatcggacaaacagtggaagaaccacgagcagtcgaagaagcatagggataaggtttctgaactgaggatggcctttagggaggaggagtctttgaaagaggcagaggagggggaaggtgattggaatgaagttgatgtggggtttgattttaagcctacacaggagtcagatgatgagagtgcattttcagatgctgcagaagagttagctgaagaatttgaggaaggtttggaggtgcatgataaagagaacggtgataaggatttcgatagtgcagagcaggaggttgggtcatatgatgaggcaagtgtattggaggcaatgctatcaagctgcaagaacagaaagggtggttatgtggctcctccagaggaggctttgtctggtactgctgaggatgacgatcatcatagaagttctgaagttaataatgcaaaaaggaaaggacgcaggcgacgggcagcaaagaaggagcaagatgaaagtaattatgctggcaatgagcatcatggtaaatgtgaggttcagcctgagggttcggtccatggtaatgatgttgatgatatcatggaagggccatcctcttctaatgtcaacaatggttcagtaagcaaaggagataagcagaatggtgaaaacacgaatcctaaaaagaacaagaaaggcacaaaaaagaaaccaactgtttctactgatcagaagagtatgtcaaaggctgaccagaagagcacatcaaaagggaagaaacaaaagaaccaattttatagcactgcatagagc

SEQ ID NO: 20221 - DNA, 1739 bp, Zea Mays
gtgattctccaccacctccgagcttgccagaggactccacctctttcttctcgcatgcttccttttctttccaaacacaaatgcgcagcaaagaaagtgcaaatcataaagaaaagagcagaattcaaagcagccggaaagctgactagctagaaggagtgaagagagagaagtatatctcagcaacgcctccatggtcttcccttcaccttcagtgcaggtctacctagatccacatccacctaattggaataaccagcagcagcaaggtcagcagccgagggcgaatgggggagctgatgcaccgttgctgcccctgggtccggcggcagctacatcggcggctccggagcaaggtgggttgcctagaagctcatcaatggctaatgccgccgtggctgcgcacgcgaggcccaactcaatggcggagcgcgcgcggctggcgcggatgccgcatccggagccagcgctcaagtgcccgcgttgcgaatccaccaacaccaagttctgctactacaacaactactccctctcccagccccgccacttctgcaagacgtgccgccgctactggacgcgcggcggatcccttcgcaacgtccccgtaggtggaggctgccgtcgcaacaagcgttcgtccaagtcctcatcctcctctgctgggtcttcctcctcaaagatgtctccctcaggaaggctactgggtggtccatcagctacaccgtccaccaccccaggcactaccggtgcgatcattactccgggtctcagctctttctctcaccacttgccgttcttgggctccatgcacccgtcagggcccaacctaggtctagctttctccgccggactgccgctagtcggcatgcagcacctggacacggtggatcagtttccggtggcaagcggcggcggcaccaccataggtgcatctctagagcagtggagagtgcgacagcagcagcagcagttcccattcatgactgggggaatactggatctgtcgcagccgccgacgtaccaattcggtttggaagctaaccgaggaggcagcggctcagctgcggtggcgttcaattcaggacagaccacgacgaccagtgctaccacgggaaggcaggaagggtcatcaaagaagatgggggatagtaaaggagaagatatgagcttacagaagcagtacatggtacctctacgccacggatcaggatcacacggtgtctgggatgggagtgctggtggaactggcagcaacggtggtggtactggcaatggcggttcaagttggccaatgaacatgattcctggattccattcttcgtccactagcggttgcaatgacagtggcttgtcgtagtactctctagctaggggctggggcaatgtcctatcaagaaaaatattttggagatgcatggttgagtctgagcaaatgctagctatagctaggacgatggaggaacaggcgatgaccaatccacaggcatgttcatcatctgctattcttcatcggaattgtagaagcacactgctacctcatgatggtcacaggtaggagtttaaagtaaagctgctctttgtttaaacctttttctgtcatttggttttgaacttaaaggtgttctctgcattgtgtccatagcggccgccacttttctacttttcacactattgttcacagggattaattaatcaaatttggtgcctggtatactatgtgataagaaataactacatgc

SEQ ID NO: 20222 - DNA, 2310 bp, Zea Mays
tatgagcacatccactgattagatatatatcatctttcccaactgggcatagcaacatcaatgcagatgaaaatgtatcgcttgaggcaattgaggctgacatttacaattctattttaaatgatctatttggatccagaaatgcacatattcaggatagtgaccaaatgttgccatcaaacacttcaaacatcacaattgataccaagagaactagaagccccaagcgttcagtgctgggaacatatgttagttgtctttcatcaaaacaccgccattcttctctatatgatgtagcctcaaaatcttctgcctctgtaactacaagaaacagatttggtcccgtcgattgtgatggcatccatatatcttcttgcggacatgctgtgcatcaggaatgtcatgaccgatatttgttctccttgaaacaaagatatgtccggagacttggttttgaaggtggtcatatagttgatcctgatttgggagaattgctttgtccagtatgtcgcagatttgcaaattccattctcccagcatcacctgatttctcgggtaaaacatcaatgatgctgagaccatttgttcaaaccttgacacctcaagttgttacaaccacatcagatgtgaatagaaattgcttacagttcgctcgcgcactatctctttttgaaagtgctggaaaaatcgttggagaaaccaagtttttaaaagctatatctgggaagcttaatgaaactacaaatccagccctcgatccttgtcttcgaagattggctatgctttactatcctcgcagtcacagcagtttttcaccatctaagaggctcaacccatccttatttctctgggatacactaagatactctctggtatctacagaaattgcttctcgtggtaggatgtcaagccactctgctgaatcgaagtcctgcttggagtctttgcgtggcgaacttaattcatcaagtgggttcatattgtctctcctgttccatgctgcccactctgcacggaatttgaatcgtctcgaggttcttctgaggtttgaaggtatccaactattagcaggctctatttgctcttgtatttcgggttataaagacattctgaatgccactaagcgaaaaggctctttgccatcgatggttgatccagccagtgagggggccctctttcctgatgtacaattttggaaacaatgtgctgatccagttcttgctcaagatccattttcttctttgatgtcagcacttttctgtctgcccgttcagtttctgtcatctgctgaattcttcatcccttttgtccatctgttctatgttgtttgtgccattcaggccctggtaacatgctacggagaggaaacttttgatcgatcaaacttcaatgactgccttcttaatgatgtttgcaagacaatgtcaggatatgatatcgccagagactattttgtatccaaatatatcgatccctcttgtcatccaaaagacatggtccgcagattaacatatccatatcttcggagatgtgcattgctttgggagctgctaagatcttctgccacatcacccttgtatgacggttccaatatttgggaaggatcacatctttacttgagtaatagcacacaagacgacagttcttcactggcaatggaactggccgggttacgagaattggaagacctgtttcagattcagtcgctggatctgattctccaagatgaatctgtacatatgcttgccttaaaatggtctcaacatttctgtgaagagtacaatccccgtaaatatagaggcactctcttttctacccctgcagttccatttaggctgatgcaactaccagatgtgtaccaggttctcctagaaagatatatcaagatgcaatgccctgattgtggctcagtgcctgatgaaccggcactatgtttgctatgtggcaaactatgttcgcctagttggaaaccatgctgcaggactgggaaatgccagaatcatgcattgcaatgtggtgctggtattggcatatttcttctagtgaggaaaacaacaatcctgttgcagcgatctgctcgtctaacattttggccgtctctataccttgatgcttttggagaggaggataatgaaatgcacagaggaaaacctttatatctaagtcaagaaagatacacatccctgacgtatctggtggcatctcatagccttgaccgaacttctgaagttcttcggcaaacaacgattggcttttatggatctgattgagcccatttttcaaggaacaatgtgttcaaagtctgctttg

SEQ ID NO: 20223 - DNA, 1014 bp, Zea Mays
ccagcaatccggccgcggccaggcagccaccagcagcgacaagaaatcgagaatcctcgtttcccattttgtggctggcgcgagcgtgcagcgtcacaggtttccggacggacgctttctatcgcaatcctatctatatatttatcccaaggcttcgtggtttttgttgctgctgctgctgtcacggccgccttccactcccacaagcttcagctagccttcttactcccgccgtcacccccgatccgagagcgagcatggcgcactctctcgccgcctccttctcgccggccgccgcccggcgccaggtcacaaatgtgattccaagctggacctcggtttccttccagagccacaggatgacttctgtatccatccgctcaagacaaaggctaagaaagagacagtggacaaggtttgcagtatagtgaaggagcagctggctcttcccgatgggaccgccatcactgccgaatcaaaattcgctgaacttggcgctgattcgctggatacggtcgagattgtgatgggcctcgaggaggcgttcaacataacagtcgacgaaacaagcgcacaggacatcgcaacagtgcaggacgctgcggaccttatcgagaagctcatgctggaggcacctccaaaggtcgtctagatccagcaaccttgcgatcgacgaccttgtgtttgatctatgttgtgtgttaatttgttcgtgttgccccatttgttctttcttgatgattcaagatgaggttttgtattggtgttgctgaggtgaattagatagccccaaaggccacatgaagcagatgaggacagttcattccactttgaatttgtatgttgtaacttgtagtgctgctatagagaaaccaatggactgttatgaagagtcaatgcaactgttgcttttttagttttgggaagtcacacacatgaaagtctgaatcagatgcagtactaattgttgagcttggggtgcagatatatgcaaataccaggatgtcaggtgct

SEQ ID NO: 20224 - DNA, 5836 bp, Zea Mays
aacgtcgtcgccgcacaggcacagaagctcccctcgcctgcggtcactgcatggtcgaatttgccccttgtgctttcctctccttcctgcaaggagtcgagacgagacatcatcccttctctctccacatctctcgaccccgacctcgctcgccgtctcttccctgcccctgcccctgccccctcagctgcgatctccctccctcccccgaatcgctgaatttttctcactcctcctccttcccatctcggatcgactccaagacgccgagcccactttggtgacccagccccgaaatccccaatcgagctcgaccggaacccgtcgattccgccggattcgacctcccgccggtgaggcggttcgcctgaatcggccgattggacccgaattcgggtgttccggatgcgctcagagcggaggcttgcggatctagggttccggagggcctagggttgctgccggcgatctggtgatggtggtgcggcgcggtgccggagctcggcgaggagggttcggcagcgacgttggagaagatgcagcgagccggatatgcatgggtggcgcggcgctgaggggtgcgacgtcaggaggcggcgtctcgttcggctcatgtggccagcggcacgcgtagaggcagaagctccaccaccaccggcacaaggaccagctacttctccttctggttcatctgctacccatcctcggactacttatcggccggaatcgagtgcgcagaagcaggagtgcatcgatcttccctgcccagtgtcatctgattcctttgtaaaggacgggcgtgagattagagttggcgattgtgctctttttcgggctgtcgatgtccctccattcattggattgatacgttggattgagaagaaggaagaaggctatcccaaattacgtgttagttggctttatagacctaacgacgtgaagcttaacaagggtatacaactcaacgctgcaccaaacgagatcttctactctttccaccaggacgaagcatctgctgtttctctgctgcatccttgcaaagttgcctttttacggaaaggtgttgagctaccagctggaattgcttcatttgtatgttggcgcgtgtacgatattgacaacaagtgcttatggtggcttactgaccgggactatattaatgaacggcaggaagaagtaaatcgccttctatacagaacaaggctagaaatgcgtgccgcattacaatcaggtggacgctctccaaagcgcttaaatagtccttcagcttcccagcaactgaagactgcttcagatggtacacagaatggtggtttgtctagaggaaagaagagagagagaagtgaacagggagttgatccagccaagcgggatcgtgatcgtctacttaaggttgatgacggtgagcctggaagctttaacttggatgatattaagtccgaaatagcaaagataacagaaaaaggtggacttccaaatgcagaagcagttgcaaaacttgtacatcttatgcaacttgatcgaactgagcagaagatagaccatagtggtcgggttatacttgctgatgttattgctgctacagatagtcccgattgcctcggcagatttgtccaatcaaggggccttcccgtgttggacagttggcttcaagaggcccacaaagggaagtctggtgatgggagtagtcctaaagaagcagataagcctattgatgaacttctcttggccctgcttcgtgcactagctaaattgcctattaatctcagtgcattacaaagttgtagcattgggaaatctgtcaatcatctgcgcagccataaaaatctggagattcaaaagaaagctaagtgtcttgttgagaactggaagaagcgtgttgatgctgagatgaagtcaaatgatgtgaagcctttagtttcaggtcaatctgtttcctggtcaggaaaagcaggttttcaagaaatttcaaatgttggaaccaaacgaggtggctcaagtgagaacagtccaaaaaattcagtgcccactctttcatcatcaaaagttttgactgataaacctgggggcacagatgctgcagcgaagttgaatcctggggtatctgcattgtcaaatttacaacatgtgcaatcaacacatgttactaccaacttgaaggagcagccctgcaaatcaactggtgggactggctgtcctgagctgcctactgtaaaagaggagaaaagcagcagttcaagccaatcgccgaacaacagccagtcaatatctagtgagccatcgaaggatgcaagaagttcaactgctgcttctggtggtgctagtaaaacttctggaagctcttcacggagccatcgaagggcaaacaatggtcttgtttcagggaacctgaaggaaccttctgtaggaagatctgtctcccttgatcgatcattgctgcaggataagtcatcccaaactggtacagcttctgaaaaaggaattgatatgccatctgatcatggaaataatcatagattgattgttcgctttccaaatcctggtcgtagtcctgctagaagtgcaagtgctggatcttttgatgacccatctgttactgggggtagagcttcatctcctgtggttgcagataggcatgatcagactgagcgcagggtgaaagtgaagactgaaaattctcggcctcatttagcatctgatgctaatgcagagtcctggcacagcaacgacattaaaggagctactggttcggaggaaggtgataaatcaccatgtgctatattagatgatgacaacagcaggacacctgatcattctgttaaggatgcacatgcatcgcgagctgcgtgctcgtcatatatgaatgaaaaaggtgtcagtgaaactaaggtgggaacctcattcagcccaatgaatgctcttattgaaatcaagtactctgaagctagtcattcactgcaagctggagatgacacagctatgaatcttcttgctagtgtggcaggagaaatatctaaatctgaattggcttcttcaccaagtacttctgtaaagaaattggtctgtgagggtgtcaatactggaaaggttaaagtagaaagtgacatgggcccatcacatccagggcaagcagatgctaagaaagttgccatggggaatgaagtgaaaaatgatgcttgtttggttccgaaggaggaacaacatcaaactgcgccatctcctgagctagcagattcaaaagcagttaaatcttcagcaaagattgaaatccatgaagggcatgcaaacaaatgcaactcccagcatgcttcaattgattccaaaggcgaaaatcgggatggctgtactgcccatgggaaagttgaagatggcagtacaaacaaggatggtgccatggaatctgcattcggcagccagcgtagcttggttgtttccagtaaaaattcaagattggttcttgctggggaatcttcattgtctgctgctgataaacaaacacagggtctgttaaaatcaactaatcataagcatcttctgagtgtatcggacaacccaggagcctttgatagacatgacagtatggctggaaaattagatttgatggctgcagaggtgaaaaaagctgatgtcgtgggcaatagtagtgtattgcagaatgacactgaaaagaaggaacatgtttctccctcttcggctgatgttccaaaactagtaccagcagcgtccccagttggtgtggcaaatgggaataatgagatgaaagaatcaaacggcagttcaagtgaatccaatagccatgtaaaatctgaaggtgtcaattctcagcaaagcgagcaaagtgcaaagcagagttcaaagaaatccagtgatggtgtgtgcggaaaagaagaccatgtcttatcagacgaagaaggttcttctctagccgctcacaccaagtcaaatgctacagccaagcttgattttgacttgaatgaaggaatacctggggatgatgggcatcagtctgagacaactgcctcacctgttgtatgttcctcagcaatccatttaactgggcttttgccattcacttcgcctactacaagtgggttgccgccagctccaataacagtagctgctccagctaaaggaccctttgttcctcctgaaaacctactaagagcaaagccagagatcgggtggaaaggttcagcagctacgagtgcatttcgccctgctgaaccaaggaagattttggagatgcctgctgccacacgtgacattccagtatctcatgctgctgggaagcagtctcgtcccacgcttggtttcgatttgaatgttgcagatgaccaagctctcgaggaagattttccacagagttctgcacagactacctgttcagaatctggaaatacgagaagtcgagatggctcgtcacgaagtgctggtattgaacttgatctgaacagagctgatgaagttgcagacaatggccaatttgtaccaaatgcttcacacagagttgaagtcccattgttttcgacgagatcgttacctagagttttatctaatgctggcgcaaatagctcaagggactttgatcttaatagtggacccgacctttatgatgttggcactgaacctgcaccaaggagcctaccttctaaaaatacaagcagtattcaattcctaccacaagttcctgttaggatgaatagtgatgccatgagtaataatatatcaccatggcttgtctctaccagtccttgtggtccagtagctatacagtcttttttaccatctagagaacagccttacccattggaggcagcacctggagcccagcggattattgcgcctacagctgatggtggccaatttggaggtgatccctgcaggcctccagttatttcaacgtctccagcgatggtttttcatccgcctgcatatcagagttccatattttccaactctttcctcctctcttgttgggccagccggagcgttgccttcccaacattcaaggcagtatgccataaatcttgctgagggtagcagcagtagtgtacgtgacggtaatcggaaatgggaaagtcagggccttgatcttaactcaggccctggaagtatagatttagaaggaaaggatgaacggatgcctttaccagtcagacaaaatttgatcccacccctacatggctttgtggaggatcaaggaagaatttaccaaatgccagttgtaggaacaaagagaaaggaacctgatggcagttgggactcagaaaggtctacatacaagcagttaccatggcaatgagggctctgaaggagatcattttgcaccgactggtctgcgaatgagcatatcacctgcatgtagagcttggccggtgtgttcttcagtcactggactacactcaggggattcagccccatgacgatggcgtgggattgaggaaagcgaaaacttcctgtaattgttgtagattttttcttagctgttaggcttttggttctaatttactcaggagggtatggctgcggtggaggaatctttgtgatcctgagctctgtggccgctgtaattagaccgtccgctctgtttgttggtgataaactgttgagcacatgctggagctttacataagaatttagatgtggccttgttccttgttggggaagcgttacgtcagctgaccatatatatacactggtgcaacgtacagctctagttgctacaccatgtatcttgggttgcagtgcagctgtatgtataagaattctagtagatgagcagctataactttttttctctctttgacaccgaatccatctgcatctggtttactcc

SEQ ID NO: 20225 - DNA, 2010 bp, Zea Mays
cagatgaaaaaccaaggcagttcctgagcattgaagacaactccctagacatggttctttcacaggtttctgacagtaatttgaggcatactctgcaatttggcataggtctgcatcatgctggtttaaatgacagagacagatccttggttgaggagcttttttcaaacaataagattcaggtgctggtatgtaccagcacattggcgtggggtgtcaatcttccagctcacctggtcataatcaagggcactgaatactatgatgggaaaacaaaaagatacatagattatgatatcacagatattctgcagatgatgggtcgtgcaggtcggccgcaatacgaccaacatggcaaagctgttattcttgtccatgaaccaaaaaagagcttttacaagaagttcctctacgaaccgtttcctgtggaaagtaatctgagggagcacttgcatgaccacataaatgcagaaattgtttctggcaccatcagcaacaaggaggaggcgattatttatctcacctggacttacctatatcgcagattggtaattatttgtcaccttgacttacctatatcgcagattggttgttaatccggcctattatggattggaggatactgaaacaaacacattgaattcttatctatcaaggttagtcgaaactacatttgaagatcttgaggacagtggatgcataaaagtggatgaccactctgtaaagtacttgattttggggaaaatagcttcacagtattacctgagctacctcactgtttcaatgtttgggtcaaatattggccccaacacaacgttggaagtctttctacacatactgtcagctgcatcagaatttgatgagcttcctgtacggcacaatgaggacaatttgaatcgaatactcagcggaaatgtcccgtatccagttgatcaacaccaccttgatgatccacatgttaaagccaacttactctttcaggcacatttctccagagcagaattgccaataagcgactatgtcactgacttgaaatcagttcttgatcagagcatacgcatcatacaggcaatgattgatgtatgcgcgaatagtggatggcttacgagtgcattgacttgcatgcatctcttgcagatgatcatacagggtctctggtttgagagagattatgaatccctctggatgttgccatccatgaatgatgatatattagaccatctcaagagtagaggagtctcaacagtcccctccttactagatctttcccgtgaagaattgcgtagggtacttcaaccattttctgcgtcagagttgtatcaggatctgcaacatttccctcatgttgatgtgaaagttaagcttcataatgaacaggagcgatccaaacctccaactttaaacatcaggttgcaattgaaaaattcgcgacggtcagcatcaagagcatttgcccctagatttcccaaggcaaaacaagaagcttggtggcttgtcctggggaatgctacaagttcagagctgtatggtctgaaaagaattagttttgcagatcgggtgattaatactcgcatggaattgccacagacgttcaatgtgcaggagacgaagctgatcttggtgtcggattgctacctaggttttgacttggagtattctcttgagcatctcaccaagggttgagtgctttattcagagctgtttgggctgtttcattttgtatgggttcagcaaccagctcatcctagattgatcctgtaatcacgagacatgagttcattccatgaatttttgtttgtatgactacatccctcgtgttcatggttatattatatttaatagctatatatacgagtggataggtttataactttcatgaaatatcttttccgtaagcatagtagatgtttgagctctaaggttatgaccaacaaattgtgtatatggtcgtgcaaaatactattttataatataaactatattatttacatggtgaagtttgaaatagaa

SEQ ID NO: 20226 - DNA, 2385 bp, Zea Mays
ggccacactacatcccctgataatggatccaaaaatggattctggaattgagagaagtcgatacaactccattgatgaagcaatagaagatggtgttgccccaatcccacttagcttggacaggacacttgatgttcaacgctctattgatgtcatggatcatcttttctcatgtgaggcaacatggcacaaggggcacactctagctcagactgtatttacatgtatctaccttatgagaatggaaagaacttcatcgcatgctgtactaaatagcttttgcaggattttgcgtgctacttgtaatgctgtcatttctgctgtttctactgcccgaactcatgaggaagaggatctctttactatgtcctttggtctgcctttgagagatgaaggtgatgataagtgcctgtcaattctaaactcagtcgaagagataatatctcgtcaattacgtgcatgtaaagcccaggcgttgtccaagaaaaaaacactagaaggtcttgaatcccttcaagataatcctgatctggaggaggattactgcagagctctgttatgcagattacgttttccatttctaccatgttattatgtgcatgaggaaacctcatggaagaggattggagttggcccggaagcatgttgcttcatgcttgacagagcttaatttgatgcataagtctcggaagtttctcaagtcccagtccagcactatggtacagcaaagtgatggaaactgcaccactgcatctggttgtcagcctgttggctttgatgttagcttaaacagcagacttttgagtcccacaccgccacgtgcagtaaaagttcttagctggagcaatgcaatcaggtactttgagaggcttctgcatgatcttgatgtcatctgcgctttgtcgctcaatccggtgcttgataatgtgcttcactttattgtccagttccaaaaaacagtgccagatttggttcctagagcatttcttcagactttgttggtccaagatggtaaactttatggggaatacttcttttctgatgtcatttcaagggctttatcactaccggacattataggagataaggagtttcagatgaatgagtttgtggtgcagctaggtcagttggttatcaacctgataaaaattctttgtacaaacactgcatggcaacggcgcaagcttgggaagagtttgcaggattggagtactatttccatacagttggagcttgcactgaaaagagagtttggtgaaactagaaatgtcttgcagaatgagaatatgtgcatgagagtatcaaagcaacttcttatttggactcaggaacatgcatactgggttgcttttcggtttctcacattgggttttgaacttgacctatattctccgggcgaatacagtatggtgtactggtacatgtatgtggtgctcacaaagctaatagaaaagatgcagttacgagttctggccagtagtgaaacctcacgaagaaaggggaaaaagaagaaggatcatttgaaggattcagctcgggatatggcattttcgtcgtcttgtttattgcctcaatgctatcttttgctatcagagggactctcgatgatgctagctgtcctcagaaacgaaagtaggtcattccaattaccaagtatcttcaacactgaacaagagagattcatgcagcactttgatcttcttctgaaagctcgagtccctgagcacatttccttctacagtttcaaggaatcatcttcccgggcaggcatgtcggatttggtgaagtacaacttcttcaaggaaattcagaagatagtgccctcactacggggcagctttgcaagtgaaccagaaaaactcgctgaggtccgtcggatagagcaggtggctgagcacaacaggatagccctaaatattatcagccaagttggagctggcgatccgtctctgagggtctcgtttgagtttacacaccaccctcacttcgcagtggcagttgtgaagagatcatgattcaagtttggcatcgccaattctttacccttctcaatcttgatagtgatagcggatgattcttgttcacgtgttgctcacgtgtttattggttctccagagcgcaagcaacaccatgtgttttaggctgtacacaaacaccattagcaattttgtaggcaagataagaaaaaaaaaacatatgctggggaaaaaagtcctttcccctggcattattttgtaagcaaatttttttagctcactttgttatgcgaaacatgattatacagatgtgtaatttgagtcgtaattcgttactggtatgacaaggacgacaattttctcttgtttggcattttctattttgcggtgataactgactagtattttc

SEQ ID NO: 20227 - DNA, 495 bp, Zea Mays
gtgagatctagcgagaggaagaggaggaagggttgtggggaccaggggtgcgagatggcggattcacctgcaactacaagaaaagaaagagcgagagatttacagaaacctccagagccgcggaggaggaggagatttgaaggatctctacgacactggcggattagttaaggaacgaaagatcacattgtgtccggtaaccagattcagatgtgggcgtcgtgcgtgggtgcaaggccaagccgaggtgaaagagattcgacgattgagaatacatcaaagaataaaaatgtggaactcgaattttcagatgaagagcgtgaccaagaacttcctgatttttcatcatttattccattcttacctcctctgagtgcagctaatctaaaggtctactatgccacatgtttcaccatcatagttgggataatggtgttcggtggttttcttgcaccaatcattgctttgaatgcttaacaagttgatgtgctctca

SEQ ID NO: 20228 - DNA, 1479 bp, Zea Mays
ccggattgctggctgttgctcgctagctgatctgcctgtgcagtagcaagagcatcaaggacttccaggcgctgctacaccagggctacagccggacgacgacgacggcgtcggcgtcgtcgtcgtcgcccacgccactactccctcttgcgccgccaacccggccgtgcccgcgctcggccaacaagccgaagatgctcatcttcatccgcaagcagaaccgggtgctgctgaacctgccgcaggtggtgacggcgtgccggcgggcggggttcgcgccgcacgtgatgaacctgcggcggcagaccccgctggccgcgatccacgcggcgctggcgtcggcggacgccatggtggcggtgcacggcgcggccgtcacccacttcctcttcatgcgcccgggctccgtgctcctgcagatcgtgcccgtgggcctcgactgggcggccgacgccttctacggcaagcccgcgcagcagctcggcctcgactacctcgagtacagggtggcgcccgaggagagctcgctggccgccgagtacgggctcaacagcaccgtggtgcggaccccctgggtcatcagcagccgcggctggtgggagatgaagaaggtctacatggaccgccagaacgtcaccgtcaacgtcaagcgcttcgccgacctgctcagggcggcgcgtgctcgcctcaggaacaccacggcgtgcgccgccaagcccgcagcgccgctcaggtagacgctagctgctgattgggcttgggttaggtgtcaattactttagtcacacttgccgatttctttgtgctttcgtcctctttttggccgggggataaaaaaggagacgaggtcctgtaaatatgattgggggtacggttggctgagagattggtgggggatctatccatcgcctcctttcgcggtgcattcgtttggttcttggtgttgctggagggagcagcagaaggtgaagaataataatttatggcagggacggctctcctgaaacactttgttcacagtagatcataggggtatcagctctttttatttcgttgccctttctttcttttttttcttttttttttggttttctcattctttgggtgtccagatgatgtataagggcatgtacagtggtgtttaatgtggaggctcttaaggtgtttaagggggttatttgcaaaaaaatcttagagccgtctctccgcgaagagacgcctctggctcgtaaaccaagtagcaacagacgcctcacttcccactgtacgaatttgttgtctgttctatcgatctgatgctatacaaatacatttaattctgtatttattaatagactacgtttgtagacactccattgtacaatacagtctcttagttgtctcctgtgcttagagaaccgttttggtgtctctccactgtacatgccctaagaaactacattctgtaacaaagatcaatagaaatccagactcttttac

SEQ ID NO: 20229 - DNA, 3554 bp, Zea Mays
cgcatacaacatggtttgattacctcttgcatgaagtgaagcatagagttttttgtcagcttccgaatggcgattgggcattatgcacagtaattacaacctctggtgatgagtcggttgtaaaggtttctgaagggaaggtactgagattgaaaaccgagtgtctacaacctgcaaatcctgaaattcttgatggagtggatgatcttatgcagctaagttatctaagtgaaccatcagtactgtacaatctgcagtacagatactccaaggatatgatttatactaaagcaggtccagttttggtggctgtcaatcctttcaagaaagtttcactgtatggtaacgagtacatcgatgcatatagaaataaatcaatggatagtccacatgtttatgcaatagcagatgcagcactttgtgaaatgaaaagagatgaagtcaaccaatctataattataagtggtgagagtggagcaggaaaaacagaaaccgcaaaaattgctatgcagtacctggcttcccttggaggtggaagtggcattgaatacgaaattcttcagacaaatccaatactcgaggcttttggcaatgcaaagacattgagaaatgataactcaagtcgttttggaaagcttatagaaattcatttcagtaccactggaagaatatgtggtgccatgattcaaacatttttgcttgagaagtccagagttgtgcaatgtgcagttggtgagcgatcataccatatattttatcagctgtgcgctggtgcacctgcctctctaaaagagaagttgaatttgaaaaaggtggatggatacaaatatcttaagcagagctgttgctattcaattgcgggtgtggatgatgcccaaatgtttcgaactgtgacgcaagctatgaacattgttcatatcagcaaagaggaccaagagagtgtttttgcaatggtctctgctgttctttggctgggggatgtctcgttcacagtaattgacaatgaaaatcatgttgaaatcatagtagatgaagcttcgaaaacggtttcagaacttcttggctgcagtattgaagatctcaatttagctttatcaaagcgccacatgaaagttaataatgaaaacattgtccagaaacttacccttgctcaggcaactgacacaagagatgctctggccaaatcagtgtatgccagtttgtttgagtggcttgtagaacaaattaataagtctctctcagttggcaagcgtcgaactgggagatctatcagtattcttgatatctatggctttgaatcatttgataagaacagttttgaacagttctgcattaattatgctaatgaaaggttgcagcaacatttcaatcgtcatttgtttaagcttgagcaagaggaatatgtggaggatggcatcgactgggcaaaggttgacttcgaggataatcaggactgtttgagcctctttgagaaaaaaccactgggactattgtctctgctggatgaggaatctactttcccgaatgccacagatcttacttttgcaaacaagcttaagcaacatcttgactcgaattcttgcttcagaggagaaagaggcaaggcatttgctgtccgtcactatgcaggagaggtggcttatgatacttcgggttttctggagaagaatagagatttattgcacatggactcgattcagctccttgccaaatgcaaaacttctctgccaaaaatgtttgcatcgaagatgctagttcaatcagataattctatgtctgttccatatagatctagtgctgctgattctcaaaaactaagtgttgccatgaagttcaagggtcaactgttccaacttatgcaaagactggaaagtacaacgccacactttattcgttgcattaaaccaaacaatttacaacttcctgcaatttatgaacaaggacttgtgcttcaacaacttaaatgttgtggggttcttgaggttgtccggatttcaagatctgggtatccaacaagaatgactcaccagaagtttgctcggcgtgtttcagttgcaattcttcatcagttcaacattttacctgagatgtatcaagttggctacacaaagttgttcttccgaactggtcagattggcaaccttgaagatactcggaatcgtactctgcatggtattttaagggttcaaagctgtttcagggggcatcaagcccgtcatcatgcaagagaacgaacaagaggagttttgactcttcaatcattcattcgtggtgagaatgcacggcaaatttactcctctttgttgaggaaacatagagccgcagttgttttgcagagaaatgtgagatgttggcttgcaagaaggtatttcataaatgtccggaaggcctcagtgataatacagtctggtattcgtggcagtcttgttcgaagatgtaatggcaatattgatctaataaatgtgctaagagagtttgaatcaaaacaggaggcacatggtgaccaaattttgatcaaggcctcagtcctggctgagttacagaggcggatactaaaagccgaggccacagtacgtgaaaaggatgaagagaacgagatgcttcatcagcggcttcagcaatatgaaaaccgctggttagagtacgaacagaaaatgaaagctatggaggaaatgtggcagaagcaaatgcgttcgctgcaatcgagcctttccgtagcaaagaagagccttgttttggatgaaacgcctaggatgtcggactcatcagtggatcagagctgggaaagcaatgggaaccaccatgtcagcagcggttctcagctggtgccacacactggtggacgtgaaatgaacgctggcctcagcgtcatcagccgcctggcagaagaattcgagcagcggagccaggttttcgctgatgacgccaagttcctggtcgaggtcaagtctgggcaggcggacgccagcctaaacccagacatggagctccggaggttgaagcagaacttcgactcgtggaagaaagatttcagtggacggatgagggagacgaaggtgatcctgaacaagctcggcaatggcaacgagtcatcgcccaactctgtgaagcggaagtggtggggcaggctgaacacctccaagttttcgtgagtttattatgtattgattggtaatttgtagatgtaaccggtattttacacgccggtgtggttctagcttcctagagtttctactctacgggtgctgtgaaagtccagtgtgttggactggatttgtattccacggagggcgagttgtatagttctcccacaatggcttccttttgaggggtcaaggaccactgaattgtgatgtaattacttgctgaagtagctgtcgaaggggggagattgtgagtgcttaatattccactatccttgtgctttactttctgcctgttgtagattcatagatttaaatgttggtatggtgtgacataatctatcatccgatgactcgtagcatgtttggtttgagaaataagatagtttattatttctcacttattttttg

SEQ ID NO: 20230 - DNA, 788 bp, Zea Mays
gcaaaggccaaagcgaactgaaccgatccgcggttgtgcccgtgccgcgcgccagcgccacgcttcctacaatcctactgtagtttaatccgcttgcacggaggagcaacgccgagcaatggcgctcgcagccccttcttccctccgcctcctcccgaccacgccatcgcaggcgccatctccgccctgtgcctcccgaccacgccatctgcgggagctccgtctctgccagagactcgccaccgccgccgccgccgccgccgccgccgcggccgcggccacggctccactcgcttcctcgcccaccacctccgtggccgtggaggagcgtggtgcggggaagggaacgccgatagatctcgcggcgctcgatggcacctggaggctgtgttacacatcggcatcagacgtgcttgtgctgttcgaggcggccgagaggcttccactcctgcaggtgggccaaatataccagaaatttgagtgcaaagatcgatcagatggtggaactgtgaggaatgttgtaaggtggagcatcgagaacttgctggaggagcaagaaggtgcaacactgatggtctctgcgaagtttgttgtcctgtctaaacggaatatctttcttcaatttgaggaggtcgctgttgaaaatatcaagatcagcgagcaactgcagacactaatagctcctgctatacttcctcggtcatttttgagccttcagcacgacggacacgaaaatcagccaacttctctagaaacttagcaaagcagttctcagaccgatgagtggt

SEQ ID NO: 20231 - DNA, 152 bp, Zea Mays
gagagcatcatcgacgttggaggcagggtgctgctgtttggggtcgggggagggcgctgccgtcgggacgtgagggagggcgccgccgttgggacgtgagggagggcgccgccgtcgggacacgagggaggacgtcgccgtcgggacgcgag

SEQ ID NO: 20232 - DNA, 1009 bp, Zea Mays
tcttaaccttttggattggatggttggagcctatgcagtttatatgtggaggcatagaagattttttgggaattctagagagagtttagaacatattgggcgtgtggttgtcctgaatatggtactgctccacttttttctgcttattttattttgccttcgtttcaaaaactttctttgttccatgtgcaacattttcttttttcatagggtatgggcctcctttcaaggggaattgataactggggccatctgggaggcttgcttgggggagttgccatggcatggttcctaggtccggcatggcaatatcagtacgtggcaaaggatggtagagcggttttcaaagacagggctccagtcctccgactaataaaggggtagacctgtgggtattcgtggaaatagcgtggaagaggatgaaaaggggaaagggggtgaagattcagacatgcgccgagcaaagggagtggcgaaaaaacaattaggccctctttggaatgaaagaatttcagagaaatcatacatgaatcagttcatttttcatagaaaaaacacatgaaccttaacatgtaactagttttggtgtcgaaacatttcactgcagagctaattgctgaggaaacacacacgagaatcatattgctttgttcgaatcgtggcaattgttaaatcttcaaagctaagacgagttgtggactgtcagttgtatttccaggtatcaatagccctttttgtactaaccataggatctgctgtcaagttcctacgttggacattgttacgcaaccggatcctctacagtaacttgaagtagctgctgataggtcaggtcattgacgtgcggggttggccttgtctggcccatgcacttaagttgtcggatattactgcagatgaatggcttccgactgttactacgtttcttcttgtccagtactgcaagagatgataaaatatgtaataatgtcctcagtgatctgttaagtgattatgggggtgtttgttt

SEQ ID NO: 20233 - DNA, 1426 bp, Zea Mays
cacacacacacaccaccaccaccaccagtttggaactttgcatgcatccatgcatgagcgagtagcacggatctacctccaacgtacagcagggactgctatctcgtagccgtagagcagttcaggaccgctggaccccgcgccaccgcacgccctgaccaaccaggcggccgcgtccacctcgcagcagcaagcaagcgcgaccaaatggcgcctctaggagacggcggagctgctgccgcggcggcgtccaacaacctggtggtgtcgttcggcgagatgctgatcgacttcgtccccaacgtcgcctgcgccatcgccaagctcggcggagctggacctgggcctggtgcggcgcgccagggtgttccactacggctccatctcgctcatctccgagccgtgccgctcggcgcacatggccgccatgcgcgcagccaaggccgcgggcgtgctctgctcctacgaccccaacgtgcgcctcccgctctggccgtcgcccgacgccgcacgcgagggcatcctcagcatctggaaggaggccgacttcatcaaggtcagcgacgacgaggtggccttcctcacgcgcggggacgccaacgacgagaagaacgtgctgtccctgtggtttgacgggctcaagctgctcgtcgtcaccgacggggacaagggatgcaggtacttcaccaaggacttcaagggcagcgtgcccggcttcaaggtcgacaccgtcgacaccaccggcgccggcgacgccttcgtcggctccctcctcgtcaacgtcgccaaggacgactccatcttccacaacgaggagaagctccgcgaggctctcaagttctccaacgcctgcggcgccatctgcaccaccaagaagggcgccatcccggcgctgcccacggtcgccaccgcccaggacctcatcgccaaggccaactagatggccgcacgccccgccgttccaccacgtcactgtcccccgccgccccgcccctcgtcgtcgacgtcctcggtttcggttcattaggtagatcgagtcttagcgtccgtctctgcgcctctacgctgagacggtttgtttgggttaattaagttagctttcgtggagatttcgccccggggcatcaataaaatgttggcatgcgtggtgggatgctatcctttttttttattttattttattttatttttagcttggatcagttggggttttgaacattgctagtgtcgtgtgattgggaaggctaatgtgatgccttcgatgcagagttttcaatgaatgccttggtgcaaacgtacgattgtgtaataatgccttctattgatcagcgactccaatagtccaatgtgcaagtattcttcgtcttcttggctacaaagatggtttagtttctttaatgaaaccccacaaaagtcttggctacaa

SEQ ID NO: 20234 - DNA, 2166 bp, Zea Mays
gtcgacgacagcgcagaggacgacgtcctcaatatcttcggcagaagtttcagctgcgccttctgcatgaagctgctggatcgccctgtcacaacaccatgtggccacaatttctgcctgaagtgcttcaaccggtggacacataatggagcaagcgcatgtggaaaatgccgtagaccgatcccctacaaaatggtgcagcaaccacgaatcaactctgcaatagtgagtgccatccgtgcggccaggatgtcaaagaacactaatccagcagcagccggctcatcagcaggctcgcatcactatatacagaatgttgataggcccgacagggcatacacaactgaaagggccaagcgaggcggaaaggcaaacgcttcgagcggccagatctttgtgacgactgcgccggatcattttgggccaatccttgccgaacatgaccccaggaggaacaccggtgtgcgagttggagaaacatgggaagatagacttgagtgtaggcaatggggtgctcatctgcctcacatagccggaattgctgggcagagcagatttggtgctcaatcagtcgccctgtccggaggctacgaagatgatgaagaccacggggagtggttcctttataccggaagtggcgggagggatctaagtggaaacaagcgaacaaataaggagcaaggttttgatcaaacatttgtgaagatgaatgaggctctccgacaaagctgcttgaggggttaccctgttcgggttgtacggtcccataaagagaaacgctcttcgtacgctcctgaattgggtgtgaggtatgatggaatttacaggattgagaagtgttggaggaagattggtgttcagggaacgttcaaagtctgcaggtatctgtttgtacgctgtgacaatgaaccagcaccttggaccagtgatgatcatggtgaccgtccaaggccattgcccaacattcccgagttaaaagatgcaactgatataaatgagagagatgagcgtccttcatggggctacgatgagaaggaaggccgctggaaatggatgtacgagccgccaacgagcaggaaacctgttcgcactgggcttcgtcctaagaccggcaagcaagcccggaaaagagcaaggagtgatgagatgcctaacgaccctgaaaaactcctgaatgagtttagctgttgtatctgcttccaagtgatggcagagccactcactgctccctgtggtgacagcttctgcaaggcttgtctgctgggggcatatgataaccagtcctccgtgagagaaagaagccatggcggccgcactctgagggctcagaagatcgtcaagagatgcccatcctgtgcaactgacatcagcgacttcctagcggatccacagatcaaccgagacataatggatgtgattgagtcactgcaacggaaaggcgacaccaccaccaaggacgacgctgcttcatatggatatggtgctgacaaggccgaggaattccgtggtggtgacctgcaagaggaagctgatccggagatggatgctgaggataactctgaatctgacacggatgctgatgcttcttgtggcagaactgtggttgggatcaaggatcaggaaggccagcagctgcagccccagaagcgcaagggtggcgttgccattattggcactgatgatggtcctagcaaaaggattacagcaagtgctgatgtggaacagaaaggtaataagagccatgaatagcggatggtggtggatgctagctgatcgatgatggcttggaaacacaaattaagtcagcatgttgttgtagccatattgcatgtatggcgccgagactgagagaggtttggactgttttcgttgattgcgtactcttgatgcatgcgaaccggattggataaactttgtttttgcggaaaaaaaacatgcaggttggaataccagtactgtcgtcgtttaggtttatttattatatggaagatgtttaatctatttttaagttactagtaggcatgcatgcacacgtatatgtgtttaatttgtggttgtgatcggtatagtcctctagctataacttgcatatgtatatgtgctaatgccgtatctaaaaagaaatgtcacacttattctatgcatgcttatttatgacaaattgag

SEQ ID NO: 20235 - DNA, 149 bp, Zea Mays
ggtgaggctcgcgtccacggcggaggagaagaatggcaagcaattacttgcccacggtggtgtccaactcgaattggaggcgcatacggctttcctaggcaaagacgaacctcccgacctaacaccgagggcaggcgacacggtttaac

SEQ ID NO: 20236 - DNA, 451 bp, Zea Mays
ctgggccatggccctgtcgctcgacaacctcatcaaagccgccgccgccgtcggctcagctcgctccggccgcctctgcctccctgcctctgaggatttgcttggggagggacatatgagattcgcgggttggtacctgaagatcgcggcggtaggggcctccattggcgccgccatggagctcttcatgatccacacgggcttctatgagaaggtaactgtcttggagtcagaaaaacgagcttgggaaagcagtccagaggcccaagctatgagagaagccctcaatccatggcacaagcatgatgaacaagaacaacaaaagaaatagtcaagatttatgtgtcctgtcgagtgtctgtgtcccccatccgtagacccatgaatgagggtcagggccatctgtatccacatatgagcaactggagcaggcagggatgatgaaaggaag

SEQ ID NO: 20237 - DNA, 578 bp, Zea Mays
gtcaggtggttatgttctgaaggtacatttcctgcaaccctgacagtctagtcgccaacgggatcgagctttgcacaccaacacccgagaaacaagagaagaacaaaggcaaccgagggtggcggtctatgagcagcgcgggtctcgctcggcagaggacgaagtcgatgcccaactctgaaccttttatccccaagagggcaatggctgtcgatctgttccctcacacaccgcattgcgagatggttatgctttttgagaggtgaaggaagtgtgtctaccaattggacgcagctggcgtgcctcagattcttgttaagagatttttgacctttgtgtcgaggaccatatctgtttttcctcctcaccttggcccatccatatgttgtaacttagtaacatctattcgattgagaggccatgacggttggtgttggtggttactctttcggatttgccttctgttcggctacacttaatcactggtatgtatttctttttcgtgttaaatggatggcatagtaggactaattcgtgtacgtaaaatgtgtgctagtagccatacctggctcagcttt

SEQ ID NO: 20238 - DNA, 928 bp, Zea Mays
tggaggcgcaacataggatgaatgcagcgttatcgatcagtagatcactggtggatgctagaaccgccaccctcagtggaagcaaccgtagccaagagataaaagatcaaatagtgcggacaattacagaagctggcggtcaggttgactatgttgagattgtggagcaggaaagcttggtgcctgtggagaggatggaccgcccttgtgtaatttgtgtcgcggcatggtttggaaaggtcaggctaattgacaacatcgagatccatgtagatagctctactgttttgtctatctgatgaacgaagatgtttagacacggcaaaatggcataccactttctacgtagcagtagcagaccaagaataaatagcatgatgggctgaatctggatagaagaccatgagctcagtgctagccattcttgaactgctagaatgcagagaataagtactttcacagtttcagtcaagctaaggcagcacaaatgaatcttaggcatctctaaagtactcaacacattgggggaaaaaagaaaggacattaatgactgaatcttcgaagcttgtgatacattcctttaaaaaaaaacagattttacattagcttctctcgttagtcaccagatgcactctatagttaccggaggctcaagggcgcttaaaatctcaagcatgagcaatcaatctggccggacatcttggttctcaactgcccattgatacttgattcaagcactctgccaataacaaaactactcgaactccagcagctccctgtctcgctcactatcttaaactccatgcggtaaacagtataaaaacagtgttttgtacatccatatacatgatccgccgaagacggtctaaggttgcataaatgtatttctctttttgttgtttttctctaaacaaattataaaagctct

SEQ ID NO: 20239 - DNA, 1302 bp, Zea Mays
  misc_feature (1301)..(1302): n is a, c, g, or t
agcattgcaaaagctgaatcagtcagttgaatgagcaaaacagtggagaatattctcaatctgaaaacaacgtagtagaaactgcacaagggcatgataaggagactacccctggacctgtaaaagctacaaagaggataaaaaaactaaaggcttctaaacacaacttgaacaacacaaattctggagcaattgaaggagatgctgatccttctttatcctcattaaaccactgccgctatgacagctcactaagtctgctgacgaagaagttcatcaacctgcttcaaggagctgaagatggagcccttgatttgaataaagcagctgagacgttggaggtgcaaaagaggaggatatatgatataacaaatgttctagaaggtgttcatttaattgaaaagggacttaagaatatggttcgctggaagggatttgacatatcgaagcctaaggatatagaacgccaaatttcttcattgaaggaagaacttgaatctctttatgatgaagagttaaggttggatgacgaaataagggaagcaaaagaaaaactacaagctctcgccctagatggggataaaagaaagtcgttatatcttttgaaggaagatataaataagattcctcactttcagagatccactatgatcgctataaatgctcctcgtggaacttgtgttgaagttccagaccctaatgcggatcagtacatgtatgggaatctgggtttgcaggagaagcactacaaaattgtcctgagaagttcaatgggtcctgttgattgctatttgataagcggtgaccatgaggatatatttaaccagggccagctggtggcagcagacagattaaaacctgcagttgctactgatagttctcaagatttgcagcagatggattgtgatcctaatcaggcaagtaatggtggctgcatgcatgcagcagaaccatccagaaagcaagaaattggcattttgagaatcgttccatcagatgccgacgctgatgctgattactggcttgcttctggcgttgacgttagtatgacagatgcttggggcacgtagtggatggatcctcggagttagggctcttaacctgccccttagacagacaaaatagaatgagtctgcagtgcacaattgcattggggctggatcagtaggatacctttagtctccatgctctaggcccgttaactaacaaatcagagggtacatggtaggcagtagatcttgtacattggcggcatgattgtagttgttactctgtttcatcgacagttaagatagaatcann

SEQ ID NO: 20240 - DNA, 1070 bp, Zea Mays
gtaatcgatcagctccacccctgtccttttgtattttgaaaatgtcttcatatgtgtcattttgtactcgaccagccccagtcctgttcgttgttttttctctcactttgtaatcgatcagctgcaatgaagtgggtagagtgggtagccgctgtcgaggatcgccatcgagagggcgacggccgcgctctcgacgggccagagcagcaactgggtggtcgtcgagttcaggcatccgaacccctccaacgacgactgggtcggcgtcttctctccctcgggtttcaggtactcgacggactatggcatgtttaggctctgcatagcgaacacggaggaggactgggggccgggaacggagcagtacaagttcatcgatcgaagcagccctggctcgtcttcctcgcgcaccgtgttctcggctactcgtcgggtggctggtacgagacaatgatgggctcgtacggggagccgatgggccgggacgggcttcaagacctctggcagagagccggtgagtccaagatgatatggatcattacggcgggcggggcggttcaacgcgacgacccatgtcaccgttggctgcggcggcggcgcgagcctgtctacgttcagagacagtgtgccgtactggagcttcttcagggacgccgacacttgatgttcggcaagctcacggccatcaacagctcgttcctcttgtttgagtacaagaagagccgcgacggccatgtgtatgaccgtttcagtctcgcacgactaccgtcacctggtggcctgctccgtcgacagttgcccccgaagcaccttggccgtctgatcgagctccggactctggagacatgtgttgatagatacactgtttgatatactttcagcattgtttttagttaccattggttctgaatgcactgaaccttctacctcgacactacatgctacatatcaaaagggcaatggtgtagaacaaatcatgtgcttctcactttcatctggttctggtttccagcgcagattctggctggatctttagcatgttcatatgaatgtccttgttcgagcatgcc

SEQ ID NO: 20241 - DNA, 892 bp, Zea Mays
tgcaaaatgaactgtgtttggcctcatgagctggggcaagccaaaatacggttgctgaacgcgctttgttcttgtggaacaatgatcacattgtaagcttgatagcgcaaaatcgtggtgttatatttccaattatatttgaagcgctcgagaggaatatacatagccactggaatcaagcagttcatggtctcactgcaaatgtgcgcaagatgtttctggacatggacagtgaactatttgaagagtgccagcagcagtatatggataaacaagcaaaagccaaagagatgcaggagcaacgagaatcagcatggagacaattggaagctgttgttgctgccaaggctgctggggatgacatggttttggtcaactagatccatgttccttgcatcagtgaaaaacatgtgggccgagtttgaacacattggtggccgcgacagccaatccacgcagaatttctgtgtctagtgaggtcctgctatggttctgagccgttcctttattcagcccctcctcttctgttgcgttaatttatgaacaattggactcttgtattaatccttcattgtttgccctagtttcgtacccacaattgggaaaattcaagtagtgaaaatgactcagctagattgtaaggtttcttttatttgtatttacttcttttctccttgggagttatttcagttcatgttgttgtatggaggtaacagtacaaatggcagataaaagcctttttaacctagtgtccggcatggtagcaatacaatgtcagatcttctgtaggaactgtttcgacgttgctgtgattgtttagcaatataacggctcactctgtggtacgctggattaagttctggttacatgttaattcgtgggtaaatggcag

SEQ ID NO: 20242 - DNA, 1995 bp, Zea Mays
tcaacaacacatgagagtgagtttttctaccactggtcacagccaccgtctccctccttccccaacctcgccgctatcaggtggtggatgcagcagcgcggccgctccttcaacagccgctctcggagcttctcccgcgcccgcgtcgccatcgagggatcttaatctcacagccatccctcggtcatttcgtttgaactcggttctgaaattctgactgacgaacgcacgcaacgacctaccgtgatggacgccgccgccgccgccgccgttgtttctcttaacgggaagatgggggccgaggagaggaaggcgcagaagagctactgggaggagcattccaagaacctcaccgtcgaggccatgatgctggactcccgcgccgctgatctcgacaaggaggagcgccctgaggtcctgtctttgcttccttcatatgaaggaaaatctgtactagagcttggtgctggaataggccgtttcactggagaactcgctaaaacagctgggaatgttcttgctctggattttattgaaagtgcaattaaaaagaatgaaagcattaatggtcactacaagaatgcatcctttatgtgtgctgatgtgacatcccaggacctagtgcttcaagctaactccatcgatctgatattttcaaattggttattgatgtatctttcagatgaagaggttgaacagctagttcagagaatggtaaaatggttgaaggttggtggctatatcttctttagggaatcttgcttccatcaatctggagattcaaaaaggaaagttaatccgacacactatagggaaccaagtttttatactaaggttttcaaagaatgccatacctttgatcaagatgggaattctttcgaactttctctggttacttgcaagtgtattggtgcttatgttaaaaacaagaaaaaccaaaaccagatatgttggctatggcaaaaggtccattctacagaagataaaggatttcaaagatttttggacaatgtgcagtacaaagccagtggaatattacgttacgagcgcatttttggagaaggttatgtgagcactggtggagttgagactacaaaagaatttgtggacaagctggatctcaaacctggacataaggtgcttgatgttggatgtggaattgggggaggtgacttttatatggccgaaaaatatgatgctcatgttgttggtattgatctttccataaacatggtatcatttgcacttgagcgtgccattgggcgcagttgctcagtggagtttgaagttgctgattgcactacgaagacatacccagacaacacatttgatgtcatatacagccgtgatactatccttcacatacatgacaaaccctctttgttcaaaagttttttcaagtggctgaagcctgggggcaaggtccttatcagtgactactgcaggagtcctgggaaaccatcagaggaatttgcagcgtacattaagcagagaggttatgacctacatgctgtggaggcttatggacagatgttgaagagtgctggttttcgtgatgtcattgctgaggatcgaactgatcagttccttggtgttttagataaggagttagctgaatttgaaaagaacaaggacgatttcctgtctgacttcacccaggaggactacgatgatatcgtgaacggttggaaggcaaaactgcagaggagttctgctggtgaacagaggtgggggctgttcatcgccaccaaatgatgatgcagatgtgagatgtgcgtggacgtgaaaataaagcatccttttactataattgatgtcgcattagttattctgaacccaggtagcctgggtcagtacctactaccctgtttatcataggacgtggagagaactcgtccagttttacattcccgtcactgctttgccggagtgctgtggcaatccataaaatctaataaagtaacaataagctgtctgcaactgcaaaaaaaaata

SEQ ID NO: 20243 - DNA, 142 bp, Zea Mays
cttccctcttccttgcttggccgcccccctctctccctctcctcccatgtgtttgcagccacaccacctaaccctagcccccccatctcctcctctccaaggtgccattccttgtcgcttggatctacgtcgcgtggtgcaa

SEQ ID NO: 20244 - DNA, 3488 bp, Zea Mays
cccacctttgcttgcacggcccgcccattcaccggttgaggggagaagggagaggagaggtagctcagtcctcctctgaccgccgacccatccgccatggccgcctcctacgaccgcgagttctggaacttcagcgaccagctgcgcctgcacaacaacttctccaacctctccatcgccgaccccatctggtcctccaccacactggatcctccctcctccttcagcgacgccccgggcctcataggatccgccaagctcgcctttggcaacgccaccacggccaacgccgaccgctacaacgccaacgccgccggtgtcgccagcaagagcatgagcgtgggcatgatcgaccactacctcaacaagaacactaacaacgacgtcgtcaagagctacttcaacaagtccgtcggcagcaggccggccaacaacaacaccaccacaaccgtcaagaagaactccgccgcccaccacgacaagaagcacaagaactccggcaacggcgccggcgtcgacaagaggttcaagagcctgccggcggcggaggcgctgcccaggggcgaggccatcggcggctacatcttcgtctgcaacaacgacaccatggaggagaacctcaagaggcggctcttcgggctgccgtccaggtacagggattctgtgagggccatcaggcccggcctgcccctcttcctctacaactactccacccaccagctccacggcatctttgaggctgcaagcttcggaggatccaacatcgatccagcagcttgggaggacaagaagtgccccggcgagtcccgcttccctgctcaggtgagggttgcaacgcgcaagatctgttcgccgctggaggaggacgctttccgccccatcctccaccactacgacggccccaagttcaggctggagctcagtgtccctgaggctgcgccccgccgccgcgctgccccgccacacccatcatgctcctcggccgccgccccgacggaccaacctacgtcgactggtgtaacctcgacaggtgcaagcgcgtcaagcccttccgctgcggggagctcgacttggaacagcgcattgccaacgccctcaccctcgccgccaccagcgacaggtccacctggagctacaacaagggaaggtacgcccgcatggaggacgccattctccaggccctcgacatagagaaggagctcgctctcggcccggcaaccaaggcctacctccatgcccgcagctgctcgcccaggcccaaagttgaaatgcccaacggacaagtcaaagatactgcagcaaaggatcatgctccaaccatccagccaccgctgccgccgcccaagaggaagcgcaagacgccttatgactccgaggacgatgtgcccgaagtgtcccgtcgcatgagggacctcagggacatcggatccaaggcggtcgtcccaatggacttggccaatgctgctgcagtctctgctcccaagtacgatgatctaactaatgctgggcaggccaaaagaattgtgcactctcaggccaccgcaaagaggaagcatgctggtctgcatcaggaccaaccttgtgggatccccaggaagaaggataggtctcgtccgctctcggagctctgtaatggagacatgtggggtggttccagaccaaatggccagaaggccgatgaacatttgttgggtgtggctacatgttcaagcagctcctctggcacttcaaccttggacactccattggacatgaacaactgtcatcgcagcatggcattcaaaacagatcaagcaaagggcacagaaatatcctgcatgacaaggctactgagtgatgattcccggcatggaaatgattttgtcggaactcctgctgcacaaaatattgtggaaccagatcatttgcatagatatcaaccttgtggattggcaaagaatcctacctggaaacccaataagcaaactaatgacgcccgcaaagctgagaaacatgcacgcaaaaatatgaagatgagaaccataagctctgttgatcaggagaacaagaacaggacaagagattctaatgatcatgaccaccacaaaccaaagacaggaaagcacaaatcaccaagagatggggttgtccttttggagaaaaggcaggagaagcgttctttggacaagaacaagcccgctgaacatgatattaaaatgcatattgccgtagttcctagtggtatggattgtgttggcgcctttcagcagcagcgctttaaaagcaggtgtgatcctgaagagtcattggaaagcttaagcaaccattcaaactgtgagagtggctcggtatcatcgctggtgtttgagaagccactgcaggcattgccgcccggaaagaatctgctgggttatgaaatatgtcatgcagcgaagccaatcaagacactgcatttgaatcctgccctgtatgatgtggagttgagcgtgttggggagcagcaacacggggcgccgtgtgccccttgtttctctaatgagtaggtggaattgtaaagccgtcgtggggtatcctgtctccgtggaggtcagcgatgatgtgtttggctgtccttctccttcatcagagaaagatatccagcaggctgctacaaacagtgtgaatgggatagtattgaagaaggatgaaactgagggtttggaacgtgttgttgtgccaccatcagcgcagacatcccggccaagatgcaaaagccgcagcaggagggcatcagagaaagcagtggacaagttatggcagccacataccaaatggccagcatcctcgtcgagaaagatgcggaggctttcctcttttggtccaggccagagagatgggaagtcagcggtgaggaaagtgtccggggcaaccgtcgcgtgcatcccgctccgagttgttttcagcaggatcaacgaggcgctgagcttctcagttaatgagaatgccctagctgggtgtgggactgcttcccggctgaggaatacttggtagctaggttttgctgtttgttgttcaccgcttgctttttttgtagccatgccataatagcattggtaaatgtttagtgtggcctatcacttggagcatggtaataggtgatgatgtatcgtcatcttggttgtgagccacatcacacttcactcacagtagaggcagtagaaggaagaactgtgctgatgcacccctctttattaaaaaaaagaacatttgatgggtctgtggagcacatggtctgatggtggaagcaaataaattagcgtaggatgatggttacttgctgggagtctgttttggtattagtgatgcatcgctgctgtaatgtaacttcctgtgttgccatcctaagctaattgtaatcggaagtgtcagcttctgcttgccttttttttttttggttacttcctccatccttcccagattacaagtatcattagctttctttattaattgcattttcatagtatacctttt

SEQ ID NO: 20245 - DNA, 1075 bp, Zea Mays
ctgtttctgtgtcattagtcattagtacattagtttcttcacctgacatgtgcataccattcagatatagggatattaatgatggagcttctgatgatgaacaaaagaaacttgttgaagttctcatgatcagctcccaaagtggaccgggtcttctatttccaaagggaggctgggagaatgatgaaactgttgaagaggcagctgcaagggaagctatcgaagaagctggagtgcgaggagatttagtgcaactgctggggttctacgatttcaagagcaagcagcccgaagcaacgtgcagagccgcaatcttcgccctgcacgtgaaggaagagctagcctcctggccagaacagagcacccggcagaggagctggctcaccgttcccgaggcggcggagcggagccgctacccgtggatgcaggaggccctcgtgacaggcttctccgcctggctcgagaactggagaaacggtggtggcggcggcggcggctgcgtggaccgaactgagagatgacaccaccttaaagcatcaggggggcccccggcggagaagccatctgctagctatttcttggcgttgtatcttgcttggactagaattttcttccagaggctgactgcctggcatacatgcatgagggctctctgatgctcggtagcttttgtttactttgtcgctttattacaccgtcgtcttcaggatgacagtctcctcagctgatgatggcccgaggtttgttaaattgtaagcttgctgattctcgcggtcgccagctatatttaactgtcttgtattgagccttgagacaaagcaagctttgtgtatatcatgtgtcgtcgtcgtcgtggtgtactggtgtttgcctttttttgaagagttactggtgtttgccttgctatggaagtgcaacgggagtcctcttgttgtcacagtcgcaacttctctgcctttttaccctcggaaagatgctcttgcgaccatgtcatttgcaagtacacaagtcacaggagatggaaatgttaaaatttcaaacatgagatttctttgttgaaaaggtctgtttgagg

SEQ ID NO: 20246 - DNA, 1662 bp, Zea Mays
tttgaagtcctcaagtacaaaaactacccccaaaccatattggcacccttgcataaaccaaatttacaaatatgtccctcatctctcgaagccgccgcctcctgccatcctgcgactgcgactgcgagtggccgttgctgctcccactcccacagttcgaccgcgccaccgtttcacccccttcctcctcctccgccaccacagtgccacgccactcctaaccctaattctcgggagcctaaccctagcctcaagatccgttcgcctcatgcctctcccttcccgccggcgccgcaggctgagctgagccggaccggcaattccagtcgacgggcgccgttgctgtcgcagttacaacccgcgccatgggctgcgtctgcggccgcccctcctccttcgaggatggccagtgccgcgcgacgcctccgccggccgcgaagctctcggcggcggtgaggagggaggaggaggcgcggaagcagcagttgcagcttcagcagcatgcgagggcagggagtgggagggaggaggcgctcgagaggaggcgggcgatgatggcgatggcagcggcgtgccaggtgaggagccccgtgccgagggcggttgaggcggagcaggtggccgtggggtggccgccttggctcgtcgccgtcgctccggaggccgtgcgcggatgggtgccacgccgcgccgagtctttcgagaagctcgacaagattggtcagggtacatatagtaatgtttacagagcccgtgatcttgaaaaggagaagattgttgctttgaagaaagtgcggtttgataatttggaaccagagagcgtgaaatttatggcaagggaaattctcattttgcgtcgccttgatcatccaaatgttatcaagctagaggggctagtaacatcaaggatgtcctgcagcttatatctggtttttgagtacatggaacatgatctagctggactagcatctttccgtggagtaaagtttaccgagtctcaggtaaagtgttacatgcaacagctcctccgtggtcttgagcattgccacagtcgtcacattctgcaccgtgacattaagggttcaaatctcttgattgataaccgaggcatattgaagatagcagattttggattggcaagcttctttgatcctgaacaacgacagcctttgactagccgtgttgtcacactatggtacaggccaccagagctcttgctcggtgccaccaattatggtgttgccgtagacctctggagtgctggctgcattcttgccgagctatatgctggcaagcctatcatgcccggcagaacagaggttgagcagttgcataaaatatttaaactttgtggttcaccgtcagaggattattggaggaaatctaagcttccccatgccaccattttcaaaccgcaacacccgtatgcaaggcgtgtagcagaaacattcaaagagttccctgctcctactctggcattagtagatgttcttctttcagtagacccagcagaccgtggaaccgcatcttatgcattgcaaagtgagttttttacaacaaaaccatatgcttgcaatccttcaagcttgcctaggtaccctccaagcaaagagtttgatgcaaaacgtcgggaggaggaagctcgaagcaatgcacttttta

SEQ ID NO: 20247 - DNA, 717 bp, Zea Mays
gcccaaacctaatggcgctggcagcctctagccctctacacgccgtccctcctgctcctgctctccacacgccgccggagaaacgcggcggaacgcccagcacgggctgcacggcaggtcggcactcggtagcacatccctcccggtggtccggccctccgccgtcccagcacgacagcacttccggcgaccaggtcctaggctcccagcgtccggcggtcccagcagtccagcacgacagtgacagcacttcgggaccacggctccgcgcgttctgctgtgcagggagggaaaatcctttttggaggatctgccattgaatcagaaggaaactttgtgcaaccaacaattgtggaaattacacgttctgcaccagttgtgaaagaagaactctttggtcctgtcctttatgttatgaaatttcagaccttgaaggaagcaattgaaatcaataactctgttcctcaaggattgagcagttttatatttacaaagtggccagatattatttttaagtggctcgggccccatggtagtgattgtggtatagtgaatgtgaacatacctactaatggtgctgaaattggtggagcatttggtggagaaaaagcagctggtggtggacgagaagcagggagtgattcctggaagcagtacatgaggagggcgacttggagggaggtcctagaggtagtaagtcacttgtttactccatga

SEQ ID NO: 20248 - DNA, 459 bp, Zea Mays
actacaacactaaaccgacacctagacaagtgcacacagtatttgaacaagctggcacaagctaagaaaaatcttgctcaagggagaaggtgatgatggtggcatcgagtccgtggaatttccaaagtgtgtggtggcaagtaattaggcacatggtcacatactcacatggaggagatggaggagagggagagataggacccgggagaggagacatgagaggcacatggtcattatattttgttggttgtaactataagcatgtaattgttggttgcaactgttgctaacctggcatattttgttggctccctacaactttgtcctgaactcctgaacctgaagtcctgatctataattgttggctgcatcactacatgtattttggttctagaactaaaactctgtaagtatggaattatggattatggaatggaatggaactattatgaactataa

SEQ ID NO: 20249 - DNA, 220 bp, Zea Mays
ccaggaggtccatcccgccctccccttccctcccgcgcggcccccctctctgttatcccctgcgtcctgccgtgctaggttccgtttgcttgatcgcggctcctcctttgccgcgctcgattgatttgcgggggcagcggcgactggcgagggcggcgaggcgagccgttgcgcgtgttatgagcagagccgagggaaggggaagactgactacccgccc

SEQ ID NO: 20250 - DNA, 177 bp, Zea Mays
gacgccacgtcgtggcgtggacagggtactccgctgtcgtgcgccggttgaatgcatgcccacgatgttcgctcaagcgctgagaacacgagaatgtagcggccaggcgcggaagtcgactggtgtgggtgaaattgctcgtcggacttctgctgggccgctgatccgcccctcgct

SEQ ID NO: 20251 - DNA, 1099 bp, Zea Mays
cgaaaaatcagcccgaaacccgtactcgctctcgccacggctccaaccgcactcggccctcgtctccgccactcggcgcggcgctatggcccctgccgcgcttctcccgctcgcccctttgccgcatcacccgaacccaccacggcgacccctatgccgctgcggggcctcacgccgcggcttcactgtccacaccgtcatcgccattgcctcggtctcggactccgcctccgaccccaccgcggccgcggaggcgacgtccccatctccgcccccctcgctgccaacgcaaacgccttcctctaaaccaggacccccggctttgggcggcatcgcgaacacgaggtcttggtcgcagtactacggcagcggcttctccatccgcgtgcctccgtccttcgacgacatcctcgagcccgatgactacaacgccgggatgacatactacggtgacaaggccaagccccgggcgtacgcggcccgctttgcatctccagatagggatgagctcatcagtgtggtgattaagccgtcaaatcagctcaaaatcacattcctagaggcaaaagatataactgatttgggaactctaaaagaggcatccaagatatttgtaccggctggtgcaaaaatattctcggctcgaacaattaaagttaaggaagaggaggatattaggacatattacttctatgaattcagtctggacaagcaacacgtagctctgatggctaccgtgaatagtgggaaggtacattgccggcgctaccgctccagagatgaaatggggtgatgatggcgtgaagttacgttcggctgccgtatctctatcggtttcatgatttattgtgcagaagataacaactaaaaaaatgtgatacaactctcagattcagcggtacgcatagagggttctattactgttctagtcattgaaagaaggtaaatagttgggttagtcggcaaaagcaacaaaagcactggatgagactgcaaggtttcagtcaagtctgtaaacaattttggaagtggatatgtattgttatgaagactggcatcatgattgaaatttgataattgagttcttgtctgcctataa

SEQ ID NO: 20252 - DNA, 2047 bp, Zea Mays
cgcattctcccttccctggactattcttggtgggtggagagagccgcagaaggcagctggaagaggagaggaccgcgcgaggctccgtgccggcgagttcgggtgcttttcctgcggtccgagatgcgatcgttgggacccgggagatagcgcagctcgggttcgggttcgggggcggctaccgcgacggcggccgccacctgagcaggatgtttaactggaacgacgagcagcaccagagcaactagatggtaaatcagaagtgtttggtaatgatcaagaagaaaagagtaacagtttccttgattgcgactggggcaatattggaggttttgatgattttgaccgtctatttagccatagtgactccatatttggtaatgagatagttgccaacgacagtgattttctttctgcatcttcgaatttgatggatactgctgtgctatcaatcccagttccggtcgaagcacataagaggccagtgtggtcacgtagaaaaccagaggaaagaggtaaaagtaaaatatccagcagtacaagtggcttctcccacagcaaagtagagagttcatcgacgaatttgcaaactcctatggaacctgtacagactcctcaatatgcactgttccaggatagcaagaagataggagaagttcagcatgctaatcagtttatgtttcctggatatgggtatcctcctgcatatccatttcctaccattccgttagtgtcaaacattcaagctgaaggctatcagacaaaaccagctggcacaagctaccgaacttcggaagattacctaaaacagtcaagttccacagaaatgtcacaagatataccatcaagaccactaacaatgacaccacaagaaaagatagaaaagcttaggcgccggcaacaaatgcaagcactgatagctattcagcaacaacagcaacagtttggtcaacagggtcctggcagtgacacaatggtgtctcaagcatacacccctggtaacaaaaatccggattccttagggagttcaattgtcatagatgaaaacacaaataaggttatttcgcctgagatgattccaactgaccatgaccgggttcacaagagttctgcaatttcagatgatccctttatagaggaaaaaatatattatcagctacaagatgctcttggcaagttggataccaaaactcgactatgcattcgagatagtttgcttcgtttggtccatagtgcaacagagagaaagattgatggtgataggagcactaacaagactaataaagatgaagatgaagcttcggaagacgcatctactaggaaaacaaggtctccaaacaaggaagcagaaacaaccactaatccaattgatcgtatagtggcccatttgctgttccacagacattgctccaaggttgcaaaagcaacaaaagaaataatatcgtcaatccccttgactctagaacctgagccgaaggtacccttgggaactcctagggttccatcaaaagatcaacgagatgagcaagaaattgtgttgcaaccatcacaataatgtgagatgtgctagaagataaggataaaaagttatgcaaatccagtgatgatggcagtcttatgatcgcctgtggccctggagatcgcttgtgtaatatgtagccatttcaacattgtaggatccttttattttcatcctgtaagaacatctcagattgtataggaacctacgattttgtgccgagccgtaaaaagagcaaaccttggctctggacataaggcgtgtttaggagcaagaggattaaagcaaaccttggctcttggctctggacataaggcgtgtttgggagcaagaggattaaagttgattgaaggggctaaaatccttttctattcaatttaaaatagtaagagagattttagtcctttcaatctttttatgatgcgtttggttgcaatgataagacgagacgagatgagataatccttcaaataatgttgtttggtttagggtcaaaggttgagataggattatctcagtgttgttcca

SEQ ID NO: 20253 - DNA, 1584 bp, Zea Mays
ccttgtcctcccaccccgccatttccgccaagctgtcgtcagcctgacgcggtaaccgtgtggactccgctcgggtgggggtggcggcccgaagcccaaaccgcatgggctcgcggccgagctgaccgagccggacccagacccactcgctcctccgcccccgccgcaatggaggagccggcggcggcctctgccctggaggcgcgcggcgacctgcgctcggcgcttcccttcctccccgtcgtcctccgcggcggcgcactcttctggccgccggcggcgcaggagtcgctccgggcgctcgcgctcggccccgacgtcagccgcgtcgcctcgggggacgttctcgccgacgcgctcaccgacctccgcctcgcgctcgccctgcccgcgctgcccccgcgcgctgccgacggcctggcgctcttcttcgacgacctcctttcacgcgcccaggcgcggggctggttctccgaggccgctgattcacaatgcgaggcaaagccaggagcagaaagtgaggtgccttgttcactatttcgagagggtgactgattctatgcctactggtttagtttcgtttgaacgcaaagttcttccccgccgagcgttctctgatggcgttccctatcctgacatccatgcgtgggtggcatctagtgcaccactctgccaattcacgtaggtattttcatcaggtttcatagaagatgaagaacaagaagcccttcaagttgactttgcaaataaatatttggggggaggtgccctttcctggggttgtgtgcaggaagagatccgcttcatgataaaccccgaattgattgtgggtatgctattcttgtcttgtatggaagataacgaggctatagaaatctttggtgcagaacggttctcacagtatatgggttatggttcctcctttcgctttgtcggtgactatttagataccaaaccctttgattcgatgggcagacggagaactaggattgtggctatcgatgctttggactgtccagctaggttacactacgaatctggctgtctcctaagggaagtgaacaaggcattttgtggatttttcgatcaatcgaaacaccatctctatgcgaagcttttccaggatttgcacaacaaggatgacttttcaagcatcaattccagtgagtacgtaggagtttcaacaggaaactggggttgtggtgcttttggtggaaaccctgaaatcaagagcatgattcagtggattgctgcatcacaggctcttcgcccttttgttaattactacacttttgaggacgtgtctctgcaaagattagaggaggtgatccagtggatacgacttcatggctggacggtcggcgagttgtggcatatgctcatggagtactcatctcagaggctgggaggagaaacgcacaagggttttttggcctggttgcttcccagcgacaggcccaagaatcaagtgcattacatgtccgaatagcaatagacccggtttttgtgaggagtgtgtgcatgaacgaagttattgctgacaaaaaaaatgaaataaagataaaagcgtatgtatcagttgcc

SEQ ID NO: 20254 - DNA, 911 bp, Zea Mays
attgtcctttcttccagacacagaaacagtctctggtgcaacctagctcgctcgtgggagtcgcgacgatcgacctctccgtcgccgatggatctgcttgcattgcagctcatcactccaatgatcggggcaatttttgctgctggcctttccgggctccaatgatttattccctgcgactgcgacgacgacgggccggcgggggcgggggatctttgcttgcaaccaaaggagcaggccacgatcgagggagtactgccgggcgaagccgctgcacgcaccgccggctgcgacgcaacgccaacgcaacgcgactagggtgtgggcatgcatgcagatgcaggccatggatcgatgagcgtggatatatacgccacggcacggcgacaacgtagggccctgtgtgcgtgatgagccgactgccacaccggtgtacgccgtgctgctgccatgaagaagaaaaaaatggtcccgatcgatcgcctcagacgtgtgcttccgtctcacttcacctggtctattgtatcaataactaccaacacgaacggggttttgtgtagcaaaacacacacacacacacacacaaaggtagaaataatataatccaaatacgaatccaaaaatgacgcgaattcagacgatggcccctcctcctgcctccaaccaagacgacccaaccagatggtccggcctgtgcgaggtaaacggcgcgcgatgacgatcttactactgcaattcggcggcacgcaaatcttttaccaatatcagagatcagcagtacgacgtgacgtaatggctggcgccgaagaggaccggggcgataatgggcggatcaacgcgccgtacgtgcctcacttttgcgccggtgtcggcactgggagactgactgactgagagataaatctacgcgc

SEQ ID NO: 20255 - DNA, 1130 bp, Zea Mays
caactgtggattcatattagtcgaaaagcatggactgatacattgtgactttaatgagttcaatatcatgattgatgatgatgaaaaaattacggttattgattttccacagatggtatctgtttctcatcgtaatgcccaaatgttttttgaccgagacattgaatgtatctacaagttctttaacaaaaggttcaatctgacatcagagaaaaatgaagaacaagctgggtctgaaagtgatgatgaagggaatagcagaccttcctttttgtctgtgaaaaagactgctggttccttggacaaggaactagctgcaagtggatataccaggaaagagcaagtggagatggacaagtacattgaggaagatgctgaaagacatgattccagctcagatgatgatgacgacgacgacgacaatgacaaggttggtgatgctgtgtctttggtttccttgaagatagaccaggacgattctgctgagcctgattgtaatcttgcctcaagggattcagatgtgcctggaactttttctgaagagaatgaaacaagctgtagcagtgagaagagattggaaagtccctcgggtgacaatggagaggctatgaaaccgcttgaatctgagggcaagacgctttcccagaaagacgacaacaatgatgatgactcatcagaggatgctgatgaagaagaagaagatgccgagctcacgaaacaattgaacaagcaaaggaaaaaggcaatagcagctgccagtggtcggagaaggccagtgtcgtccaggaacgcctgcaaggacaagggtaagggcaccatgaactccaaaatccagaggcaggcgtgccagtggtgatggtcactcgaatgtctgcagtgcctctttcgacaatcgtaaagtagaccaagagtaggattttccatgagggtagaaccgagggatccctgtactagaatcaactctggttttattcttttatcacatgtcgtatacctttttgtacacggttatggtgagatcatttgagttatgcttgtgtttataccaactgaatagctgagcgtactgccttcttcaagagcccgtactgctgccaatgccattgttcttgagcgctttccaatataat

SEQ ID NO: 20256 - DNA, 640 bp, Zea Mays
ctcgcttctcccttttcttccattggcacgcgggcccaccttgtcatctgctcgtacgtgctgttgcacgttcttcctccccacacgctaacgacctagagctatcgccgtggatcccgcctgcgctagcagctcgccctcaaccaccctacccactccatgggcataagctgacggctgcaacccctctctgtttcctcgcctcatcaagccctgcaccgtggtcgtcgtatgaggaaaattcgccatacgtgagggagagtcggtcaccaccgttggatcgcgacttcatcgccgttggggtccgggaatcgggccaggaggcgtcatcgtaccaccgggtgtgtgctcgtgcggcgggggaaaatcatcctcacaccgatgacaatttctcgtcaaagctccgcgaccgcgccaatccgcacttcaccgcggaccggtctcctgtgcgcgccatctccgaagagcctatggctgaggatcccggtgttcagcagatagaagttgctgagcaggagctcattgaaggcaagttgtgcccttgaccactttttatccaataatgttctttgttatcacttatcaatgcataggtttaatattgatgggacccaataagtcaccctagaccggttatcct

SEQ ID NO: 20257 - DNA, 2709 bp, Zea Mays
attggaagttcagaactggctgctatttacatctgaactgatacatgctactgtatctcatggctctggtgctattgctgagcgaatgccgctcattcaaattcttgtccctcatattatgggtctgaaagagcagctcaaagatccatctaaggatgaagaagatgtaaaagctattgctcgtttatatgcagacatgggtgaatcctatgttgacttgattgccacaggttcagatgattcaattcaaatagtgaacgcattgctagaagttacttcacttctggaatttgatatttcgtctatgacatttaatttctggcaccgtcttaagcgtaacctgatcaagagggactcttatgtatcatatggatcagaggtggcaatcgaagctgagaaaaacagaagattacaagtatttcgtccaaagtttgaaactctggtctctctggtcagttttcgagttgaataccctgaggactatcacaccttttccgaggaagaccgcagggattttagacatgttagatatgctgttagtgatgtgctacttgatgcaactgaagttcttgggggtgactcgacgctaaagctactttccaccaagctagctcaggcatatgggagctgcaacaatgagcagaaccccaagtggcaacctgtagaggctgctctgttctgtatacaagcaattgcgagatcagtctcaattgaggagagggaaattttaccacaggttatgtcactgcttccctgccttcctcaccatgagcagttgctacaaacagtttgttcaaccattggagcattttcaaaatggattgatgctgcaccagctgaattatctattctaccacctttagttgatattctcaataagggtatgagtacatcggaggatacagctgcggctgcttctatggcctttaagtacatatgtgaagactgtaggagaaagttctcagggtccctggatggcctcttccagatataccatattgcaatcagtggagttggtggttataaagtttcttcagaggactcgttgcatttggttgaagccctaagtgcggttattacaacgcttccaccagaatctgctagtagagccctggagctaatctgccagccagtaatcaatcccttgcaagaattaatccagcaaggtgatcaagttcttcaacaagtccctgctcggcatttaactgtacatatagaccgactatcaagcattttcagcaatgtgaaacaaccagaagtagttgctgaagctgtatatagatattggccgacactcaagagtatctttgatcaacgagcatgggatacccgtaccatggagtcaatatgccgatcttgcaaatttgctgtaaggacatgtggaagggtcatgggaatgacgattggtgcaatgcttgaagaaatccaaactctctaccaacaacacaaacagtcttgttttctttacttgtccagtgaagttatcaagatttttggatctgatccatcttgtgcgggctatcttactaacttgatacaaatacttttcagccatacagtgcaacttctcagaacgattcaagattttactgccagaccagatatagctgatgattgctatttgttagcatcaagatgtatccgttactgtcctgatctatttatacctacagaaatgtttcaaagattggttgactgtgcaatggctggtataactatacaacacagggaagcctgtaaatcgatattgtcttttctatctgatgtcattgaccttccaaactcatctgacgggggacagtaccgtaaagttattaacacaatcatacttcaccgtggcgcaacccttactagaataatgattgctgccttaacaggggcgctaccatctggtcgtctggaggaggtttcttatgttctgctgtcacttagcagagtctttggtgagaacatgctgaactgggcaagggaaagcattaatcttataccgccacaagccctaacagatgcagaacgtttgcgcttcttcaacaccatatctgatgctgcttctgggtccagtctccataccataacagatagatttggtgaaatctcagatgtctgtagacgaaacaaaacagtgcaggacctagttcagagtgccttgcggcctcacgatttgaccttcacagtggttccacaacagatgtgacaactggatgtctctgcaagttcatacaggtttgagttgcggcggcatacagttcagatttgttcagagcatagataggtcagtaagcatcgtaattctttcgtgtttctcctttgtacatgtgccgtaaattgtgtatttggggagggagataagttgtgttgtattatctcaacaacaaagtgtgatacgctggcagatcacgcggaatggtgatctaccatgggcctgattttgcgttggccggtcagcttgtttttgtaaagtgaggtggccatcgattttatcatataagcttataccggctgttgaaggaagatcaagtttgtgtaccctttatgatccccaaatgtgatggccttctggtttgatgatcagaacggctgcagtgttaagctcaccttgaatcagggcagacgtttgagctaatttggctagttgcatctattcgttaactagtgtgtcctcgacaaggtttcgtcccgtgcttgcaggatgacagcaacaggtagcat

SEQ ID NO: 20258 - DNA, 1148 bp, Zea Mays
gtggttcacataggtttgctcttgagaatcaagctgttaatgaagctactttccgttgccctgatgagctaggatggaaaccacagaggacacctatcatatcgtcagatggaagcatcttacacgcaagacaggtatattttaacagttactacctcgataaatcattgagaatctctaagcatcctacttggaagactagtatttcatattatgctgcttacctactgacttactgtcctacatatcctccgttttaatgaacatgctgtcagtcgattgaatccttttcgtttccaacagtagaaacagagtatcgattttccatcattaaacttagatgtaatactttcgatacaccactctcattaaccactgtgcatacagattcgtcctccttaaaaggtcttcgagtaaggaggtttccccaaggaaatactgcgattgatctctaatgttctccagcttctagatcaatgattaatttgcacagctgcctgtattctgtcagttatcttgtcatgtgcatcatctgctgaactacgttttgtttcataataaccaagcagactacactgccagtggaggagataagcaagtctctccaacagatgggatacgacgtggtgccttcagacgacgctggtcgatttgtgtgcaactacgtctactaccactcactcaagtttgcagagaagcatgggatcgggtctctgtttgtccatttccccctcttcctggcaatcgacgaggaagtccagatgcagtttgtcgcttcccttctagaggtcctcgcttccttgaacttccagtgaacctagtggtagatctaccacttcccggtggtgtattgttcccagattatttgggaaaggtttaagttgttcccaacttacctgtggagaataagatcgaggaatcattcgtggaattatgtgtgtggttcaaaatgtgtaggggaacaaaaacaagtcttctcaaagaacatgtacatgcagtccagatgttaatatcccaagcggtttatatgacaggtgctgttgcagcgttgttctcagagatgctgcttatggatatactgttcgctttagattaaaaccggttgtttagactgatacaactgtaatttataaaaacaaaaacactgt

SEQ ID NO: 20259 - DNA, 1875 bp, Zea Mays
cgacggacgtcaaacggatgctgcgtcagcgtcagaagaagagcggcggcgggcgggagatgctggtcaccatcgacaacctcaagcgcctctgcatcgaccactacttcgaggaagagatcgagggcgccatggcgacgggcgcctgcacgcgtctcctccacagcgacgacctcttcgacgcaaccctcgcgttcaggctcctgagagaggcaggacacgatgtctcagcaaaagacgatgttctacgcaggttcatcgacggcgccagcggcgacttcaagctatctctgagcaacgacgtcagagggctcctgagcctgcacgacatgtcccacctggacgtgggaggggaggcggcgctgctccacagggccaaggagttctcgagcaggcacctcgcgtccgccgtcaggtacctggacgaccctagcctcgcggagtacgtgcggcagtccctggaccacccgtaccacctcagcctgacgcagtacaaggccaggcatcacctccgctacctgcagagcctgccctccagagacgccgccgtggagagactcgcagttgccgagttccagctcaacaagtcgctgcatcagggagagatgcgagagattaaaaggtggtggatggacctagggttggctgaagaaatacctgtggtgcgggatcaggtgatgaaatggtacatgtggtccatggcagccctccaaggatcttccttctccagataccgggtcgagatcaccaagataatctcgcttgtttacgtcgtcgacgacatattcgacctcgttggcaccctggaggagctctccgccttcaccgaggcagtcaaaatgtgggatactgtggctgctgattcacttcccagttgcatgagatcatgctataaggccctccacaccgttacgaacgagatcgcagagattgcccagaaggagcatggatctaaccatgtcaatcgtcttaggaaagcatgggcggtgttgttcgacggtttcatggttgaggcgagatggctagcgaccgaccaagtccctacggcggaggactacctacgaaacggcgtcatcacatcaggagtgccgctcacatttatgcacatattcagcatgctagggtatgatgacccaagcaccgaggaagaagaagaagcgatcatcgaccacatgccctcaatcatctcctgcccagccaagatcctcaggctctgggatgacatgggcagcgcagaggatgaggctcaggaaggattcgatgggtcgtacagggacttctacctcatggagaaccctagccgcagccccggcgaggcggaagcgcacatgcgcggcctcatcgcgagggagtgggaggtgctcaacagggagtgcttctgcaggaggaccttcccctcgaacctcgtgcaggtctgcttgaacaccgcgaggatggtcagcgtcatgtactcgtacaacaaggagcagaggcttcccgtcctcgaggactacgcggcgatgatgttggtgctttgatttgaagcatgcatgcatgcattgctctctccgatccgcagatatgaaagtaaagtccatgtcatgcagatgatgatttgttttgagaccagtagtgtagagtagatattaggttgtgtaaaattagatagttgtgattagaataattgggcaaacgaatatggtatgtaaagatgcaatatatagcaacatatatggtaccgtcgttattattatatttttttcaaaaaaatgtaataatattaaaatatgcaatgcaatgtaatatggcccctgtaggaggcgccacgaccggccggttaattaccatggtgttttagggaattcgagtttcataagagatttaatgatattatta

SEQ ID NO: 20260 - DNA, 142 bp, Zea Mays
gttcgttttattttttttttttttatttttttttttttttttagttttttgtatatcgttctatctttgttttttttttttttttttttttttggtttttttttttttttttttttttttttttttttttttattttttatc

SEQ ID NO: 20261 - DNA, 848 bp, Zea Mays
caaaaaaaaagacactatttatcgtgtccctgtgcaacaatcagctcttgtatcttattgaaaaggagttaatctggatatttggtcacgttcctgggttttctgccacccttccgtctgtgattgccagactccatgctgccaaggacaagtatctatcaccaccagccccagtctcaccgtcatcacaaatgggggagaaacagtggaatttctcttttacatctgtctggaactctatagtgtggcttgtgcttttgaacttcttcattaagatagtcacgtcaacagcacaggattatctcaaaaagcagcaggatacggagatggaacttatttcggattccccgatccaggaccattctaaaactaactagtggcgcagctagtggtgtttatacacagctgctagcagcaaagattctcctctgtagcttaagcccctgcagatgatttcaagttccaacaattagtattagtagttattcatctgcgcagtggacaaaaacatggacacatggtcttggttaacttgtcagttgacgaccttttgtcattgagcctgtacctgtactggcagctcctgttggagtcattctgtttattttcggacatctacacggataaacagtaggaattgtttatggagcacggttggctttttttgaagtgaagagcacggttggctttgtgagatgtatcattcatacctgttcctatgtattctgggaacttgaaatgcaatagaaacctgggaggatttaacaaggatacatcattgtgtcattactatgtgcatgtggtttgcaatttgcacctcttccggaacaggtggtgaatagtctctg

SEQ ID NO: 20262 - DNA, 6273 bp, Zea Mays
caacctcctaccttaggcagcgccaaaccctaaccttactcgggtacgccaccaatggctgagtcggaggacgccaccgccgccgagcccgggtccgggccgccccacgaggacgaggatgcgctgctcgcccgcgcccacaccgtcatctccaggatcatcgaccgcgagctcgaccccaacccccgcctcctccacaccctcgccaccatgtgcgagctccacgaagccagatatcttgagttacgttcagctgacacaatgttcaatagcacgaacacaaggactgcatttacaattgggaagctggccaatttgctccgggacaatgacgagttttacgagttggtgttttgtaaattcttgtctgacacctcctactctgttgctgtacgagctgccactgctaggttgctcttgagctgtcaccctgcctggacgcctccgtatcctcatgtctttgaagactctatcatagataatattaagaagtgggtaacggaggatcctgaagcgtctaatgaatgcaaatggaagtatctaggaaacaataaacccacagatgctgagatgctgagaacatatgggattggtttgcttgctatggcgttgtgcagcagtgggcaattgatagaggatgtcttgactttgggggtatcagcgaagctcatgcgctatttgcgcataagagtccttggggatgcctcatcttctcagagagatgctaatcatccacaggacaccaagcatccttggggcggagacgacagtaggggtaaatcacgtctgtcccaagatggttctcgattggacggaacaagggttgggtatggaatgttaaccaacccgacagcagagaagaacaacgaaccttgtgttggaatgatgcaagcatatggagcaaggtcattggatgacagttttgcttcattggatgattctgatgtccctgaggctgattggaccaatgatagatcttatagcacacgtgtttgtgacacaaagtcaaaacatggggaaaggaattctgtgacgaggttgcttaaagatgaagaggtcagcgaaaatggtgaactgttgaagagaaagctgaatcgagccccctcccgacttagagtgaagggaaaagcaggtgacagcttgccagaatgtgaaatgacacctttatcgccaacctctggattgagaataggaggtcaggctacaagagacaggaatgtggcgagggttgatgatccaaaggaggcaactgatgtgaacaatagattgtttaacaccatttccaaagaagaatacgaagatcgattcagggattgcattattggcttgaaggatatatctgacatcgttttgaaggcagtgagagccgctgaggctgaggccagatctgcaaatgcacctgatgaagctgtgaaagcagcaggtgacgctgctgccgagcttgtgaaatttgctgctttggaggtttggaaaagcgaaaataacagtgatgcggttgtagtagtggcggagaaagctgcatctgctgttgttgaggctgcattgtcaattagtgtctcacgaagtgcaaatcaagttggtgaagagcgtgcaatggaagaagctgtccaaaccagcgaagaccaggatttggaaaattttgttatcagtgacaaagcacagctattacaacttagagaaaattatagcatccagtgtctacagattttaggagagtatgttgaagctttgggtcctgtactccatgaaaaaggtgttgatgtttgcctcacattattgcaaaggagcatgaaaaaccaggagggatgtgaccactttgctcaactccttgatgtccttaaattggtttgtgcactggctgcccatcgaaaatttgctgcactctttgttgatcgtggtggtattcagaaaatcgtctctatgcctagagttacccagacatatatgggtctttctgcctgcttattcacttttgggtctcttcagtctaccattgaacgtgtttgtgcgctttcctcagacacacttgacagtgttgttgaattagcacttctacttcttgagtgcccacaagatttagctagaaaaaatgtggccatctttttcgctgctgcttttgtgttcaaagctgttctggatctatttgatgcccggaatgggatgcaaaagcttctcgatatcctttgtggatgcgcgtctggaaggtctggtagtaattctggaggagcaggatcctccaatgtaaatcaagggaatgatcggtcgcctgctgaagttttgactgcatcagagaagcaagttgcataccatacatgtgttgctctacggcaatactttagagctcatctccttcagcttgttgattccattcggccaagcaaaagtatccgtagtattgcccggaacacttctagtgcaagagctggctgcaaaccttttgacatcagcaatgaagctatggatgccatcttttgtcagatccaacgggacagaaagttaggccttgctcttgtgagagcttgctggcttgcgttggataaatttgttgcctcaaatggtcacatgactatgctggagttgtgtaagtttcaggcacatggtgatcggtatttgcgtgacttaactcaatatgcaattggagttcttcacatcataacacttatgccacagccacatgtccgcaaatcaatagtgcaggggacattaagcaacaatcgtgctggcatggctgtcttattagacacggtgaaaagtctcgactatattgatcatgaggtgatctgtccagcactgaatgtcctcgtcaatcttgtatgcccacctccttctatcagcaacaaaccattgtcaagttccaatcagcaacctgcagctgcacaagcgcttgcttcagaaagcagagaaaagaactttgaaaaaactatttcagataggaatctacttacaaacctgggtgaatctcgtgaaagatctggtgatggcaaccctgctgaaaagaacaataccttgcatcaaggaactcctagcacacctgttgtgccatctggagtagtcggtgatcgaagaataatgttaggagttggaggtggtggtcctggtcttgctgctcaattggaacaagggtaccgccaagctcgagaagttgtaagagccaataatggcataaagattcttttgcagcttcttggttctcggatggttacacatcctgtggctatagattctattcgagcccttgcctgccgtgttcttcttggcctggctagagacgatacaattgcacatatactgacaaagctccaggtggggaagaaattatcagaactgatccgtgatatcagtgctcagacatctgggggcgatagtggaagatggcaaactgagctgacccaagtggcaattgaactaattggggtattgacgaattctggaaaagaaacaacactagcggcaactgatgctgctgccccagcattgaggcgcattgagcgagctgggatagctgctgctgctcctatctcttaccattcgagggaactgatgcagttgatacatgaacatctccttgggtctggttttgctgccaccgctgctatgctccagaaggaggctggccttgcacctttaccattgacagcagcggtgcttcctgcccatcaagttgctgccctggaagcatcatctgttcagcaacagtggccctctggacatgttcagggatttctctcagataaaataaacacgtcgacatatcaatctgcccagagatcagatcctaagctgccttcatctaagaaaaaggcactggccttctcatccagtttctcacgaagagctcggtctccgcatccaagcaacatccttaaaagtcctgtacctattgcggctgatactggagatgcagaaatgttgaataaagcaccactgtcgctgccacttaagcggaactttgtggatgtgaaggatattagttttgcatcagcatcgaagcgccttgcaataactgatcaaatataccaatcctctgcattccaaactcctgctcctactcgcaaaggtctgtcggtatcagttgattctcctacttcatctcattgcggttggacaaacttcaacaatgcttttactgaaaacttggacaattctcaaggcacaccaggagcattgaccaccacagcacttcctggtgtaaatgaccaacaatcaggaaatttggagcgtatgacacttgactcactggttgtacaatacctgaaacatcaacaccgccaatgtcctgccccagttacaactttgccaccactttctcttttgcaccctcatgtttgccctgagcctagtcgcagccttagtgcaccggcaaacatagctgctcgagtgggaagccgtgagataagtaggcaatttagtgggatccagatacctcgtagggatcgtcattttatatacagtaggttcaagcagtgtcgtgtttgccgtgatgaggcatcactattgacttgcttgacatttcttggagatgcagctcgagttgtggctggtaaccacacaggtgaattaaggatatttgactgcaacacggcaaatctccttgagactcaaacgtgccaccaacatcttgttacaatgatggaatcgacatacactggtggaattgagatgattctcacatccagcctaaatgaggttaagatctgggatgccttctcggtatctgcagggcctttgcacacatttgacgactgcaaatctgctaggtttaaccactatggaacttcatttgctgccctttctactgatacagctcaacgggaggttcagttgtatgatgtacagacgtatactcttgctacacggcttcctgataacactagcagttcaggttcaggccgtggttatgtacaacccattatacatttcagtccttcagatacaatgttgctttggaatggagtcctgtgggatacaaggcaaccaaatcctgttcatcagtttgaccagttcacagattactgtggtggtggattccatccagcaggaaatgaggtgatcctgaattcggaggtgtgggatctgaggaagttcaagcttttgaggagtgtcccttccctggaccagacagtaataaagtttaacggaactggtgatgttatctatgccaccctgaggcgtaatcttgatgacgtgacatcatgcatcaatgctcgtagggtcaggcatcctcttttccctgcattcagcacgattgatgcggtgacttactcggatattgcaaccgtccaaatggaccgctgtgtacttgatcttgccactgagtccaatgattctcttattggggtggttgctatggacgatcaccaggagcttttctcttctgctcgcttgttcgaagttggcaggaagcgaataactgatgatgattccgatccagaggacgcaggtgaaactgatgatgactccgatgacgacgacgacgactccgatgacggtgttcttgcgccggtgctggaagggggtacagattctgaagatatcagtagcagcagcagcgatgacggtgatgaagatggtggtgacgatgatatacccagttcggatggcattgaagatgaccggttcattgatgagagacgacgggagttcatgatggatctttttggtgacggttgggacgacgatgaggcttatatgatgggatcctttagcagtggcgacgaggagggttggatcatatgttcgtggcgtgggcgtggcagaagctgacgccgcaggccgcgcaccagctgctggaacaaattattaaaggatacaccggaaaaaagcacaaaggcctgaagaacgtaccgaaatagataaacacctcatttttcaaaaggactcttccacccctggtaaattttcgagtacactctcccacctcgactaacgtacgtgtgttggtttgcggtttgcacgttcattgtaaaatagcaagcaagatcacaagaggtcaaaaccagacaagaccgttcttttaggacgtatgcaatgcaatacaatagtagtgacgagcgcgagaagatagattaatgaagaatatagctagggcaaagagattcggtccctagtaccgtcgtcaaaaagtatatatgttgcaggaaagtttcagtctatagtagtctacacctggccaaatgagcccggccggtctagcttgtttcgagcagctcccaacaatactcggtcgacatgatcaaatttctctctataaaaaacagtgtagtttcgtatatc

SEQ ID NO: 20263 - DNA, 223 bp, Zea Mays
gagtgtatagagataaatgtcacaataatatcagagtacttattacatcgcggaagtcttacaaaataaaagataaatataaattgaactaaaatccatctttggcgctaataagtcaactgggagaggccacctagatcagatcaaactcctcgttgtgtggctcctcttgaaccacctgttcttctcctatggggggggtgtgagacaacaagggtgagct

SEQ ID NO: 20264 - DNA, 2937 bp, Zea Mays
tggaagccatgagtagggcacataggattggccaacaggagacagttaatatctaccgcttcgtcacatgcaaaagtgttgaggaggatattttggaacgcgcaaagaaaaagatggttcttgatcacttggtcattcagaagctaaacgctgagggcaggcttgagaagaaagaatccaaaaaaggtggccccatatttgacaagaacgaactttcagctatcttgaggttcggtgcagaggaattgttcaaggaagacaagactgatgaagagaccaagaggaaccttgaaagtttggacattgatgaaattcttgagagagctgagaaagtcgagacaaagggtggtgaaggggaggaaggaaatgagcttcttagcgctttcaaggcatgtgatgtcgcaaacttttccagtgtcgaagatgatgcaacgttctggagtaggttaatacagccagatcctgcagatatagttcaggaaactttggcacctcgtgctgcacgaaataaaaagagctatattgaagatcctcagcttgacaaaaataataacaggaaaagacgggcagttgaaacacaagaaaagccaaggaggctttctggcagaactgtggaaacagttaattcattaccattggttgatggagcagtagctcaagtacgagagtggtcttttggtaatgttccaaagaaggacgcttctcgttttgtacgagcggtcaaaaaatttgggaatgcaacccagattggattaattgtggatgatgttggtggtgtacttgcgaaggtaccgcatgaagcgcagatagaactatttgatttgctggttgatggttgtcaggaagcagttaaggagaatacagacattaagggcacagttttggattttttcggtgtagctgtaaaggcctatgaattgctagctcgtgttgaagagcttcagttcttggcaaagcgaattgcacgttacaaagatccaatcaagcagtaccgcatccagctaccttataaaaagcctcagtggtcagcaagctgtggatggactgaaactgatgacgctagattgatggttggaattcattggtatggctacgggaattgggagaaaataaggttggatccaaagcttggcctgacaacaaaaattgcgccagcaacacttggagaaagggagacatttttaccacgtgctcccaacttggataaccgcgctagtgctctcctgcaaaaggagtatgctaagtttagcggtaagagcttaaaagtcaaaggaaacacccgccagacagtcaataacgacagtaatagtggagttcgatcaatgaggggccggcaaaaggatgtaccagaaaaagatgataataagccgaacaaagatgacattcagaagcgtagggtaatagtggaagctgaagcaagagaagaaggtgaaatttctgaatcggaggcagagaccaggtatcgtcaggacaaagaggagaagtggcttgaatggtgctctgaagttttagatgaggagcaggaaactttgaagcgcctggataggctgcagaatacaagtgtaaacctcccaaaggaaaaggttctttcaaggattcgcaagtatctcctgataattggggacaaaattggagaagttgtccggcaacacagtgaatcttataggcaatcccgcatggtcatgaggttatggaattatgttgccaccttttcaaacatgtctggggagcaactgcatgatctctatatgaaacttagtcaagaccaactggaaggtggagttggcccatctcatggtggcaatttcacatccattcctcccaataagggaggtaactcaaatcaacttcatccttcgagaaaccaaaggccaactaggtctctccagtacaattctgagtctttccataatgagagctctggaagttctgaagcctggaagcgtcgacggagagctgacacagataatcaatttgacacccagcctttgtgtcaacctccaattatgacaaatggaaataggttgcaggaatctagtagttctgcaggtattcttggttggggtccagttgaaattagacggtatggtaatgagaggccaaaacgtgctgttcatcctagtcatttccctactgggcatggacctttgctgtagctgaaggaagtagatgatgcgaacaaccttgttcattttggcataaccgttcccagtgaatttcagcttccatatagttataaatggtggatctccgtaggaattgaaattctttttccaaaacaaaaaggaataaagagcaacctcacctggatcacagttttgaattatatgccttaaaaggtaatgccaggactctagaggcgacttatggaattgttaacagctacactgaatatccttctgacaccatcacagcaacacaaatacatggtggcttgtgaactgccaagaggatcaatcgaggaagttttgcctgttcagttttgtgatctctcaacaatgatctatagttaaatctcaatacataaattatgctttacattgtaatatattgaaatatggttccgttatgctccctccctctcgatgtgttttgtgccgtttttctaccgtgttgatgtaaaagatgaaagaaatgcatgttctcattttgaggcaacaaaaagttgcagccgggagcataatagtgaaatgcgatggaattatcggatacttatcgattccatagtgttttccctgagacaatgtactgaatgaggtacggttataagaaatggtgataattagcttagtaggtgctcagccattctacaagtcatctggtagtccgaagttgcatgaggcctactttcccctggttgccccacttatgctcagtaagtatgcttctagggttgtatgatgatggcccaattgaatttttaatcctgtgtatgaa

SEQ ID NO: 20265 - DNA, 1691 bp, Zea Mays
atctccgatcgtccgtgtccctcaccaaaagttcaaaaccccatccaattccaaatcccacttctcgccagttcacctccgcctccgctcctcccctccccctcccgtcctgccatggccaccgcagcacgcgccctcgtcgccgcacgcccggcacggccgctgctgccgtctcggcgcctcccgtcctcctcttccatccgtcccgcgcggcaacgtgctggcgtcgggtgcgtccgctgcatggctcggcggccggattccacctattccccgctgcgttcgggccagggcggtgaccgtgcaccgactgaaatggcgcctctgttccctggctgcgactacgagcactggctcatcgtcatggacaagcccgggggcgagggcgccaccaagcagcaaatgatagattgttacatccagacccttgcccaggtggtagggagtgaagaggaggcgaagaagaggatatataatgtgtcctgcgagcgctattttggattcggatgcgaaattgacgaggagacctccaacaaactcgaaggccttccaggggttctttttgtgcttcctgactcttacgttgatgctgagaacaaggattatggtgctgagttatttgtgaacggtgaaatcgttcagcgatctccagaaaggcagagaagggtggagccagtgcctcagagagctcaggatcgaccacggtacagtgaccggacccgctatgtgaagcggagggagaaccaatcttaccagagatgatgtttccgtctctgaagatgtaaaatgtcacggtttccacaagtgtccaaatgcggtactgaagatgcagcagcaactccccactactcatatgagaatggcatccgttctgtttgccgcgcattttaagctgtatatgcttattatgcatttgggcttgtacctcagtcgatatgaacgatgtatcctttgaactaacgcattataatttttgaaaccgttttagccagaaattaatcaactgttgatgattatcatatgatataccgcatgatcatctcggaaggggcccgtccgttcgatcgttcccctctcacaaactgctccagtactccaacccgttaaactgttgatggtgacatgatgccacattgccactggcagtcatatgcatgccgtcaccatcacattctggtagagataacggtgatgcaggcaaacgggacgcggagggtgcagcccgcgatctgtaacgtgtggcgcagcgggcgatctccgattcgctgccttatcctctgctactgccgcaccaaagcgtgagcaagcctgcctcccgcgagagcgctcaaccagccaagccggcgtcagaggcgagcagagaaatggcgggagcgaacttcctctccaccgcggcgctcgtcgcccgcggcgtcgctgcctgctcttctatttcaactccgacacggaggcacccgcaagtacgttacgttcgccccctgaacttactggtttgcctgtgcaggttccatttcaaacccgagggaaccgcgtgattcttggtttgcctctgcagatccgggtgtgctgccgggctgacgttgaggctatggaggcctatgcccatgaagagcgccttcgattccgtcggagagatttcatcggcacctgcgtcggcaccgctattggtttgttcagaggtgataaagtga

SEQ ID NO: 20266 - DNA, 1409 bp, Zea Mays
tcccttatattggctaaagcaatgtagttggtctttgctattatgatatcattgcaacaactactagtcagtatcatgaactgtcaggatctgatggaaggaccattcctggcaatactattgccgttcaagccgacatgccattcactggtcttacaacctttgggggagcgtttctgtcgaagtttgaatgctctcagatgccacatcccctgctagagcatatcacctttgtggacactcctggtgttctctctggggaaaagcaacggacccaacgtagctatgatttcactggtgtgacctcatggtttgctgccaagtgtgaccttatccttcttctgtttgaccctcacaagcttgatataagtgatgagttcaaacgtgtcatttcatctttacgtgggcatgatgacaaaatacgcgtagtgttgaacaaggccgaccaagttgacacacaacagcttatgagagtgtatggtgcattgatgtggtctcttgggaaagtgctaaatactcctgaggttgtgcgtgtgtatatcggatcatttaatgataagccagtgaatgattcagctgttgggccaattggaaaagacttgtttgagagggagcaagatgacctcctctgtgacctgaaggacattcctaagaaagcctgtgatcgacgggtcaatgagtttgttaagcgtgcccgagctgccaagatccatgcttacataattggccatctgaagaaggagatgcctgcaatgatgggaaaagccaaggctcagcagcgactcatagacaacttagacgaggagtttgcaaaggtgcagagggaataccatctccccgccggagacttccccgacgtcgagcacttcaagcaggtgctgggcgggtacagcatcgacaagttcgagaagctgaagccgaagatggtgcaggcggtggacgacatgctcgctcacgacatcccggagctcctcaagaacttgcggaacccgtacgagtgaactgatctgacctctcgcgtccgtcggttgtaaaaagattatcttagctgtcacgtccggtgatggcggacggacgaggcagacgttcctgggagggagatgcctagacggttacgggtcactacttctagctgtccgcagctgtgccaaaaccgagaggacacatgagggttcagatcggacagccacagcgcatagcctgtgttggtttcggcgtcagtgctctctgcacgcgaaggagctgctgcggcaccgttgccgtgccgtctcgctgtgatacattttccctcgtgacgagatgaaaagagagttgcaggcggcagaagcgatacggtgcaatgatagcttgagaccatgtgacgttgctgggcctgggcggcacacgatgcgtgacgcaccagcgccgcg

SEQ ID NO: 20267 - DNA, 5826 bp, Zea Mays
aattttcgtatgataggaagcaagatgtgcataccgagcgagaaccgactatcctcgaagtcgaatgatcttcgacaggggtggtccatgcgtttgagctaaacgatacaggactggctgtagcggactcctgcagcttgagccgaaaaaatggtgtctgccggctaaatccactgtcctcttgcaaatcccatctccctctcgccgccgccgctgcctccgctccgctcccctccccgtcctactcccgctcccactgtcccacccaccacccgaaccttaaacccccacgaacttcgcccaaaccctaaacctcgtcgagccgcagccccgccatgccgaaggtctttggcaccggcgtcttcgagttccggcacccccgagcggccgagtacccactacccgcggacgccgcccccgctacggctgcggcgcccgacaaagttcccgcatccaccggcggcggctccatcacgctcctcgacatccagcgggaccgcctcacccgcgtcgccaccgagcattggggcacggccgccgctgcggcggccttcgacgcggaccttgtcaggaagatctatggcactgagctccgcgtcgaggggaggggccggaaaactgtgccgctgcagcgtgttatgatcctcgaggtcagccagtaccttgagaactacctgtggccgcacttcgacccggttgacgcttccttcgagcacgtaatgtccatcatcctcatggtcaacgagaagtttcgggagaatgtggcggcttggacatgtttccatgaccggaaggatgcattcaaggggttcctgtggcgggttctcaagctcaaggaagaggaaagggctcttaatatggcagagaaaacaaattacctcctgtttatgataaattcatttcagagtttggaggacgagcttgtccgggaaacaatacttcagttagtaagcctaaagctgtggaataccctttcgtttggacgacttcagatggaactctgcctaaaccctgaattgattaagaagtggaccaaaatcagaagaagagaggcaaaggaagcgaaaaaggctgaccaacctatcaacccttctgaaatgctcgagaataagttccttaggaatttaattgaagaattcgtggagattctcaattcaaaggtcatactatccaatcaagatggtgctgaagaatctgtattgaatgagtctttcagtgggcaaattgacgattcttgcgttctatattgtgagagatttatggaatttttgattgacatgttaagccagcttcctactagacgatttttgaggcccctggttgctgatgttgctgttgttgccaagtgccacttaagtgcactctacactcatgaaaagggacggctttttgcacagttggtcgacttgctgcagttttatgaaggttttgagattaatgatcactctgggacacagctcggtgatgatgatgtcctgcaggcgcattattcccgtttccaagcttttcagttgctagcatttaaacaagtgcctaagctgcgagattttgccttgtccagtattggttcactccataagcgagctgacttaacaaaaaagttgcttgtcttgtcagatgtggagctgcaagatctggtttgtaacaagcttaagttaatctcagagaaagatccatgcagtgaaagacgcgattttcttattgaagtcctagttgctttttttgagaagcggcaatcccaaaaagatgcagtaaatgcacttcctttgtatccaaatgagcagatcatgtgggatgaaagccttgttcctagcattaattactctggagaaggctgtcttgccctcccaaaactcaatctccaattcctgacgcttcatgattatttgttaagaaatttcaatctgtttcgtcttgaatcaacctatgaaattcgtgaagacattcaggaagctgttcctcatctacatgcttatatcaataatgagggagagacagccttccgtggatggtcaagaatggctgttccgatcaagggatttaagattacagaagtgaagcagccaaacattggagaagttaagccttctgctgtaactgctgatgttactttcagcatatcaagctacaggtatcagataaaatctgaatgggatgctctgaaggagcatgatgttctatttttgctgtcaatccgcccttcatttgaacctcttagccctgaagaggctgaaaaatcaactgtgccagaaaggttaggattgcaatatgtacgtggatgtgaggttattgaaattcgtgatgaggaaggagcactcatgaatgatttcacaggaaggataaaacgagaagagtggaaaccacccaaaggtgaaattcgtactgtccgagttgccttagatacagcgcagtaccacattgatgttaccgagacagcagagaagggcacagaaaatgtgtatggaacatttaatattctaatgagaaggaaacccaaggagaataatttcaaagcaatcctggaatctatacgtgatctaatgaatgaaacatgtgtagttccagaatggttgcataacatattcttgggttatggaaatccttcggccgcacagtggatgaatatgcctgatcttctggaagttatagatttcaaggacacttttcttgatgccaaccatgttcagcaaagttttccagattaccaggttacatttatcaattctgatggtacaaaaaacctgcatccaagtcccccttttaaaatcaggctatccaagaaaatgagggaaagcagtcatgctttacctggcaacatgaactccaatttgactgttaagagcagaaataatatggctgatggggagcctcagaaagagaaactaattgttgaaacttacattccagctgatcctgggccgtatcctcaagataaacctaaacagaactcagtgaggttcacaccaactcagatcggtgctataatatctggtattcaacctgggttgacgatggttgttggtcctcctggtacgggaaaaacagatactgctgtgcagatattaaatgttctatatcacaactgtccttcacaaagaacactgattataacccactccaatcaggctttgaatgatttatttgagaagataatgcagagggatgtgcctgctaggtaccttctccgccttggtcagggtgagcaagaattggccactgatcttgattttagtcgtcaaggtcgtgtcaacgctatgctggtccggcggctagagctgctcggtgaagtttctaaattggcgagatctcttcgtcttccagaagatgtgggctacacatgtgaaactgctgcatatttttggctattacatgtttatgcccgttgggaacaattcttagctgcctgtgctcaaaatcaagacaaaccctcttttgtcaaagaccgcttccccttttcagagttcttttcagatactccgcagcctatttttaccggcgagtcatttgagatggatatgcatgcagcgaaaggttgtttcaaacatctttctacaatattccaagagttggaggagtgtagggcttttgagctacttaagtcaacagtggagcgagcaaactatctaatgactaaacaggccaagatagttgctatgacttgtactcatgcagcattgaagaggagggactttcttcaattaggtttcaaatttgacaatttgctgatggaagaaagtgcacaaatattggagatagaaacttttataccgatgctgctgcagcggcaggaagatggccatgctcgtcttaaacgttgcattttaattggtgaccaccatcagttaccccctgttgttaagaacatggcttttcagaagtatagccacatggaccagagtctctttacaaggtttgttcgacttggtgtcccttatattgagctcaatgcccagggtcgtgcaagacctagtattgctgaactttataactggagatacagggagctgggagatctgccttatgtccgtgagcaagcaatcttccataaagctaacgccggattctcttttgagtatcagttagttgatgttcctgattataagggaaaaggtgagtcagcgccttctccttggttttaccagaatgaaggggaggctgagtatattgttagtgtgtatatctatatgcgcctgattggctaccctgccaataagatttcaatattgaccacctacaatggtcagaagcttcttattcgtgatgttatcaacaaaagatgcaaaccatggaatattgagccccctaacaaggttaccactgtggacaagttccagggccagcaaaatgatttcattttactttctcttgtccgtacccgttttgtgggtcatcttcgtgatgtcagaagacttattgtagctatgtcccgtgctcgtctgggcttgtacgtgttctgccgtcgttcactgtttgaacaatgttacaaattgcaaccaacattccagctgctcctccaaagatctgataagcttgccttgaatcttgaggagtgcactccttttaccgagcgacctttggaggaaactggaaacatccattacattactggtattgaagacattaattcatctagtaaagttcaggctggaacatcttcgtcaagtgcaatacatgcagtattatgctcctccggcaaatgaactgcctcaagcagcaccagaaaatattgctgatgcaatcccttctgaaaatggcaatgctggaagggctctgaatgatggaaacgaggacatgacccgggaagaaaatggtggtgcaactgacacagtgatcagtaataggatagaggaagacagcgttgaggcaaaggatgacatgacacaggaaggggacaagggtgaagtgagtggcaagggtcacatggctacagaggataggaaaggggaagcacaaggtggcgcagatggcaagctggaggaagcaaatgtgatgtcggcggacaagatgatggaggaagcaaatgcgacgtcggcagacaagatggaggaagcaaatgccacgtcggcggataagatggaagaagcagatgccacgtcgtcggacaagatggaagaagcagatgccacattgccggacaagatggaagaagcagatgccacattgccggacaagatggaagaagcagatgccacattgccggacaagatggaggaagcaaatgccatgtcgccggacaggatggaggagaaaaattctgatccgaaggacaagatggatgaggagtgacgtggtggtgtaaccagttttgaaatagcggtagacttgttctgtcagccgcatatcttgatttggaacatcatgtattcacctgtgttaccgcagatgaagactgatacgtgctccccaagaggtgtagccttgtgggcagaatcaagatcgacatatgatgaccatgttcctgcggttaatggtggtgaaggctgttttccctaccatcttggccaggctatgctggaaaatgttccttctcttccagccaagggtatccatgtttccgcatgtgtttaatcgtgtaaactgtagaggattttttgggtagttttttctgaaacacccgttccatctatcgttgtctccgtaacataacacagctggaacgttgcttttgtatacttgactgactactataattttggcacaagcattagatttttgcagatttgataggccttatcggccattcaaaattttgatttgacagaccaactcacccagcctataaaagagaagcaaatgggagtaagaaataaatgtatgacactggca

SEQ ID NO: 20268 - DNA, 598 bp, Zea Mays
ccataccgaggattaagctcccaggagtcccgtccacggcgcacggcggtaatccgcggtggggcaagcgacggcgagcaattccggtgtcttcaacgctccttggtcatggccaccccatcgtgtatgctccacgtgcaaccccgaagccccaggcccacacgccgaggatgattcgccaccgtgggcggagatcaccggcggcggacggagatgcggggagaaagcacggtcccgaggagagagatgtgaaggagaggggggtcgcggctacgtacttatactcagggggcgcttcgcggttgttgtacgggtaccgagatcaccggcgagctcgcggagtccgcgcgatggtgttcgtcgcggcaacagacttcgcacagcacgcgtggagttcggaaggaagacggagacgaccctgacgacggggccccacgcgacagccagatgagaagtcggccgcgcgcgcgtgtggagaaggcgacgaggctgacagggtggccccgccgatcagcgacgaagcaggcgtgtgcgcaagagggggagagactgccccgtgggacccatatgtcggcgcctggttggagtcttgggctgc

SEQ ID NO: 20269 - DNA, 3468 bp, Zea Mays
tgcttcgctgaatcgtattctcaacagttctcaccgcgacaccgcccatcctctctccgacatcgattcgcgccgagccgccgaccacctgccgccgtctcctccttggtcccagccatggccggcggcgacggcgatcggcatcgcgcgccgaagcggcacaagtcctcgacgccgtcgaaagcggccctggtggacgagagcgccgagttcgactacgctgatgactttgatgacgacgcccacgatgctgatacggaggttaagaagagggattttacgaagctcgagttgaaggtggaccacgcgagccgtccgctctgggcgtgcgccgacggccgcatcttcctcgagaccttctcgccgctctacaagcaggcttacgattttctcatcgccatcgccgagcctgtgtgcaggccagaatctatgcatgaatacaatctaactccccactcattgtatgctgcggtctcagtgggacttgagacaagcactatcatcagtgtcttgagtaaactatctaaaaccaagttgccccgtgaaataattgatttcatccatggatcaactgctaactacggcaaagtcaagcttgtcttgaagaagaaccgatattttgtcgagtctccatttcctgaggtattgagtacccttctgagggatgaagttatatctagagctaggatatctcctgaggattcccttggggcaccttcatttactgttagcaagacatctggccaaatagctagtggacatgaagacctgttaaatggaatggaaattgctgctgcaactgaagacaaggaaacacattcttttgagattgatccttctcaggttgagaatgtcaagcaacggtgcttaccaaatgcattgaactatcccatgctggaggagtatgatttcagaaatgacactgtaaacccagatttggatatggagctaaagccgcaagcacggcctaggccatatcaagaaaagagtctcagtaaaatgtttgggaacggacgagcaaggtctggaattattgtgctaccttgtggtgctggcaagtccttggttggtgtatctgcagcctgtcgtattaagaagagctgtttatgtttggccacaaatgctgtctccgtagatcaatgggcatttcagttcaagctttggtcgaccataaaagatgagaacattagtcgttttacatctgataacaaggagaagtttacagggatggctggtgtggttgttactacatataacatggttgcattcggtggtaaaaggtctgaagattcggagaagatcattgaagaaatccgaaacagagagtggggcttgcttctaatggatgaggtccatgttgtccctgcacatatgttcagaaaagtcatcagcattactaaatctcactgcaagctgggtcttactgctacccttgtgagagaggacgaacgtattactgacctgaattttctaattggaccaaaactgtatgaagcgaattggttggatttagtcaaaggtggatttattgcaaatgtgcagtgtgcagaagtatggtgtcctatgaccaaagagttctttgctgagtatttgaaaaaggaaaattcaaagaagaagcaggtactgtatgtcatgaatccgaacaagttcagggcttgtgaattcctgattcgattccatgagcaacaacgtggagacaagataattgtgtttgctgataatctgtttgcactaactacttatgcgatgaaactgcgcaagccaatgatttttggtgccacaagccatgctgagaggacaagaattctctaccaattcaagaacagtccagaagtcaatacaatttttctttcaaaggtcggtgataactcgattgatatcccagaagctaatgttatcatacaaatatcatctcacgctggttcgagacgtcaagaagctcagcgtctgggccgtattctcagagcaaagggtaaacaccaagataggatggctggaggaaaagaagaatacaatgcttttttctattcccttgtatcaactgacacacaggaaatgtactactcaacaaaaaggcagcagtttcttattgaccagggatatagcttcaaggttatcactagtttgccgccggctgaagaaggacctaatctgagctattacacacttgatgaacaacttgagctcttgagcatggcgctgaatgcaggggatgacatgattggtgttgagcgcttagaagaagattctgatggcaaggctcttattagagcacgacgctctgccggatcaatgagtgccttctctggagctggtggaatggtctacatggagtacaggtgaaggagatcctcatcgaagagtcgaacgttcaaccggtgaatagccctgtgacggtttgcggtgacatccatgggcagttccatgacctgatgaagctcttcgcgacggggggccacgtcccagagacgaactatattttcatgggtgattttgtggaccgtggcttcaacagtctggaggttttcaccatcctgttgctactaaaagcgaggtatcctgcacacataacccttctgcgtggaaatcatgaaagtaggcagttgacacaggtgtatggtttctatgatgagtgtcagaggaagtatggcaacgccaatgcatggcggtattgcactgatgtttttgattaccttacgctatcagcaatcattaatggtcaagtcctctgtgttcatggcggtctttctcctgatgtacgtactattgatcagatacgaacaattgatcgcaattgtgaaattccccatgaaggtcctttctgcgaccttatgtggagtgaccctgaggagatagagacatgggctgttagtccccgtggagcaggttggctgtttggatcgcgcgtcacagcagagttcaactttgttaacggtatcgagctagtttgccgggctcaccagctggtccaggaaggcttaaagtacatgttccaggagaagggccttgtcactgtgtggtctgcacctaattattgctacagatgtggcaatgtcgcttctatcttaagcttcgatgagaagatggaaagggatgtcaagttcttcacagagacagaggagaacaaccagatgcgaggcccaaggaccgcagtcccatatttcctatgacttcaattgtacaattttagaagtctattcgaatctgtaagggctaaagatcaatcagatgtgtttattgttttaggtccagattatagtgcaatctgatgcgtttgatttctgttttcctttaaccacatgtacaatagaccatcgggacagtcatatgttcctgtatctcttcggtgacactgccaaagttttgtttgtgattttgttcccgtgctatccattttggactgtgcttgcgttgtgcagcagaagagtcaggctggttatatcttttatctcatttgagattgttcat

SEQ ID NO: 20270 - DNA, 830 bp, Zea Mays
agctgcaccactaatccactatacagcaccaagtttgagggctcgatgctggttgaccttgaccttgtgctcgtcaaccgagtcccgactgcatcgatctgacggcctttctacgcgcaacgacgaagcttcgcgaatcccctccttccttcggcctcaccttcttattctccgccgaacaagtcttagacgcctaatccgtagtttacatcccgaagggcggcaagggtgatccaggccgaccatggcttacgtcgagagaggtgttgtgaaagacaagcggactatatggcgactgagcataatctcagacttctttcgggctattgtcaacttcatcagaatcttctttgacacactgttctcagtggacaaaactgacagctacaagaaagggtatggtgctggtaagaagtgggatggtggacctggtggtggtggtgggcggggcccatatggaggtggaggtggtggatttggcggcggaggtggaggtggttctctccctgcttgtggatcctgctgcggctaatgagcgcacagccgttctgcctgatgactgcttaacagatgaatacacatgcttcaatatgttctgaagaacatcatagctatcaatatgtatttcactgtcagacgattgtattatatataattagtgtgtcgtttattaacagttaatttacctgtaacttgactctggcatgattcacatggcacattcatggtttatcttttgtgtactgctgtccggttgcataatctctatttatttattaaggtttacttgttaaggcagcaagggtagtttgtcttcctttggttctgtc

SEQ ID NO: 20271 - DNA, 792 bp, Zea Mays
gcctactgtgttgtatctagttgcatgggttgaagcatagatgcagttcatagttaaggctttaaagatctcaccccccccccccattctgaaaatatctcagccctgtgcggttagtgttatccaccagctgaatccttatctgctctcctccccaatctattttctggccagggctgagaggcctattgtgcctataggctggtgtggtgcttgagcatgaaagccacgtgtgtaaccctgttatgctagcgctaggaactcctctcctctgtgtttggttgaagtccgagttgcttgggttgtggagtctttttcctgcccacaagctctaacctgtgttcctcatgtgagcatattgtttctgtgctcaagccgaggatgactcccttcccaaccctgagtgcgctgtcccagagcttgcttgtcgtgttcctgtgccagtggtgaccgcagccacctatgttcacctcaccgtggccaagacactcgaagcaattacacacaaagacaatcctaccgtagacccttcaactagcactttctctaaccgattcctcgcaagcattgaagactaggtaatcatgagctttctaggtgtccctgtggctggaagatgcttccagtcttgaaggaggattagttaggtttatgtgtgaactttggaagggttctaccttcttgctatggtaataagttatgcactttgagtatatcaggaattgtaattattataactatttttatgttgtaaaacttgagttttagaaatataaagtatgtttgcaaagt

SEQ ID NO: 20272 - DNA, 2028 bp, Zea Mays
ttgacacaatccattattccttccccttcgcttcgtttattccccacttccacacggccacaccgccacagccgccgccgccggacggcgctgtccttccctgggaggcgctccactaggctcggctcagctcacgcgcggcggcggtgtccgtggctgctgggcttgcgcgcgcacctgattccgtgctgggcttcgcgagcggctcgggcggctagcgggcgggccgcttggtgctcgtcagcgcgtgaggcggagattacccggcgccgatctggtgctcttgccgcccggagaggtggtgccgggggccattgccgggttctgattaggaggaggcggaggaggtaagtccctagtcttatggggctcgcgccgccggagctggggcagttcgacgggtgggagagctccggggaggagagggagcgctggggctggtgccgccgcagccgccgcggcagcagtaggcgccgcgcggaccccaagggcgccgacgacgacaccgccgtctccaccggttgctgcatccgcctctggcccgtcggaacatgcccgccgccgccgccgccgccgccgccgaggtccaaggtcgacacctccaccagcagcgccagcacgcacggcgcagaaaagtcaacagaaaatggtagcaggaatcaaccggtcgcattggtagtctcaggcctgaaagtctccttggagaagggggttttggatgtgtttttaaagggtggatcgaagagaacggaactgcacccgtgaaacctggtacaggtctcacggttgctgtcaagacactaaaccatgacgggcttcaagggcataaagaatgggtggctgaagttgattttcttggaaatcttcaccatcccaatttggtcaagttgattggatattgtgttgaagatgaccaaaggttgctggtgtatgaattcatgcctcgtggcagtttggataaccatctttttagaaggtctcttcctctcccatgggctatcagaatgaaggttgcactgggagcagcaaagggtctggctttccttcatgaagaagcagaaagtccagtcatttatcgtgattttaaaacatctaatatactactggatgcggagtataatgcaaaactctccgattttgggcttgcaaaagacggacctgtaggtgataaaactcatgtctctactcgagtaatgggaacctatggatatgcagcaccagaatatgtcatgactggtcatctgacatcaaagagcgatgtctacagcttcggggtcgtgcttcttgagatgatgtcggggcgcaggtcaatggacaagaatcggcccaacggggagcacaacctggtggaatgggcacggcccctcctaggggagaggcagcggttctacaagctggttgaccctcggctggagggcaacttctctgtgaagggcgcgcagaaggcggcgcagctagcgcgcgcctgcctcagccgggaccccaaggcgcggcccctgatgagccaggtggtggaggtcctcaggccgctgcagaacctgagggacatggcgagcgcctcctacttctaccagacgatgcacgccgagcgcatggcgcactcgagcagcatgaacggcaggagcagccacggccacggctcctccaaggcacagagcccgttcgggcggaacgggcagcagcagcccgtgcggagcctctcggacgggccccgcgcctccccgttccgctactcgccgaagccgaacgtgaaatgatgaggcacctggtccgggccgtgggcgtcgaagtcgaaccccattcgttgatgtgtgttgtgtacttgtgtagattgacatatgcacaaaggaaaagatgtaggcgaaagaggaggtgtaggttgaatgaatgctgatggatcgttgctatatatttttgcccccaaacaaggcaggtttaggtgtttttagccttgcaatgtgcggtgcctcgtgaatcttgatgctagatgtcgtgttaggtctggtgaagagaaagtgcttcggtacc

SEQ ID NO: 20273 - DNA, 850 bp, Zea Mays
aaatgcatttcgaaataaataaaaaaaaccctccctaaccctaacgcccactagaggtccatctacctaacactagcagccgcgctccctgcttctctcccagccgccgccgactctatctctcccttccctctcaccacctcctcgtcatcctcagcgtgcacgctgcgcgtggccgtagtggggggtggccccgcggcgcgtcggctgccgaggcgctggcctcgccgagggcccggatgcagtaaagaagtctacataattgccaagaatcatcttcatccatggggatccggtaaagcagcagccccttggctgggtaacctactgtgaagcatcaggtcagcagtgaaggagatctgagttcgaagcaaatttgccgcgaattctctccggaaatcattcgagtggctggattttgaagcgcagccatgggatcggaggattttgtctgtaaaatgatgtgattcggcggctcttcaaatgtctgtccaggatgcaaacatgtccagtgacactgatatgagtaaggtgtttgaagacagaacgtttgtgtcatctatccttaattcgcttcctggtgttgatcccaatgatccatctattaaagatttgctggcatcattgcacagccagggagaggaagagaagaaggaagacaagttagacaaaacagaagacgagaagaactgcttcaagctggagtgatgtcgctgtggtgcttttgtgactgatcatctctggagcttttgtgaatgatctagctagctatctgtaattgatctagttgtgaatgatattataattgtgatacttttgtgaatatataattgtggtgcttttgtgttta

SEQ ID NO: 20274 - DNA, 1571 bp, Zea Mays
gtagaacgcgtcaccgaagcaaatctagaagcaaggaacaaggacgcggcgagcggggggacgccggtgtattgctcggtcctcctccctggttgcccgaggcagccgtgacggaggcggaggtagcgggggggaccatgtacagatcggcgggggtcgcgatggcgtggaacgtgttccggttctgcacggctctccgtgggctgggttccatcatgatcctactcgtcctcgccatcgtcggcgttacctactacgctgtcgtcctctgcaactacggccccgccctcctcaccggcggcggcaccactctcgccgcgctcgctgtcctgctcctcttccactttctgcttgctatgcttttatggagttatttttctgtggtgctcactgaccctggttctgttccaccaaattggaatcttgattttgatgcggagaggggagaaactgctcctctcactagctcagagttcagtagccagatgaattcacagcaatctgtggctcttggcaatacggcaaatccaagggctaggtactgtaggaaatgcaaccagttgaagccacctcggtgccaccattgctctgtttgtggaagatgtgttcttaagatggatcatcattgtgtgtgggtggttaattgtgttggggcactgaactacaaatactttcttctgttcctgttttacaccttcctcgagacaactcttgtcacactctctttattgcctcacttcatagccttcttcagtgatatcgagatcccaggaagtcctgcagcacttgcaaccacatttctcacctttgtgttgaatctggccttttccttgagcgtttttggttttatgattatgcatatttcacttgtttcggctaatacgacgacaattgaggcatatgagaagaagacaactccacattggatatatgatcttggccggaagaggaattttgctcaggtttttggaaatgacagaaaatattggttcatccctgcatattcagaagaggatctgagaagaattccagctctacagggtcttgattatcctgtcagtgagaccagattttgatggccaggaattgtaatggggcaattctaacagtgtcctcgtcagatacctcagtgttggacatctactcatacaactgtcagcattgctgattgccctatgcaaggcatctagtgaaatgtgcacaagatgattgtagtaatagtaaccatgagttattcatctgttgcacttcatgtatgtgacgaaggggaagtcctcctacctttgccagaggaagtttgttgtgatgtaaattagttttagcgcctggttagatggaccaaatcttggcgatgcgccaggattttggacttaattctttatccatccacgtgaattgggcaggatttcatccatgcaaactgggcattagtgtggtttgaaacagtcttgtacttcagtttagttatatcatgccatgcaatacatttaccatttgagatatttgtgccgctgttatacactatcaatagtaaatggataagcgctgcgtaattaattcgacattgtaca

SEQ ID NO: 20275 - DNA, 2033 bp, Zea Mays
acgacaaagctaaaaaagatttagcattttggaatggagtgagttttattttatcaaaatttaatatcagtatcaggtcgtgtgtgttggtgactaccttttgttttatcttatgtgttatctggagaactttggtgtttgctagtataaattcatttttatctcaagaaatctaatgattgactcttgactttcacaactcatgtttatttgagtttcaattattttcagggagtttttatcaattgtgcattggttgaaccatttggactcaccttgattgaggctgctgcatatggtctacccatggttgccacccgaaatggtgggcctgtggacatacatcgggttcttgataatggaattcttgttgacccccacaatcaaaatgaaatagctgaggcactttataagcttgtgtcagataagcacttgtggtcacaatgtcgccagaatggtctgaaaaacatccataaattttcatggcctgaacattgccagaactatttggcacgtgtagtcactctcaagcctagacatccccgctggcaaaagaatgatgttgcagctgaaatatctgaagcagattcacccgaggactctctgagggatattcatgacatatcacttaacttaaagctttccttggacagtgaaaaatcaggcagcaaagaagggaattcaaatgctttgagaaggcattttgaggatgcagcgcaaaagttgtcaggtgttaatgacatcaaaaaggatgtgccaggtgagaatggtaagtggtcgtcattgcgtaggaggaagcacatcattgtaattgctgtagactctgtgcaagatgcagactttgttcaggttattaaaaatatttttgaagcttcaagaaatgagagatcaagtggtgctgttggttttgtgttgtcaacggctagagcaatatcagagttacatactttgcttatatctggagggatagaagctagtgactttgatgccttcatatgcaacagtggcagtgatctttgttatccatcttcaagctctgaggacatgcttaaccctgctgagctcccattcatgattgatcttgattatcactcccaaattgaatatcgctggggaggagaaggtttaaggaagacattaattcgttgggcagctgagaaaaacaaagaaagtggacaaaaaatatttattgaggatgaagaatgctcatccacctactgcatttcatttaaagtgtccaatactgcagctgcacctcctgtgaaggagattaggaggacaatgagaatacaagcactgcgttgccatgttttgtacagccatgatggtagcaagttgaatgtaattcctgttttggcttctcgctcacaggctttaaggtatttgtatatccgatggggggtagagctgtcaaacatcaccgtgattgtcggtgagtgtggtgacacagattatgaaggactacttggaggcgtgcacaaaactatcatactcaaaggctcgttcaatactgctccaaaccaagttcatgctaacagaagctattcatcccaagatgttgtatcctttgacaaacaaggaattgcttcaattgagggatatggtccagacaatctaaagtcagctctacggcaatttggtatattgaaagactaaatctttgatctttgctggtcagcagaggaatcaaagcagtaggaatgtaggatcgaggagagtgacaggacttcccctctgtgcacttcgccgaaaagtaataatgggattgctatgcatggcccttgttgtacactagaaaattgggcacgcaaacttgtgtcagtttttccgctgttgcgaaattcagtgatggtgtttttgtaactataccaacctgtgtcagttttgccgttgttgcaaaactcagtgatggtgttttttgtaattattatacatccgaataataagactggtgtttccagacagactatgcaagctaaggggaaatcacgattttcctagatcaaatatgtaatatgttcttttccgatgca

SEQ ID NO: 20276 - DNA, 3117 bp, Zea Mays
tttgactgtagaagtcttcatttgctgaaggaaattctatattcttggaactaactgtaacaagacaatatggagattactcaagattgatagaatggagccatcagaggtcaatgtacatgaggattctactgtgctctcacagagtgattaccttgatatgctaaaaaatctagacgaacaacacaggtcaactggtggagtcaaatttgtcaccaactgttttggaatcatcggtttcattaagttccttgggccctattacatgttaattattactgagcagagaaagattggggatatatttggtcatatggtgtaccaagtttctaagactgcgatgattgagttatcaaattccactacgagaccaaaattaattaattccaaggacgagaacaggtacaagaagctcttgcagacaattgatcttagaaaagatttcttttttagccactcatatcatataatgagaagtcttcaaaagaactttaatgatccacaagaagggtgggaactatatgacacaatgttcgtctggaatgagttcctaactcgagggattcgtgacattctgaaaactacactctggactgttgcattagtctatggtttttttaagcaggacaaacttgcgatatgtgggaaggatattatgctgactctcattgctagacgctcgaggcattatgctggcaccaggtatctaaagaggggtgtgaatgaggagggcagagtagcaaatgatgttgagactgagcaaattgtttatgaagacatgcttggaccatggcaaataagctctgttgtgcagaacaggggttcgattccactattctggtcccaggagacatcaaagctgaatcttaagcctgatatcatatgtaagcattgaaatccttgttcaatgtgttaaatattattcaaacatttttttttcgtgcagtgcatggaaaggacaaaaattatgaggctaccaggcttcattttgaaaatcttaggaaaagatatggaaatcctatcatcatcttaaacttgattaagacacgtgagaagagaccacgtgaaatcatactccgtcgggaatttgacagagcaataaagattattaatagtggtctaccaggcgaagatcatttgagatatttacattgggatcttcataagaactctcaaagcaaaagtacaaatgcgcttcaagtgcttttgaaggtggcatttgaagctttgaacttgacagaattcttttatcgtcaagtttccccagctcaaagggcagagaattcccctaatttaagccctacactgaaaaatggttttggtcctcatgtgtgtgatgatgacaacaattgtggcaatgcagactatgttgatgatcttgatgacatttcccaagaagatacctgtggcaattatgatcctggcaatggaattgcagaagatagatctgaggtcaatggatctactcaaataaagcctccaaaatttcaaaagggtgtattacgtacaaactgtatagattgtttggatcgcacaaatgttgctcaatatgcctatggcctagctgctctaggataccagttacatgcacttggttctgtagaatctccagaagttcatttagactcccctttgtctcggcatttgatgcatttttatgaacggatgggtgacacacttgctttacagtatggtggttctgctgctcacaataagatattctctgcaaaaagagggcacttgaagttcgccattcaatctcaagagttctttaggactctgcaacggtactacagtaatgcctatatggatgcttacaaacaagcagcgataaacttatttctaggatacttccaaccgcaggtgggaaaacctgcactttgggagccagaatctggtgacgagcatgtacttgatgacgagacaagtaaattgatgaagagggcaagatcagatggcagcattcttaataaaagcaaactatcaatgtccagtaatggcccaaatggagttttaaactcagcacttactggttcaaaaaatgaagggcaacatccaaactggagttctgattcagtgcatgggatgtcttcagcctctgacaattccatgtcaaagtcaaggtatactccgacagtgtctcacattaagcatataagctgtgaactagactattacaatggttctggtgattcaaatttcctggatcttgactggctttcagcttcagacaatgaaaggtcaaaagccataagcactcctgatgtgaatatttcaactgatgatggtgttcatgatgtaatctatgggataacggatgatcaagctgctgagatccaggctcagggattatctaaggattttgtgcagtgggttaatcaaggagagacattttggtactgatattccaagatgggcgtaccatgtaaattcaagccacataatggttgcacttgcaaaaaggggggaaaataagggagaagtctacatgatggcagtccagacctcatttcaaagcatattaactcttaaagaccattgcaaggagggaccatcaatgtgcatgagattgtttgtcaaccatcagcaattcagcattctcttttcggtatacgaatatgatgatgggcttagagtcacacgcactgttagaagacttgtctagggaagtgtaccattctgttcatttattgaagcttgctcaccaggctggtagatagtgcattgttattattttttcttaaaaggaatgaaagaatgtaggtagtttattctttttaagatgtaccattgtccaggcatgatccccatctctccatcgtgtaaatatatatgtcccaagtgttccacttttcccttttccttccatgagagttgaggtgggcatgaaagcaccatttttccctcagtctctttgtatgggttttctgaaatcatgtacatttatattttgtggcaagcggagagattgttgtgtaatttccattgtaccaaacgtccaaacccctcttaccaatagaagtctcttggactgtttgtcacattgcagattgctttaatacttgctttaaactatctgattatgtgtaaaattttcgtgtgattccttagggtccc

SEQ ID NO: 20277 - DNA, 826 bp, Zea Mays
tacactcatacactagatctggaaggagagagaatagggccgaggcgtaggggcgccactgcggcgtagagtgccccctacggcgcaatgcaaggggagggggctgcgaaggggcagcgttgcagttagtctgacattttacgccgtcagacgactggcagactgggccgccgccgccctaaaccagctgaggctttcgttggtctcttcgccggcaacgagcaccaccaggagtgaagagttttgttcgccgtgcagtttaagatgtcagaagcacttcagaaagataaggaaattggtgaagaggaagaggaagaggagtatgtattgttagagttggacaattgtctttattcagacatatcgcctggtgctcagttcgtactctctggtttggatacattgacgcctaccttgatagtaggtgacaatctgaagatggtcggggaatatgatgaaactattggcacctgctatctattttctgaaagtgaaactgaaccaaaacctgcaagtgatgagctggcaccttctaaagaaaacacagaaacaccgcttaacagcagtaaggaagcgcccttgaaggaggtgaaccatctggccagcgttcaaaagatcctcaaatttaagccaatcaatgtggagcactcgcagcatcgagcatatcagcacaaggacaaggaactttagaggaaaaaaaatacctgctgttttcttcagtcaatgcattcagtgtacagttttaggttcattgaaatgaggtgggctgtatacttgttgaatgttgagttcatctatatatatgagctactatatcgatctgctt

SEQ ID NO: 20278 - DNA, 859 bp, Zea Mays
atggaggtggcccccatggcaggagctctcgtcgagggcaaattggacccagtcgttggtagacaagatcagattgagcgtgttactcagattttgggcaggcggacaaagaacaacccctgcctaattggagagcctggtgttggaaagactgctattgctgaggggcttgctcagcgtattgctaattgggatgttcctgaaacaattgaaggaaagaagagcgtcggctccatggacgaggacgatgacagtcccgcctccggctccggtcgccataagaagaagctgcgcctcatcatgggcctccacgacggatcagcaaaggttcaaacaggaatatctctgaacaccttgggctctctaggctatgagatagatcatggatggagacagagaatagcagtgtgtcattctaaactgggtgatcagccgaaaagatcccatggataatcattaacaattatatggttgtttctaatttaacagagggagggaaccagcaaaggcactccatgggggaatggttgtggccagatttattaatggtgttgcggctgcaagcgtcgtgtggcatctgtcgcgacctagaggactagaggcatagaccgtcatctaattttgggctatcgtcaacatcttgagagcatcggggtgagccttgatttcctccttggaatgtgattgcaagttcttgtgcttctgaactgtgctttaataattcctgggggttggggggaaatcacattttttgttattgtggtcgtgactcctataatgcattcattttattaaacaaaatgaaattagataattgccatcttattctaatgcctcatgttgatgacaaaaatcataa

SEQ ID NO: 20279 - DNA, 186 bp, Zea Mays
gcacaccggagaactgacgtcggccacgaacctccgtcccaagacttgcttctcttgggaaactgccgtgttcactctccgccgcgccggagctccgttaagctgttgccgcgacattctccgtcgagatccgtttcgagactgcgatctgtttccgagcttcaagggatcaaaaatcgagcgttg

SEQ ID NO: 20280 - DNA, 989 bp, Zea Mays
cttcaagtctcacgccctgaagtcaacagttctgctggtggaggccaaggaggagcggctgcggctgagcgcggaggaggtggcggtggtggagcagctgcggtccaacgcggagtactacgtgtgctcgtgcatgaaccggaaccccggcggcgcgaagcacaacgccggacgcaccccggcggggctgctcttcatccggccatggaacaacctgcagtacgtctccggcgccgccttcctcctcaccgtctactcggacgtcctcgcctcgctgggccagcccctacgctgcggctccggcgacgacggtggcgaacccgccgccggcgacgcgggcgacgtgctggctttcgccaagtcccaggccgactacatcctgggcacgaacccgatgcgcaccagctacctggtcggatacggcgcggcgtacccgcggcgggtgcaccaccgcgcggcgtcgagcgcgtcgtaccggcacgaccgggacttcatcggctgcctgcaggggttcgactcgtggtacagcgcgcggcaggagaacccgcacgacctcgtcggcgccgtcgtcggcgggcccaacggcgaggacgtcttcaacgaccaccgcggcgcgtacatgcagactgaggcctgcacgtacaacacggcgcccatggtcggggtcttctccaggctcatgcagctggaggggcagtcgccacgcccggcgccggcgccggcggaggatctttgataggagaggtcgttttccttgaaaggttcccagcgacaagtggtggtgcgaaataaacttttcaaaaaggattaaaaaaagtgatattgatcgtttaggctggatgtatacatgattctttttgttgattcctagatactaccatatttgtttcatgtctttgcacataacaaaagaatcgaaaagaaggatgtaaatttcaaaaatgaactcgatctgttatttggctcaacaaatatgtttttttgacaaa

SEQ ID NO: 20281 - DNA, 898 bp, Zea Mays
ttattaccgtctgtttgtcctcgtctccctccgctgtccgattgtgcgctgtcgcagcctctgccctctcccagcccgctcctccatctccggtgagacgcgaattgaatcgcatcgaatccatgggcagctcctcgaataccaacacgagcggcggggccagcgacaaggaggagaagaagaaggaggacaagatcaaaggcaaggactcgtcggggccatccttcaaggagaacgaaagggtcctcgcctaccacggccccctcctctacgaggccaaggttcaaaggatcgaaaaccatgaagatgaatggcgctactttgtccattatctcggttggaataagaactgggatgaatgggttgcaaatgaccgcttgttggaattgacggaggaaaacgtgcgcaaacaacaagagcttgataagaatcaggtagttgacaaaacaatgaagtctggacggtcaacacagcataaaccaaaagtctccaatgcggatgcaaaagctgataaagatgacactaagagtctcatttcagtgaaggggaagaaacgtaaaagtcagcttgggactgagtttcctttgccactgaagaagcaacttgtggatgattgggagtttgttacgcagatgggtaagcttgtgaagctaccacgatcacctactgttgatgatattctaaagaagtacttggaacaccgggcaaagaaggatggcaagataaatgactcctatgctgagattctgaaaggattacgctgctactttgataaagcattgcctgcaatgcttttatataagaaagagcgagatcagtatgctgaagaagttaaaggtgatgtctcaccatcaactgtatatggagctgagcatctattgcgcctttttgtttgcag

SEQ ID NO: 20282 - DNA, 2127 bp, Zea Mays
cgaagctgcccgtcggcgtttgctgcggctcccgtgccgcgctctcgctctctatctgcgaggtagcagagttgcttgcgtgcgaaggccgcttggtctggagttaagcgcgtgttgtaatggaggggcgtgggaaccctccgcacaccaccactgatgctgtgatcaagaagccaaggagcgtcgcatccaggaagccaaggtccacggagcagctcacgtatgagtacaatggcatttgcccgccatcttggagcgctccccatgacgatgacactggcgttggagctggtggacatcggaggaaagagctacacctaaatagccctgaaatgaagggctccatggctcataggagcgacgtgcccaggaagataaggagggatgatagatctggaggcgaccatgatggccatggtcggagcagcaaagcaaaggatgctgccaagcatggaagtgaaaatgttcttgccctagagtgcacagcaagaaacaatggatcccctgataacccacagttggtccccagagatgactctatgccttgtgaaaataggtcgagaaaagtaaagctcaaagttgttagtcgaaccctacatgccaaaaatggccaggatgctggtggcagtggtattcctgccacgttggatggctctattcatcagtacaagcaaaaggattctggtggccacacaaacaaagagacccatggtaatcgtgttgaaggaaaacatggcaacgggcatgaaatttttccatcttctgaccttgttcgcaagagcaaaaggattcccaagaagaaaacacttgacggagattctgatgatgaagatggtgaattacgctatctggaaaaactcaaaggggctaaagttgcaccagatcctgtgaacactagccataaaggttatgattttggtgatgatgctctcaagaaaaagaagctatccaagctttctagaaacaagagcaccccatatgaagtggacgacgacttcagaatgtctcgatctggcagggatggtaggaagaagttgaatttaggggatgacaatgagtttatagaagaggaggaatctgagatggatgaaacgaatgggctaaaggaacctgattcacctcaaggtgtgaagattgaaacccctggtcttacaacaagacagcgagcccttcaaggcaggggtggcaatggtgaaagctttattgagtttcctgatggattaccagcagcttcatcaagaaagcaaaaggagaagctctcagatatggagatacaagccaaaaaggcagaagctgcgctgaggcgcaagatgcaagttgagaaggcagagaaagaacagcaggctgaagcgatgaggaagatactgggaatagattctgagaagaaaaaggaagagaagaagctgaaagaacgagaagagagggaaaaacaggcaagattggaagaatacaggaaaaactgcgtccagactgtcatgggcccaactgggactgtgattacattccctgagagcatggggcttccgagtatatttaactccaaacctgtcagctatccgcctccgagggagaagtgtgcaggcccatcgtgcacaaacccgtacaagtaccgccactccaagactctggtccctctctgcagccttgcttgctataaggccgtcgaggaccgtcctcctgcccaggggagtgaaggtggtggtggccagggaagcgatgctgggcagggaactgatgccgcccaggagagtgctgggaagcaagcatgatgaatctagctgcctgacgcgattcaaccgtgaccgtcagttggctggagaagtgtaatgtcgacatggccagctcgctggtgtgttgttttcttggtctctcctctggtagtgtgtcgtctaacaaccaatcaacctgacaaaagataggtgtgtgactgccggtttccttctgcccgtcgtgaaccaagccgggcttcgtaatggtggattggatcgagtttaaaacctatggtgtggtcggttcgatgtatgagactactctagtcgagaaatatgaagggaaacaaggtcgtgggagacctcgggctgtgggcgtctttttcgggttcctctcctggttcagattggttttgct

SEQ ID NO: 20283 - DNA, 2291 bp, Zea Mays
agccgcagcagtacccgcgcgggcccactccccctctcaccggttccacgcccagcgccagcgccagcgcgggcgcggctataaatggcgagccccagcagccccgagaccccgtgccacacatccatccccgttcgcctcttctcctccctcctgccgggtccttaataaagagcagcagcgcaaggtgagccgccagcttgccccgtacgtaccctgctgcttcttctccctcgttggaccgttcgttcgtcgtccttctcccgaggttcgtgcgtggttcgccttcgcccttcgggagatgctgcgaaccttaggcctttccttgctgcggacggggtaactgatacccatgttttgctgctggtggccgcaacgggatggcggatccgagtgtggggttcggtgatcagccggtttctctagatctgggatctccaaaatgtgttttttaatttatcgtgtctcagtcggcagtggagattttttttaaataatggtctgtcggcgtgatgtcgtttgcttgagggaagggagggttctctgattttgagatctgacggcactatttgttggccatccaattcgaacggtttctggttgtctgaattggtttgaacaaaattgcagaggttggtagagcgagcgagaagaaggcaatggcggcggagagcttcctgttcacctcggagtccgtgaacgaggggcacccagacaagctgtgcgaccaggtgtcggacgcggtgctggacgcctgcctggcgcaggaccccgacagcaaggtggcctgcgagacctgcaccaagacgaacatggtgatggtgttcggcgagatcaccaccaaggcgagcgtggactacgagaagatcgtgcgcgacacctgccgcgagatcgggttcacctccgacgacgtggggctcgacgccgaccgctgcaaggtgctggtgaacatcgagcagcagtcccccgacatcgcgcagggcgtgcacgggcacttcacgaagcggcccgaggagatcggcgccggcgaccagggccacatgttcgggtacgccaccgacgagacccccgagctgatgccgctgagccacgtgctggccaccaagctcggcgcgcgcctgacggaggtccgcaaggacggcacctgcgcctggctcaggcccgacggcaagacccaggtgacggtggagtacgtgaacgagggcggcgccatggtgcccgtccgcgtgcacaccgtgctcatctccacccagcacgacgagaccgtcaccaacgacgagatcgccgccgacctcaaggagcacgtcatcaagcccgtcatcccggagaggtacctggacgagaagaccatcttccacctcaacccgtcggggcgcttcgtcatcggcgggccccacggggacgccggcctcaccggccgcaagatcatcatcgacacctacggcggctggggagcccacggcgggggcgccttctccggcaaggaccccaccaaggtggaccgcagcggggcctacgtcgccaggcaggccgccaagagcatcgtggccagcggcctcgcccgccgctgcctcgtgcaggtgtcctacgccatcggcgtgccggagcccctgtccgtgttcgtcgactcctacggcaccgggaccatccccgacaaggagatcctaaagatcgtcaaggagaacttcgacttcaggccagggatgatcaccatcaacctcgacctcaagaagggcggcaacaggttcatcaagaccgccgcatacggccactttggccgtgacgacgccgacttcacctgggaggtggtcaagcccctaaagaaggcatccgcttaagaatgtattgggaagttcactggacatgaggttcatcttcgtctggctctgctgatacctgcaaggattgctgctgctgctgccgcccctggatgtgtgtttgatcagtgactggctgctctgctccatagaagatgaatgaagagagagatgcaagccatgtcggcgccactgaccggcttagtgattggtataatttggtgtggcagcagccaggattaatgcgctggtcttttatctttactactagtttggtctcgtccggtatcttatttttctttccccttttcgagtctgtactgaaactgctgagagatttgcagttttgatctatcatatcctttggtaatactgttcgtctcgagtgcgcactggtgcttgctctgtcgctcgtcgtcggtggcctttgaggaccatgaaaggtgaaaacaatgtttcatgtgacctttgggc

SEQ ID NO: 20284 - DNA, 1750 bp, Zea Mays
catggataatgacagctcttctttggccttaagcagttgtgacataacggtattaggaacatatttggttttctgcacttttgtctaaatgaagatggtccttcctgttgctgttgaagacgtaaagagagaagttaaaatcttaaaggcattacaagggcacgaaaatgttgtacacttttacaatgcattcgaagatgacaactatgtttatatagtcatggaattatgtgagggtggcgagctacttgatcggatattagccaagaaagatagtcgttacagcgagaaagatgctgcagtagttgtccgacagatgctcaaggttgcagctgagtgccacctgcatggtttggttcatcgggacatgaaacctgagaacttcctattcaaatcaaaaaaggaggactcgccccttaaggctacagattttggtctttcagacttcataaaaccagggaggcaattccgtgacattgttggaagtgcctactacgtagcaccagaagtactcaaacgcaggtcagggccagaatccgatgtttggagtataggtgttataacctatattttgctgtgtggaagacgaccattctgggacaaaacagaagatgggatatttaaagaggtcttaaaaaagaagccagatttccgccgcaagccttggtcaaacattacttcgagtgcaaaagattttgtacaaaaattactagttaaggatccccgtgcaagactaactgctgcacaggcattatcacatgattgggtgagagaaggaggaaaggcatctgaaatacccttggatatatcagtattacataatatgcgtcagtttgtgaaatacagtcgtttcaagcaatttgctttaagggcattagcatctacattaaactcagaagagatgtctgatcttcgtgatcaattcaatgccattgatgttgacaaaaatggaacgattagtcttgaggaactgaagcaggctcttgcaaaggatgttccatggagattaaagggtccacgtgttttagagatcattgaagcgattgacagtaatacagatgggctagttgattttgaggagtttgttgctgcaacactacacgtgcatcagctggtggaacatgatactgagaagtggaaatcattgtctcaagctgcatttgataaatttgatgttgacagagatggctacatcacacctgatgaacttagaatgcatacaggaatgaagggttctattgatcccctcctggaggaggctgacattgacaaagatggcaagataagcctagatgaatttcgccggctcttgaagactgcaagcatgagcgcacgcaatgtacaaactcctaggggtgttcgcaagtcatagttttctgttttttgtagttcacataactgaactagagagcagcagcacatgtgattggagaaaggcttttccatgtaaattagacaatcaataatacacatgaatggaggtaatccgtagttgttccttgaaaacgagcactgtattcttgctattgcaatactatgtttggtttgttcccagcaagttctgcagttgagctttccatgctcgaaatcgaatgttgtaaaaatgttgcactgctagttcagtttagattaggtttgagtcagttagagataagatgggactatgtagttcagaattaggtttgagtcaactaatgataggttatgccatttgggattgtatctacaaggtcctctattagattgctct

SEQ ID NO: 20285 - DNA, 2958 bp, Zea Mays
ctcgctcctctggccttccctccagctcgttccgacgttcccctccgccttcggccgtggccatggccgccgccgccactttcggcttcctccaccctctaatccggaaacctttagttccaccactgtacatcctcccgcttcccacccaaccccacgccaaaacgcaccctcgctctctccccctcctcttcctcctcccgcgccgccgccggggaggccccatcgctgccttacccaacaccacatcttcgtccacgaatgcctctgcctcgcccacctacgacgtccgggaggcagaggccgccgtcgcggatctcctccgcgagggcggcgcctccgcggacgacgccgccgccatcgccgcgcgcgcgccggcctacgccgctatgctcgccgatggcgtccgcgagctggacgagcttggcctctgggcgtcgtggagctccggtgccagtgctcggctgggcctcagcggtgtcgtcgagatggagatggggaggctcggttttaggaggaaggtgtatctcatgggacggagcaggcctgaccacgacgtggtgccgctcctcgagagcttgggagtgcgtctctcctcggccaagctcatcgcgccttacgtcgcttctgcgggccttactgtgctgattgatagggttaagtttttgaaggaaatgttattttcaagcagtgattatgcaatactaattggaaggaatgctaagcgcatgatgacatacttatcaatacctgcagatgatgcactccaaagtactttatctttttttgaaaaaatggaggctagatatggcggtgttagcatgttgggacatggagacatgtcatttccttacctcattgaatcatttccaatgcttcttctctgctcagaagataatcatctcgagccgttagttgattttctcgagcacattggaattccaaagccaaagattgcatcagttttgctgctatttcctcctatcattctttctgatgttgaaaatgatattaagcctagaattcgtgaatgggagaaggctggcattgaacacgactatattactaggatgttgttgaagtatccatggattctttcaacgagtgtgatagagaactacagtaaaatgttgttgtttttcaaccaaaaagggatttccagtacagtcctcgctattgctgtgaaaagttggccacatattcttggctcctcttcaaaaagaatgaattcagttttggagctgtttcgtgttctgggcatcagtaaaaaaatggtggttccagtcattacatcaagtccacagttattactgagaaaacctgatcagtttatgcaggattaactacttattggagatgggtttgtctaagaaagatctgtgctcaatgatctctaggttttccccacttctaggttacagtatagaacttgttatgaaaccaaagcttgagtttctgctaagaaccatgaagaaaccacttaaagcagttgtagaatacccaaggtacttcagttattcacttgaggggaagatcaaaccgcgtttttggctattgcagagtagaaacatagactgcactctgacagagatgttagcaaagaacgatgaactctttgctgaagagtacttggaacttggaggattgctcgagaaacctgtacaatcaagcataggtggttaatttctggacttatttgaaccatgcagtgcactatgctgaagctgttcagctttatgcttggattggtgaggctgtttttcagatgggaggccacttttttttcctgaaaacgaaggagagctgtgtttctttgtattcaaatgtcgtggctctgataaccattgcagttgaatctcacgttggtaaaggtattaacactcttttctggaccgataaatggctgcttggttcctgtatcggagatgtggcgccagctgttcttgctatggtaccagcaaaaataattaaaacaagggctgtggctgacgcactctcaaacaacagttaggtatcaaatattaatggaggactgtccatgattggtctgttcaattttttcagctatgggatgccacacatgaagtttctttaaccattgatgatggtcgccatatctggagattctctggttcggttgaattctcggcgatatcggcctatagagtttcttccatggtttggtctcctttgatccttggaagcgtatttcaaaaacttgggctccacctaagtgcaagattttcatttggctagctgtccgaaatcgctgttggactgcagaccgattgccttggagaggactggcacacctagttcattacgttctttgcgacctggaagaggagaatattaatcacattttgttttcctgtgttttctcgagggttctggtttagagttttctcccggctggggtatatttattgaccatgtgttggggtcccaggagcaatcgtttgcagattggtggtgaaaggcttgcaaatatctcccaaaagaaagaaaaaaggaagggcatggattcaatgattatgttgcgaatatgtggagtgttctgcatgctctcgaagatgaacaacatctctggtgtcttgctgtaagagttttgttcttgtccggagtgcaagcacagcccctcacggctctgtccggagcgagggtaaagtttgtacgggaggccacttttccggtgcttagtatcaaaaaggtaatacttgttctcatgaaagtcacctaacggaagttacaggtgcaaatttagattgatgagtgatgttgttaactcaatacagcaatgcattgggtattgggaaggtgatgaagaaattagttttcgccatacgcctcagttttactaatgcttcgtttagatgtcgatattggaggtcatgtaattgaatttgtttgaataccaaattaatcatagtatagtattgaaatgagatgtaattccaa

SEQ ID NO: 20286 - DNA, 4321 bp, Zea Mays
gaaaaatccaccaacattggcaattctcgtgccggcgcacttcgcttctcactcgatctgctttgctctgctctcggtctcggctgcttgcctgcttcgagtcgtcgccggcgggagcagagaacccacccgcacggtgcgatgtcgttgaccgcggcccccgtggccttcatcggcctggacgagctcagcgttgagctagctgcctccttcctccgctccggcgcttgcgtccgctccttcacccccgaggcggaacggtcgccttctgcggcgctcgcggagttgaatggcctcctccagtgcgcgagcccagtggaagccgcgcgagatgctgcgctggtcgtcgtgctaagcgatgctggtggggttgacgagttgttcttcggggttgaggggatcgcgaaagggttatgcgcgggttctattgtattgattcattcgacattgctgcctagtcagttggagaagctggagcaggagcttacagatcagaagaaggatgtcttccttctggatggatacattttcactggtttatctgatgaattaaagcaacagattattattgttgcatctgggagacaggacatagcagaaaaagctagcaaatttttccatggtctatacaaaaccatttattttgctgaaggtgaattctgcactagcagaaaaattaggatggtgaatgatttgctggagggcattcattttgttgcgtctattgaagcaatgtatcttggtgttcgagctgggattcatccaacaattatttatgacataatatcgaatgctgctgggagctcgaggatatttgtggagttagttccaaaacttctgagtgaagatcctttgctgattgattttctaaaatcaacaaggaaaaaagcaagccatgtgatggatatgtcaaaatcagtaacatttccactgccacttctgggtgttgcctatcaacaattggtacatggttcatcagcagtaactggagatggatctgcctcaccgctgaaggtttgggaagcatcgtttggagtaaatattgtagatgctgctggcgaacaaatttatgatgcaagcaaattagctgatcagcttgttgcggaatctaaagcagcgaagcggattggcttcattggtcttggagctatgggctttggaatggcatctcatttgctgaaatcagggttctgtgttgttgcttatgatgtctacaagccaacaatggccaggtttgctgatttgggtggatcaacaaaaggttctcctgaggaaatagcaaaagatgtggaaatacttattatcatggttgcaaatgagtctcaagctgatagtgttctttttggaaacgctggtgctgtaccagttttatctgctggaacatctgtcatcctttcttctacagtttctcctggatttgtgatccacctcaacagaagattagaagctgaatgccgacagataaagttggttgatgctccagtatctggtggtgtcaaaagggcggcggatgggacactaactataatgacttcagggacagatgaagccctccattgcactggttctgttctatcagcgctgagtgaaaagttgtatgtaatcaaaggaggatgtggagctgcaagttctgttaagatggtcaaccaacttcttgctggggttcatatagcttcagcagctgaagccatgtcatttgctgctcgactaaatttgagaacgagaagagtcttcgaaattatgcaacatgcaaggggttattcatggatgtttggaaatcgtgtgccacacatgctcgataatgattatacaccctattctgcagtggatatatttgtcaaggatcttggtatagtatcttgtgaaagttccaattcgaggatcccagttcacgtctctagtatagcccaccagctgtttatttcaggatctgcttctgggtggggtagatatgacgatgctgccgttgtgaaggtctatgagacattaactggtgtaaaagttgaagggaaggctccgatgctcagtaaagaagatgttcttcagtctcttccatctgaatggccagaagatccaattgataatcttgtacctattgcatctcatagtagcaaaaagtttcttgtagttttagatgatgatccaactgggactcaaacagttcatgatatagaagttttaactgaatggcctgttgaagcccttgttgaacagttcctcaagctaccaacttgcttttttattttgacaaactctcgttccatgactgctgataaggccatgctgctagtacaaactatctgtaaaaatcttaaagctgcggcagagaaggtccctggtgttagttatacaatagtcttgagaggtgattcaactctacgtggtcatttcccagaggaagctgacgctgctgtctccgtattaggtgagatggatgcttggataatctgtccattttttcttcaaggtgggagatacactattaacgacatccactacgtcgcagactctgatagattaattcctgctggtgaaaccgaatttgccaaggatgcagtttttggctataaatcttccaatctcagacagtgggttgaagagaagaccaaaggacgggttttggagaaccaagtttcaacaatttccataactctcttgcgtaaacaaggaccaactgctgtttgtgagcatctctgtagcttggagaaggtgtctgtcgagatggtttcaatgaaatcaatggaggacagagaccaagaaatcagacgaattgttgaactagggaatgcttatatacaatccagaaaagacactctaattctcaccagccgccaactcattactggaaaaactcctgaagaaagcttagaaattaattataaagtgagttcagcactagtggagattgtgagaaggattgatagtaaacctcattatatcattgcaaagggaggaatcacttcatctgatattgctacaaaggcgctggaagctaaacgtgccaaagtcatgggacaagcattagctggtgtacccttgtggcagcttggtcctgagagtagatttcctggggtcccttacattgtttttcctggtaatgttggtgataacagtgctcttgctaaagtggtgaaaagttgggcttccccatctagaagttctacaaaagaaattcttcttaatgcggagaagggcggttatgctgttggtgctttcaatgtgtataaccttgagggaattgaagctgttgttgcagcagcagaggctgaaaagagtcctgctattcttcagattcatccgagtgctctaaagcaaggtggagtcccactggtagcatgttgcattgctgctgcagaacaatccagtgtgcctatcagtgtccactatgaccacggcatttccaagtcagacttgcttcaagctcttgaagcgggatttgattcagtcatggtggatggttctcatctaactttaggggataacatcttatacacaaagagcatatcttccttggctcatgcaaaaggtttacttgtggaagctgagttgggtaggctctcaggctctgaagatggcatgaccgttgaagaatatgaagcaagatttactgatgttgcccaggctgaggaatttattgatgagacaagcattgatgctctagcagtttgcattggaaatgttcatggaaaatatccacctagtggaccaaaccttaaattcgacttgctaaaggaccttcgtgcattaacattaaagaaaggagttagcttggtcctccatggagcatctggtctatctcatgagctcgtaaaggagtgcatagacttgggcgtgagaaaattcaatgtgaacaccgaggttcggaacagctacctggcgtccctcagaaagccagaaaaggacttgattcaggtgatggcgtctgctaaagaggcaatgaaagctgttgtagcagagaagctgcgcctgtttggatcgtgtgggaaagcctgagcgaagtacttgcgttgcgccggcaacatgcagtacaagaccgactgcatcatcgggttcgtgatgctgctgctactgtgcagttgcttacagttacagctcattgcgttgaacagctgaagtggttattgtactttgcagtgtagcgcaactaaggctaattcataaatcgtaataatgtatgtatgctgccccgctgtaaaaatgctccgtcgttaataaatgccatcgcgcttgctgtgcctttgtttacatttttattcgcctctcgagtgttctaacatgcaatctcagttgtcctatttagccctagtttgaaaactcaaat

SEQ ID NO: 20287 - DNA, 764 bp, Zea Mays
agcgcagttcctttattatcgttgtggcgcgcggcttgcttccacactcctgccgctgcagctggactcgtctccgatcctccaccaccaacttccattttccccaaccctccacgcccttctccaagaaacagagcgacgatagccgtgtcgacgagatcgacccagcagcaggatcgatcggtcagagacgatgatgatggattccgcggagcatcagaagtcgctctgcaacgcgtgtgggatccggtacaggaagaagcggaggcaagagctaggtctcgatagcgccaagaaaccacaacaaaaccagcggccgccgccgccacagcagcagcagcagcaagaggatcactgtccggcaacaagtgcagtcgctgtcagagacaacaccaaaagcagcaggctccaagtggtgaagaaacggagggtcctgatgggagtggaggaggccgcagtcctgctcatggccttgtcctcctcatccagatccacgctgctacatggctaggaactcggcacatcacccaaaaaagggctgctcgttgtgtacatacatatacaggacgcacaaacacaaacaggccacccaggggttccaagccagcgatgtatctgttgggtctatgcttcgtcgccgaaggtcttcaagggagaagcggcttaaaatgtgtgagcaggtatcttcggactcgtatcagaaagggaaaagctacaaaggttgacacagcgccgaagctgtgaagcaggaaagcttcgacatg

SEQ ID NO: 20288 - DNA, 1598 bp, Zea Mays
actgacgccgtctctacaatctttttttaccaataaaaaggtagagaatataagaaaccgtcacgaccgcctccgccgtgctcttccatccgttccatggcgccgccgctcgccctgctccttctcgccgccatcgtgctctcgcgggccgtctcccacgcccacggcggcggcggcggcttctacgacccggcgagcgtcactcagctctcctcgcgccccagggcgttcctgtacagcggcttcctctcggacaccgagtgcgaccacctcgtcagcctggcgaaaggcagcatggagaagtcgatggtggcggataacgactccgggaagagtgtggcgagccaggcgcgcaccagctccggcaccttcttggccaagcgcgaggatgagatcgtgtctgcgattgagaaacgcgtagctgcttggacatttctcccggaagaaaacgccgaatcactccaggtcctgcgctacgaaaccggccagaagtatgacgcccacttcgactatttccacgacagaaacaacctgaagctcggcggccagcgagttgcgaccgtccttatgtacctcacagatgtcaacaagggtggagagactgtatttccaaacgctgagggaagccatttacagtacaaggacgaaacttggtcggagtgttcaagatctggcctggcagtgaagccaaagaaaggagacgcgctactgttcttcaacctccacgtcaacgccacagccgatacaggcagtctccacgggagctgcccggtgatcgagggcgagaaatggtcggcgacgaaatggatccacgtcaggtcgttcgacaaccccccagacgtgaggacggacgcgccgtgctccgacgacaaggagctctgccctagatgggctgctatcggggagtgccacaggaacccgacgtacatggttgggaccaaagacactctcgggttttgccgcaagagctgcgggatctgtgatgcttgaacgtgcatgttttgggggtagattttgatcccatcatgttttcactctctctgctcataacagatgaatcagtaacctagtgtaatgcgaatttcggtacagtcgcctccattggactgtttcgtccaccagatgttctaatactaatgatctaatcatcctttaccaacatgttagtccactaattgtcgcaattacaaaaaaaaaaacaaatatagagcttccacatgtggcgacgtgttcctcccatacatcttggcccacaccattgggcccctatccgtcggcctgctagcccgcagatgttcagctgctagccaggcaggggacggtccttctccccctgggcctgggcccttacgagacgccgggtcggcgttttcatcgctcgatgctgactgtggggggatggttgtggaatcaaaatcgtagacttattattatcttggtggcgccaaatcaaaatccttcgcgacgacttcgcagcaatagagagcgacagagcggggcctgcttgccttcttttccgccgccaccgtcgcgcctttggtccccgtgctcttcttctccggtggcaaccggcaagatatcaattctcgagacctgct

SEQ ID NO: 20289 - DNA, 3727 bp, Zea Mays
cacattctggcttgacaatagtcatggaagatagaacaaaacttcctatttcatctttcaaggatgtcatcacttcaactttggaaaatcaccaggtggttcttatttctggacaaacaggctgcggtaaaaccacccaggtgcctcaatacatcttggatcatatgtggggcaagggtgaatcatgtaagatcatatgcactcaaccacgtcggatatcagctatttcagttgctgagcgaatctctgctgaaagaggtgaggctgttggtgacacagttggatataagatacgtttggagtcaaaaggcgggaagaattcatcagtcttgttctgcacaaatggtgttcttttgagattattgataggaagaggaactaacgcttcaaaagcacgaaaccagaagcgctcattagatgatgcagttttgggaataacgcacatcattgtggatgaaatccatgaaagggataggttttctgatttcatgctgactattctaagagacttgttgcctttgtatcctcatcttcgtatggtactcatgagtgcaacaattgatgctgagcgtttttcgcaatatttcaatggatgttcggtcatacaagtccctggttttacctatcctgtcaaaactttctatttggaggatgtgctttctattctgcagtctgcaggtgataaccatcttaccagtcataaaacagagggcagcgttttaactcacgatttcaaaagctcaatggatgattcaattaatctggctttggtcaatgatgaatttgatcctcttcttgagcttatttctgcagagcagaacacagaagtctacaattaccagcattcagagactggtataactcctttaatggtttttgctatgaagggtcagcttggggacgtctgtatgcttttatcttttggtgtggattgttcagcacaggatcatgatggaaaatccgcattagattgggcacaacaagagaatcaacaagaggtctgtgaagtaataaagaaacatatggagtgtagttcagaaaaatcaactgaagataacgagctgcttaacaagtacttggcatctattaatccagagcacattgatactctgctaattgaacggctgcttcgaaaaatttgtgtggattccaatgaaggagccatcttggtattccttcctggctgggaagatatcagtcaaacacgtgaaagattatttgcttctccattctttcaggattcatcaagatttcttgtgttgtctcttcattctatgatcccgtcctcagagcagaaaaaggttttcaaacgtccaccagtgggggttcgtaaaattattctctcaactaatattgcagagactgctgtgacaattgatgatgttgtgtttgtcatagatagtgggagaatgaaagagaaaagttatgatccatacaataatgtgtccacacttcatgcttcttgggtttcaaaagccagtgcaagacaacgcgaagggcgtgctggccgatgtcagccaggaacttgctatcatctttactcaaggtttagagcttcatccttgccagactaccaaattcctgaaataaaaagaatgcccattgaggaactttgtttgcaggtcaaactgcttgattcaaactgcagaatagcagactttctgaagaaaaccttggaccctccaattccagaaactgtaagaaatgctattgctgtgcttcaggatcttggtgctttaacacaagacgaacaactaacagaattaggagaaaagctgggttccctgccagtccatccatccaccaccaagatgctcctgtttgctatattaatgaactgcctggatccagcattgacattggcatgtgcagctgattatagagatccatttgtccttccagtagcgcctgatgagaggaaaagggcagctgcagcgaaagttgagcttgcttcgttgtatggtgggttcagcgaccaacttgctgttgtcgcggcatttgacttctggaggcatgccaaagatagaggccaagattctcaattttgtgcgaagtactttgtctcttcaaacatcatgaatatgctatcaagcatgaggaaacaacttcagaatgaactgtctcaaagagggtttgtccctgcagatgcatctgcctgcagcttaaactctaaagatccaggtatcatgcgtgctgttcttatggctggtgcttacccaatggtagggaaaatgctccctcctcgcaaaaatgctagaaaatcagttctggaaacagcgagtggtgccaaagttcgtctgcacccacactcctgcaactttaacctatctttcagtaaatcttctgggaatccactgctgatatacgatgagatcactcgaggtgatggtggaatgtatataaaaaattcttcagttgttgggtcatatcctttgcttctaatagctgcagaaatggttgttgctccacctgatgatgatagtgatgaagatgaggaagattctagtgaggatgaagctgaggaaagcacattggtacagcacaaagaagagattatgtcttcacctgacagcattgtttcagttgttgttgatcggtggctccggtttgacgctacggctctggatgttgctcaaatatactgcttaagagaacgtctagcatctgctattcttttcaaagtgaaacatccacaagatgttctacctcctgcgcttggagcgtcaatgtatgccatcacatgcatcctttcattcgatggtttgccttctatggttccacctaatgacctttcagcaaaccgaggttcaggccaggatttagcagaagctagcaagttctctcagggaagaagagcgggttatattccaccaagtggttttctgatgtccttgttagctgataggacccataatgcaccttctttccagaactcatctaaccatccaggaggtggttcagcgcatactcggccatccagggctcctgttggtaggtttgatcgatctcggcgacctttccgcaattctggacctgggacttcagcaccacgttctttcaaaaggcagcgcgacgctccacggtgagcagggcataaaggcagccttttgcatgccagccatttcggatgtgctttgtcaacggtgcctagtctaagaaaaggacgtgctacagaatcacaagctttgctgtgttccgttgtagaaatgaaaggaaaagaattatagcactgcatcagattcctttgtcgaagagtttttgtaggtatgcccctgagtgttttgtgtactttgctcagccgagctcatttgcaccgtagatctcagaggtgcctgtaatcttttggatggagttcggatgttaaaaagaagtgggaaagaaaagggaagacctgttatctgctcaaatgatgagccccataattgacggtatcactggaccatagatgaactttgtgctgtagtgccataggcaatatggtgtgacgggcgagtggaatttgccctgcatcgcaagcgttaaattttgtccttgtatgtacgtacttagtaaacttagtaataaccctttctttgaattcagttttatagtgagtccaacatgatatggcgcattttgttcttgtttgggaaaaaatgcaagcgaagtacgatgcaccaacggatttttcgggggatgaaggttaaagtctgacaacttggaatccaggcaagtcggaatgttggat

SEQ ID NO: 20290 - DNA, 1418 bp, Zea Mays
tcccttgagccatccaaactaaaggaaaaacagtttcaacatggacctggttcatcaagtctattgtcattatcaaaatcatggaaaggatcaagctctacaacactagtgttcagcatgttcgagaaataaagttagttgggttccataaatagatactgggccaagattccataggaactccagtgtagtgattggtcatgccgccccttaagtgaagggcaaatacaatatgctgcgtcggatgcctactacttgctagacatatttgatttgttccaaaaaaggatcacaatggaaggaaaatgttcatctacaacagaacttacttcagacaggcattgctcatcagtggtgatagaatgctcttcttctggatatggcatttgctcgggtagttgtttgatgtccatagtaaccaagtacagtgagaagataatattgacagaatctgatgcaaaaccgcgtacctccagacgaaaagaaaaactgaagattcctgccaatgccaaacgcaaagataatgtggattgcagtagtgaatggcagggtccccctccatgggatccttccattggtggggatgggtacccaaagttcttgtgtgatgtgatgattgagggcctagctaagcacttgcgatgtgttggaatagatgctgcaattccatcttcaaagaaacctgaaccaagggatctattaaatcaaacatacaaggaaggaagaatattattaacacgggatgccaagctcttgaaatatcaatatttagctggtaaccaggtatacagagtgaaaagcctgctcaaacatgatcaactagctgaggtcattaatatcttccaattaaagatttctgaggaccaacttatgtcgaggtgcacaaaatgcaatggtagctttattcagaaaccacttaccctagaggaagctgttgaagcctcaaaaggtttccagattattcccacgtgcttgttcaaccgaaatctggagttctggaagtgcaccgattgcaaccaactctactgggaggggactcagtaccacaatgcagtccaaaggttcttgtcagtgtgcaacattagtgactaagcagcacgtacggccttggtactcatttgtaaaattgtaaggtactgagataccatcacctccgaaagatcgaaaataatctgatctttggcatccactcgtgcacgatgaggcatgccatccatttttagtggtttgctgttcgtcactgagatgctgttgtaaggaaaatagaccttgacttatttgattaatggactttgctccatgcacatccaagaggaaaggttctagatacgtagagttataggccaagtgctatgactgttgccctgcccccgaaaaggattcatgctatctattattaaactaaaccttacgttcct

SEQ ID NO: 20291 - DNA, 3285 bp, Zea Mays
agaaaacacacacaggctcactcactcacggtcacgggacccttgccgtcggcggcgggcgacctcgcgatgctgcagatgctgggcttccgcgggggaagccccagcaccggcgacgcgtcccccgccatcagcggggacggcggcgcggccgcgcggccgctccgcctggtgtactgcgacgacaagggcaagttcgtgatggaccccgaggcggtggccgcgctgcagctcgtcaagggccccgtcggggtcgtctccgtctgcggccgcgcgcgccagggcaagagcttcatcctcaaccagcttcttgggcgaagcggcgggtttcaagtggcttcaacacatcggccttgcaccaaaggactttggatgtggagtgcgcctttgaagagaactggtctggatggaactgaatacagtcttgtgttgttggatactgaaggaattgatgcttatgatcaaaccgggacctatagcatccaaatattttccttggctgttttgctgtcgagcatgttcatctacaaccagatgggaggtatagatgaatctgcgttggatcgtctctcgctggtcacagagatgacaaagcacatacgtgtccgggcctcaggtggaaggacttttatctggatttggcagaagacaacagaaaaattactccacgggattacctagagctagcattgaggcctgttcaaggtggaggaagggacatatctgcaaagaatgcgatacgggactccatccgtgcactttttccggacagggaatgttttacacttgtgcgacctgtgaacaatgagaaagatctccaacgtcttgatcaacttcctattgctcttgaaacatatttacactttaaacagtttgatggcatttacaaattatgtctgtcccttcatgacctgagtaatttccgtccagagttcagatccggtctggatgctttcacgaaatttgttcttgaccgaacaagaccaaaacaacttggagctactacaatgacaggtcccatccttgctggattgacacaatcgtttcttgatgctattaataatggtgctgtccctacaatctcttcatcatggcagagtgtggaggaggcagaatgccagagggcatttgattctgctgtgggcacttacaattcttcttttgaccataaaaaacatatagaagaggattctttgagagaagcacatgaagatgccatgaggaaggctatcagtgcttttaatgtttctgctgttggtgctggaagacagttagagcatatagatgctgaaaggaacgccctgagattgaaatgcaattcaagcgatgataagttggcattgctgaggaagcagcttgaagcaagcgagagtcacagagctgagtatgtgaggcgctatgaggaagttctgaatgataaacagaaaatttccaaggattactctattcgtataactgaacttcaggccaagagtagcaagttggaacaacggtgcttgagcttgtcttcttctcttgaaactgcaaaacgagaatccaatgattggaagagcaaatatgatcatggtattttgcagcaaaaggcagatgagagtaagttaaaatctcaaattgcttccctagagtctagggtgagtatcagtgagggtagattatcggcaacacgtgaacaggctgattctgctcaagaggaagcatccgaatggaaacgcaaatatgaagttgctgttagtgaggccaaaacagctctgcagagagcggcggtagcacaggaacgcacaaataagaaagtgcaagagagggaagatgctttgagggtagagcttgctaaccaactatctgagaaggaagaggaaattgcaagattacatgcaaaacgtagtcaaatggaaattcatgctacaagtttgatctcgaggcttgaggccactgaagcgaagtcgaagagccatgagtctgattcgttggctttgagggaggagatcagattactgactgataacctggagtctattagaagtgaagctctgtcacgtgagaaggaagttgggatcctggaacaggaaaagaaccatcttgaggagaagtatttgtcacagtgcaaaaagtttgatgagacagatattagatgcaaggaagctgaaagggaagcaaaacgagcaacagaattagctgatgtagctcgtgtagaagcttctgctgctcaaaaggataagggggaagctcaacggctcgcaatggagaggtttgcactgatagaaagaatggagcgacaggttgaagctctagaaagggacaaggctaagttggtagaagagattgagagacttcatcagtcagagaaggatgctgtgtccaaggtcgcattgcttgaaagaaatgtaggtgagcgggaaaaagaaattgatgagatgttgaagcagaacaaccagcaaaggtccagcacagttcaagtgcttgagagtctgctggcaacagaacgtgaagcacgtgctgaagccaataagagggcagaggaactgtcgttgatgttgcaagcaactcaaggcaaactggacatgctccaacaagaaaccacacttgatagcaagctcaagacctctgcaaggcgcttaaggggtgatgctacagagtctgtacatgatatggatatcgatggggacaatgggaggcgtcggaaacggtcaaaaagcacaacaagcccgttcaagaacaatcacacagaggatggcggttccgtatttattggcgaagatacttacaacgggagtcagcaagggacagaaagcgaagactatactaaattcactgtgctgaagctgaagcaggagctcaccaagcacgggtttggtgctcaactactccagttgaaaaatcccaacaagaaggatatcgttgccttatatgaaaagcatgtcatcggcaagtagttcctcggcaatacttgtatttatgctttatagacttccctctgtagcgttgaaactttaattgacacgatcggattgaagcaaacaatgcatgtaacttagtttaaatctctggtctgtgtattgcaacaatggtgcagttcattttagcatgcatcgtcggcaagtttgtagttaggagtcgtgattgaaatgtttgtctttccaatcccggcacaggttttcttgtaatgctatgacgacaatctattcggattccatggttttgtggtgtaattttatgccatcgatcttttcagattctaggcagtgttgtactgttatggctgacagtccctatccaatttgttaataa

SEQ ID NO: 20292 - DNA, 3186 bp, Zea Mays
gtgaccaccacggcaccactcatcctagattcctagccgcacgcgctgggcacacggtcgttgtgaacggatgagtgaggcggagtgagcaacgggacccccacatggcgccaccgccgctgcccctcttctccccgtccctaaaggccccgccgccgccgccatggctccacgggtcctctacccaaagccgcgactccgcacccccggtgcctccactccccgccgaggcaactccttccaagttccgcatcgacagccccaaaccggcaccggcaaggaaaaacaccaaaacagcagccaagcccctcactgccggagtccccgggggccgcacccaccgagcggtcctcggcatcatccggcgcgtccgctccctcgagctctccgatgctccgagtccgaattccgtccacaccagcaacagcggtgccgccgccgccgcattccaccttacgatcgagctgtccccgccgcgggaaccaggccaatatgtggttgagaaggagaagtcacgggctgttccgtgggcggctgctagggacgagggcctcaaggttgcgctgcggcgggagaagaagccgcgggagccgacgcgcgcggagaccgagctggagacccacgagctgcatcgcctgcggcggttggcgcgtgggataggcaggtgggcgcgggccaagaaggccggagtcaccgacgaggtagtcaaggaggtgcgaagggaatgggccagtggtgaggagctcgccgccgtgcgcatagtcgagccactccgccggtccatggatcgcgccagggaaattcttgagattaaaacaggaggcttagttgtgtggacaaaaggagacatgcattttgtctacagaggaagcaaatatcagcaaaacgcaaagcatagtcacacttttctaactaatgttcataaagatgatgcttttcaagaaaatgatcaaagcatttgtggccagaaggatgaagaacctgtcaagggtacactatatgagagagaagtcaatagactattggacactttgggccctcgatttgttgattggtggtgggacacaccattacctgttgatgctgatctcctcccagagtttgttccaggctttaagactccatataggctgtgccctcctggggtgagaccaacactagctgatgaggagctgacatacttgcgcaagcttgcacgccttttgccaacacattttgcccttggtagaaacacaagattgcagggtttggctgctgctatactgaagctttgggagaaaagccttatagcaaaaattgcagtgaaaataggtatccagaatacaaacaatgaacaaatggcatggaacctcaaggcaagtactattcctgatgaagtaccttctgacatttatgtatttaagtgcattgtagtcaattcctttgactagcaaaacctaaaatgttgtctatcatgtccttggtttatcttgtgttactaaaattttaaattgtttggaatatttctttgactacaaaacctaaaaggagacttgaaaggtggaatatatccaaagatctagcttggagtatgaacgcatggaaggcctgaaccttgatttggggcttctgttgggtttcaactttagtctaccccatcttgtttgggactaaaagactttgttgttattactgttgttgtactacatttttaaagtgatttgctaattcctgtttttattctagcataggctaaactagtgacatagagtatggtaatgaattgggctaaacatgaatccttagtttctttctgcaagtttacatggttattaatcagatatccaggtcatggttttgaagcagcctctccacattttacagggaaaggcttacatcggtttatcccttactcagagcactgagtctgtccttttgttatttgtattttcttgtgtaacactgaagctcctcagtgcagcatcttacgggaggcactgttatattgagaaacaaggattttattattctatatagaggcaaggattttcttcctggtggagttgctcaaactgtcattcaacgagaagctcaggtacatgatgaacaggtgaaggaagaggaagcccgactgaaagcagttgactcacttcagatggttggtgaattatctgaagaaagttctttaggaactttcagggagtaccagggtttccatgctaagtttgtgcatgaaaatactgaaaactctaacaccatgattgaactagaggctgagaagtatagattggaaaaggaactgaaagaccatgagtggaagctttccgttctcaacaagaagattgaaagatctaaccaggcactggcaaagcttcacagttcttggagcccttcagagcagtctgctgatagagaacacttgacagaagaggaaaaaataatgttccgccggattggccgcaaaatggatgggcttgttctcctaggaaggcgtggtatctttgatggtgtaattgaagagattcatcagcactggaaacataaagaggttgtgaaagtaattacaaaacagaatcaaactcgacagatcatgtacgccgcgagtctgctcgaggttgagacaggtgggatattaatagcagtagaaaagctcacaaccagccatgccataatactttaccgtggaaaaaactatcgccgcccagcaaaatcatcatttagtaatctcctaacaaaaagagaagcgctccgaagatcaatcgaggtccaacgacgagggtcaatgaaatactttgttcgggagagacagaagtccattttggaattgaaaaggaaactgaggtatgtgacaaggcaaatcaggtatcgaaccccatgatcatgaagagtttggatagcatggttagtaaatgatagttagaatttgcaataatgactgcatccaatttttttccttaatatgggatagccgtgtaaactgtgaagcccaacatgaacaattctgaagtgtacagattatataatagtgtctgttgtacatatgtgacacttttgactttacccatatttcatgaaacaagagatttttttttctgctttggtataattagcctatccgattagtgtttgacatgtataacaacattgtggctagtgttcgaataagtgatgcaaacacatatgacttttcaattagaatatgattac

SEQ ID NO: 20293 - DNA, 2583 bp, Zea Mays
cgaccttgggaccggaagcgaccaactgacggatcgacaggcccgtgatgccgtcgcggcggcgccgacgcggcgacctcgccgtcgcggtggcggtgctggcgacggtggccctagcggccggggccgacggcggcgcggagttcgactacaggaagctctcggggataatcatcccggggttcgcgtccacgcagctgcgcgcgtggtcggttctcgattgcccctactcgcccttcgacttcaaccccctcgactccgtctggctcgacaccgccaagcttttctctgcggtaaattgctggcttaaatgcatgctgcttgaaccctataatcagacagaccatcccgaatgcaagtcaaggcctgatagtggtctttctgcaattacagagctggaccctggttatataacaggtttcaggtcctctctcttcagtatggaaagaatgggtcaaatggtgtgtagagtttggcattgaagctaatgcaattatcgctgttccgtatgattggagactgcccccatcaatgcttgaggagagagatctgtactttcacaaattaaagctaacatttgaaattgctttgaaactccgaggagggccatctttggtatttgcgcattcgatgggaaataacgtgtttcgctattttttggaatggttgaaactggaaattgctcccaagcactatatccagtggcttgatgagcatatacatgcatattttgcagttggcgctcctcttcttggatctactgaagcagttagaggcgctctttctggaacaacttttggtcttccagtcagtgagggcacagcacggttgatgtttaatgcatttggttcttctctatggcttatgccattctcaaaacactgcaaagctgataatatctactggaagcatttttttgagggaaaaggaggttgtcctcacaaacaacaatgtgatgaagatgaatatatttcagactacggcggatggcccacagaccttgttaatatcgaggttccttcagctcgagatatgggggcatacccatccatcacagatataaccgagaacataacatccattatggagtgtggaaagccaactctcctgtcattttctgccagagaggtttcagatggtactttgttcaaaacgatagaggattatgaccctcagagcaaggcacttgtttatcagcttgagaagtattatcagggtgatccagttctgaaccctctcacaccatgggagagacccccaataaagaacgtattttgcatttacgggattgattcaaagactgaggtaggatattactttgcaccaagtggcaaaccatatccagacaactggataataactgatattatttatgagcttgaaggttccctactttcaagatcaggtaattctgtttctgggaagcctaacaattccagtggtgatggaacagtatcatacaactccctctcatggtgcaagaattggcttggaccaaaagtgaacataacgagggctccacaggcagaacatgatggatctgatctgcaaacagccatgaatattgatcatcatcatggtgacgacatactaccaaacatgacgagggttccgcatgtgaagtacataacctactatgaggatgctgaaagtcttccaggatggagaacagcagtctgggagctcgataaagcaaaccacaggaatattgttaggacgccagtattaatgcgtgagttatggcttgaaatgtggcacgatttgcatcctgattcaaaatcgaaatttgtgacgaaagctttccgaggtccactaagaaacgaagactgtcgctgggactatggaaaggctcgatgtggctttccagaacactgtgaatacaggtatacatttggcgatgtccatctgggaatgagctgcagactgagaaatacgtccgctaaccttcttcaacagtatctctgaaatgtcgtgggccgagtaattttgtgttttgttgctcgcatggaaatggtatctgattccccattttgacctgccaatgaaattagccatcaacaaggtagatacagtatcaaccggaggccctcgaatgacaggtcaactcttattcttgtcaccattttggcacacttaaatctttgaagtcgacatatgcaaagctgaaacaacacgttcgcatgacaaattttggttgaagatggaggccaacgtccccaggagtgtcggcagagttttcctcttgtctgtagcactggcaccttcggcgtcctgaaggtgccatgagatcatacactgatgtacactgtagcatggttttgtaaatcaagccgtcacaaattgacttagtcttacaaaaacgataccctatagattggcagtgttaaaattctttacgactcccaattaaccaccttgattgtaatgtgcccttaaagagatgaaaggatgaactctgctcaatattagaccttgtttggttagggtgactagattttactaaaatacaaaagagggtgactaaggtttcctcctaaagtttagggtctgtttgattgtgtttgttgtggctgtgaaaaaaaa

SEQ ID NO: 20294 - DNA, 2521 bp, Zea Mays
aagagaagagaagagaagaggggagtcgaggtcgagagcagcagggagagggaaaatccactaatccccccaccccggctctctcgaaacccgccattcccctccgccgcaaacacgcgtcggagctcgtggcgagcgccgccaccccgcactcgggctggggggcgtccctccgcccccttcgatctagagccggcggccgcgatcccgccgcgggtcctcgcggccgccgcgaattgggtttgtactgacgttaccggtgggcggaggcgctttgatcctgtagctgccgggttgggttcagtagatggcgggcaaggagcagggcggtggaggcccgccgcagaggcctcccatgcccgcagcgtccatgcagccgccaatcaagaagctggtaaggcagctggacttcaactcggcggcgttggcggggaaccccgcgatggcggcagcggcggccgccgtgtctagggctcttcagccgagggcgttgcccgcggggttccagcatccgcagcacgtgagggctgccgtgccgatggtggtgccgcagcagctgcaccagcgggcgctgccggtgatgcgcccgcatccggtggtgggtcatgtgccgcggcacgcggtgccgctggcggtccctgtaccgcagctccgtccgatgccgccacagccagtccagcgtcccccggtcgccgttcccttgaaaccagactcaccaaaaccgtgggcaagactttacgaagggaaagatagcactcccacgaagaaaaagtgctgcaactgcaggaactccagatgtttgaagttatactgtgaatgcttcgcttctggtactcactgtgatggttgcaactgcaccaactgttttaataatcctgagaatgaggttgccagacgtgaagctattgaagctacattggagcgtaatccagatgcttttaggcctaagatcgggagcagtccacatacgaataggaataatgaggtgtctagtgatctccctttagtagggaagcataataaagggtgccattgcaagaagtcaggatgcctcaagaagtactgtgagtgcttccaagctaatatactatgctctgaaaactgcaagtgtatggattgcaagaattttgaaggaagtgaagagagaagaaatcttttccaaggggatcataaaaatgcaattaacattcagcaggcgacaaatgcagctgtaaatggtgctattggaaccacaggattcccttctccctccacgtcaaggaagaggaaacatattgatccttcacttgaccattcaaacaaggaacatgcagcgcacaggaattgtcacatacctcagaaaaatgcagtgcctgatggttcaattccaataagccagtctgcacatcctccaactctgggcccctttaaagttacctacaggccccttttagcagacattgtccaagcagaggacgtaaaggagctatgcaagcttttagtggtggtatcaggagaagccgccaaaacatatgctgaccggaaagcgaaggaagagagggttggcaagaaggaagatgaaagggcagaacaaaaggaagatgacagggcaggttccctagcattgacaaaccatgacagagaaggaaataatcaagatccagataaaaaagcatcaatcgatgaccattcaagcagaggaactcatacgggcaaagctaatcaagaagaatccagacctaactgcgctgatgatcagaagtccaatagacctatgtctcctggaacactagcactgatgtgtgacgaacaagcgttcgagaaaatgtgtgacgaacaagatacagtgtttacggcttctcaaaatgctgttcctcagcagacagttactgtcaaccaaaaccaatctgcactgtacgcagaacaagaaagaattgtgctgacagaattccgtgattgcctccgcaaacttgtgacatacggaagaatgaaagaggaaaggtacgccatggaaatcaaatctgaaacatctggccatcctggacaggtaaatggtgtttctcaagtaccatattcaaaagtagaggtgcctgttgtaaaaacagacccacagagttccagcagccatcctgttgctggaaaacctgttactggccttttggacaaaaactgaagcctgggtgttccaggtttgtattcggggtgttgcaatgatcaagggaatcatgttttcaccctcctaatttgttgatcagatacatgtatcagtcttgatagataatctagattttagggaattccaatttattctcattggtcagagtaagtgtgatgctggaatgtggatagttagtttagtcataaatgccaaccttgtcgtattttctacattgtagtttctcccttttcttttccttgtctacatttcatcattttgccatccacctaattcgagccaagatatggctgggtggatgtttatttcaaaataaaataaaaagtcaaaaggaagaaaaggtaacactggagagatgagcctaga

SEQ ID NO: 20295 - DNA, 923 bp, Zea Mays
gtgcggccgaagctgggcccttccaccacggcttccgtgccgccaggtgggagccaccgaccggccgcagctcatcttcccgaccccgccgcttccacgcctcgccggccagcgaccgcggaagaaactgaggctgccggagatgcagcagctggtgcggtcactcgccgtggacaacgagaggctccgcgaggtcacagtcacacaccgctcctcatctcaggagatgcgggatctacagggagcttgcgaggcgctgtccaaggaaaacgacgagcttgagacaaggttaggccaatcgagccgtcagagcgaggtcgcttcgaaggagcagagaggaaagggtctgcttgatccgcggcagcccgcacgggacagcttcgcgctacctgatctcaacctcccaccacaggactctgccgatgtctcaacagtttcattgatcgctccagatcgtttgcagctttgttaatcgaacaacaagtgtacagagaggaagcagggtagcagtctatgcatccgttcttttttatttgtcgcagtttagtttaaaaataaactagcggacggcaaattttcgagaactgtagtatttgataagttgttactagatcacagagttttatttcgactatagtcgtaagtgataagccacatctgtagctaaagggagctctaattttaactcacccgacattaattgttttcagatccagctgatcgccacactgtagtgtagtgggtttagatggattttattcatgttatttcgctcgattaggcgaagaaatgttacatgtgaagatctgaaattatgagaaataaaaccgttatttctgaatggttttattttatggggtcttttgttacttcaactgcaactacatcgagccttatctttgtaaaagttactagtaaaatgg

SEQ ID NO: 20296 - DNA, 2791 bp, Zea Mays
aataaacggcaggaaatatgaaagcgtaataaaaggaaaacgaaaggaggccgaaaaaaaggttaccatctttgcactgcatgagctccctccaatccaatctcccgttcaccttcctcttcccctctctctcacctccctcctattattattgggttcttcaccgtaccccacacacacccttctcccccaaccccatctctctctctctgcctgcgttctcctggtgctgctctcgctctcctcccctgctttgacctccccgcctttccccgccgtttcttggatttctaggatccagacaaccgcccttgtgagcctgccttcctgcctactacctgcgtacgtacaggagggtccttgcttgggtgatccgggtgcctggtttctcggttccgcggcttccgctgctgttggattcgccgagccggagccgccggagatgaccgtcgacgagctgaagctgcaggcgagggccagcggcggccacggcgccaaggaccagttccccgtcggcatgcgcgtgctcgccgtcgacgacgacccgacctgcctcaagatcctcgagaacctcttgctccgctgccagtaccatggtatgccacgctcctctcgctcccctctctctctctcttccccgtatgcttggttccctactcttctcatcggattgtacatacatcctgccgttctttttcacctttattgtccccgattcggctcttcggtttggttttatttagtttccgttgttcgcgtgtatcaactatcaagaagtctacggagatatttgggttgctgtttttgcattttttttcatcacataaatagcaaccccgactttatgcccccacccccacttcctcctcctgttgttttcgccgtgaaatatttttttgccatgtaatgtcatgtcaggctcagtttcatcttctttcttctgcaaataataataattgtgacgccaagaacagtggcaatgacaacgatgattcgggtaaaaagttgcaggtggtgagcgctgaaggtgacaatggcggtgttaatcgcaacaagagaatttcacgcaagggtagggatgataatggtgatgacggtgatgattctgatgacaacagtaatgagaatggagactcgtcgagccagaagaagccaagggttgtgtggtctgttgaattgcaccgaaagtttgtggctgctgtcaaccagcttggcattgacaaggctgttccaaagaaaatattggatcttatgaatgttgagaacatcacaagggagaacgttgcaagtcatctgcagaagtatcggctgtatctgaaaagactcagcgcagatgcaagcaggcaggctaacctaactgctgcatttggaggaagaaaccctgcttatgtgaacatgggactagacgccttcaggcagtacaatgcatatgggagataccggccagttccaaccactaaccattcacagccaaacaacctccttgcaaggatgaactctcctgcatttggtatgcatggtctgctgccttcgcagccacttcagattggacacaaccagaacaatctgagcacttccctagggaatgtcggggggatgaacaacggcaacctgatcaggggtgcgcatatgccactgcaggatactagcaaatgctttcctactggcccttctggtaattcgttcgcgaacatatcaaacagcacacaactggttacgacaaacaacttgccattacagtctcttgagccaagcaaccaacaacaccttggtcggctgcattcctctgcagaccctttcaactcatttgttggtgagcccccccagtttgcagatcttggaaggtgcaacaccacctggccaaccgcggtctcatcatccaatgttcaggagattggccagaaggacaggatcgtgaataggcccaagcttgagcctctctcaagctttacagaagcatccagtcagatccctttgctgggaagtgaaatgcagagccaccaagtagcatcactagccagcaacggtcttccgatgccgttcactcaggaagcggtgcccttcgcttatggaagcagcacgaactcgagagagatgctgaataacaaccttgcgcttagtaattcaggcgtcaactctacattgccgaaccttcgcatagacggttctgttgttccagggcagacactgggtggtagcaattcaggtggttgtgttgtcccccctctgcaagatggcaggattgatcaccaagctgtcagcagtcatctaaactacaacaacgaactcatggggacaggtaggctgcaaaggggacttagtggtggtctggatgacattgtcgtggacatgtttaggccggaccgcgcagacgatggcgtctccttcattgatggggactgggaactggtctagcaagtttcagttctctacatcaagtctgccttcgtgtgagattttccgcatttgtggttgtggaggggttcggcgcttgattggtccaaagttgtttatagtagcaagattgcatcacaaatgccctttgcatttggtttttcagtttagcgaccaggttccagtgtcacgtccgaatatcaactatgtggtatttgctaccttaactcgtatggctatgttttcaagtcaggtgttaactgtggctatcgtgatatatacagcatggttatgagccaaggaatgctgtcctgtttcctcttggaaatcgttttgctgttccctttgttgattgtcactggcaatctgttccagaaagatcccagcattcgtcatt

SEQ ID NO: 20297 - DNA, 1820 bp, Zea Mays
actataataggttctctcgagccttcgccgccaagagcccgatacccgccgtcctccctgctcctgctgccgcgtgcccctctccggccacccgccgccggcgcagtgtccatgaactagcacctctttcttcgcccggtacccattcagttcgtccgcctccttctcttcgagtttgggtgcccatggagaccagcagtgcgcccgccgccgccaccgaggccggctggtacgtgcttggaccgaaccaggagggcgtcggaccctacgcgcttgctgagcttcgagaacatttcgcaaacggttatttcaatgagagcacaatgctctgggcagaagggaggaaggaatggatgccactctcgtccatctctgagctacactccgcagtcgcagcgaaggatcaatctgaacaagatgctccagatgttgatgatgattttgagaaatttcagaaggaggttatcgaagccgagacagaggtgaaggccttgaaaggcaatgatgtggaccagcaagatgatgagcggccagcaaccccccctgatggagaggaagaatttactgatgatgatggcaccatttacaaatgggaccgtactttgagggcatgggttcctcaaaatgatgcatctggtagcaaggaagattacgctgttgaagagatgacttttgcagttgaggaggaaatatttcaggcacccgatatcctgggtcctgcattagaagaaatcaacaatctacctgaaagcaaaaataaaggatcagataaagcagaaatgagaggagacaaaaagcggaaatcttatgagaatccagctgagaaaaaggaagctaacaaacctccggacagttggtttgatctcaaagtaaacacacatgtctatgtaactggtttgcctgatgatgtcacagtggaggagattgtggaggtattttccaagtgcggaataataaaggaggacccagagactaaaaagccacgagtgaagatttatactgatagagaaaccggcaggaagaagggtgatgccttggtgacatatttcaaggtgatgttttcgtttcaaagaaaactgacaagcaaaagaagaggaagataaagaaggttgaggacaaaatgcttggatggggtgggcatgacgataagaagctgatgattcctgctacagtaattttaaggcacatgttcactcctgctgagctgagagctgatgaagagcttcttcctgagcttgaggctgatgttagagaggaatgcatcaagtttggtccggtggataatgtcaaggtttgtgaaaatcatccacaaggtgtcatattggtgagattcaaagacaggaaagatggtgccaaatgcatagagaagatgaacggcagatggtttgctggacggcaaatccatgcgagcgaagacgatggctctgttaaccatgctcttatccgtgattacgacgcggaggtgtcaaggctggatcgatttggacaagagctagaagagtccacatagagtgtatatatacacacacacaccagggattagagtaggtgtgttacctcattcataggtaggttcgcctgattgaacatgagaaagaagttattggatacacctgctaataagagtagtgaccggcttgcagagctggtgatatcatcactagcgaagtagcagcacactgctttctcaaatgtgttgtttaatgaatgagaagctcatatcgatactattaacctcggctccctatgaaagtacagtgggcatttctatctgaaatgtgggaatttttatatgcattactggcttgttcgtactggtt

SEQ ID NO: 20298 - DNA, 3000 bp, Zea Mays
aaaccccgaagagaattgtggataaactactaaggaaagtttgggagccaaaaaaactagaaaagaattctaggggctaaaagtttctcttattatttaaatttaataaaaaaaagattttagcatcttcaatgttctcaggttttatagctcctaagcggtgcggaaggcgagcaagggaaaccggagacggaggcccaagacaagcccaggcgtgcgtgaggggttgagatatactccatataggagagagagagagcgcgcgcgccagcagggcacaggtgatgcgttgtagtgtagcggagcggagcagagcagagcaggtgagagagaggaggagcgtcgccgagccattcttaaatgtgagcgggcgggggtaagtgaggtgagtagagtagtagtggcttggcttcacctgctactgcaacggaacaagaacagaaccaccatcactcctccgctcttcaccatcagctgccgcttcctctcttttctccccccagtagccagcagtctccgtcactctctcacacacacaaaagcagcgacttgctcacagtagtgctccacggacagaatgaccaaagacgacgagttcaagctggtcaagatccagaaccatgtgctcaaggtgaacatacactgcgacgggtgcaagcacaaggtcaagaagctccttcagaagatcgaaggtacttcttctttctttctttctttcttgacactcacttcactgcccatatcttagactggctgcccggccaccaaaaagcacaccgccctgctgtgtcttgctaacatgcgttgcgttgacacgacaaagagatcccggcttctcatgtaaaaagaaaacagaagataaaaagaaccggtaaaacttcgtttcatgatgcgaatttttaactgtgctatggtaaagagggcggcccagactttcaccccctagggtgaggtgaaatttcctgccgttctttcggatggatgggcacagcagagccccccactcactgcacaagcccccacatctcgtgcttgtgacatgcagtcgccagtagtacatggtaattactagttaccgtggctcacgagcagcctgtgatctcctctctctctctctctgctgctggctgctgctgcatctcatggatggcaggcgtgtactcggtggccattgatgtggacaaccacaaggtgtcggtgacaggcgacgtggactcggagaccttgatcaggaagctcaccaggggcggcaagcacgcggagctgtggtcgcagcacaagggcggcagtgcccagcagaagcagcaggcccagcagcaacagcagcagaagcaaggtggcaatccgagcaaggatgggcacagcaagagcagcaacaacaacggcggccagaaaaaggaccaggggaagcaaggaggaggaggaggggttggtgggggcctcgtgcagggcctcaaggcgttcaagaaccagcacggcggcaacaagcagcaccaccagctccctgagctcctcagctcggaggacgatgacggcatgttcgacgacgatgacggcgagttcgacgacgactacgaggaggagctccggttcctcggggacaagatgagccagctcgggctccacggcaacggcaacggcaacaaccagcaccaccatcagaacaagaacgggaacaacgtcgtcgctgtcaacagtaaccacagcaatggcaagaagggtaacggcggcgctgcagccaatcgccaccagagccagaaccagaagaacgtgaatgtggtcaacgtggcagcagcgaatggcaagatgggcggcggtggaggagtccagaaccacaagaacgctaacgcgatcaacatggcggcggcggcgaacgccaagatgggtaatggcgcccagaggaacgctggcgccatgggtggcattggcatgctgggcctaagccatggcctgggagcgggcggcgctgctgctgctgctcctcctcctggcttccagcaaggctacgcaggcttcaaccacccgccctatgccgctgctgccggctatggaggaggtctacagcagcagcagcagcatctccagcaccaccagcagcagcagagtaacagcctcatggcgagcatgcaggggtaccatcatcaccagtaccctgccgcgacggccgccgtggtgaacaacttgaggggcctgaacggcaacatggtgatgatgcatcagcaccagccgcagccgcagccgcaggcccagatgatgtaccactcgtctccccagatcagcagcccttacaccggctactacaacccttacaattactactaccaccaccacccccatcccggcagcgctgggtaccctgccaccgccagcaacggggatgtggagagcatgttcagcgacgagaacaccaagggctgtgttgtcatgtagggcgggacgagaacaccattcctgctacctttctttctctctttcgtttctttttcattattttactgctcttatggttttcgcctgtatcaagagtgaatcatggtgttgacttagatgtgttgttgaaagtaggggcaacttgagaggggtgaccaaacagtggaatgtacaataggagtgccttttaggcttttttactgcctagcgatttgccctggctggcttgttatgatctgtgtactatatcgtaagatctgggtgttttgggttttggacttgtgtgctgtgccaatgcccaccatctgagtggtgatcgactgttagcagtcaacattggaggaagcttgcaaacctgtaaacctggagatgaagagaacccctaagcattttcctcgaaagagagttacgagcctgctgaaaaaccaaagatccaagccatgatcaagtcccatgcatgatgaaaagtgtgtggctggtaaaggtggttgaaaatgaatgcctatcattatggctgtggctcccttcatgaagggacgcattggtccctaaaccaaaaaaaaaaaaaaa

SEQ ID NO: 20299 - DNA, 1277 bp, Zea Mays
ttttttttggcaaggaagcagcaggcgctggacgaggactggaggagcgccgagaaagacgttgacctgccgttgttcgatctggcggcggtcctggcagctacgggcagcttctccgcgagcaacaagatcggcgaaggcgggtttggtcctgtctacatgggaaagctggaggatgggcaggaagtagccgtcaagaggctgtcccggaggtcgatgcagggggcggtggagttcaagaacgaggtgaagctgatcgccaagctccagcaccggaacctcgtcaggctgctcggctgctgcatagacgaggacgagaggatgctcctgtacgagtacatgcacaaccagagcctcgacacgttcatattcgatgaaggcaagcggaggctgctagggtggcagaaacgcttcgatatcattctgggggtcgcgcggggtctgcagtacctgcacgaggattcgaggttcaggatcgtccacagggatctcaaggcgagcaacgtgttgctggacacgaacatggtccccaaaatttcggacttcggcatcgcaaggatgttcggaggtgaccagaccacggcatacacactgaaggtcattgggacatacggctacatgtccccggagtatgcgatggacggcgtgttttccatgaagtccgacgtctacagcttcggcgtgctggttctagagatcatcaccggcaagagaaaccgaggcttctacgaagaagagctcgacctcaacctcctccgatatgcatggatgatgtggaaagaaggcagaggcgctgatctgctggacccggtcatggacggcggcggcagcgtcaaccacagcgaggtgctgcggtgcgtccaggtcgccctgctgtgcgtcgaagtgctgcccaggaacaggcccctcatgtcgtcggcggtcatgatgctggccagcgagaacgcgacggtcgccgagccgaacgagcccggggtcaacgtcgggaagaacacgtcggacacggagtcgtctcacggcttcacggccaacagcgtcaccataaccgccattgacgctaggtagcttttggatagatttgccctcaccagagcgcgaccaccggcaggtgattattctaatgacgacgcagtctgttgtcttgtattaactgtgtattttgtacagcaaaggttccgttgccgaaggcctacatctctcactcgaagcctccagtaatatgtaaagttcagagcttgtaaagatttacattcaaaagccacccggttcaatttgtt

SEQ ID NO: 20300 - DNA, 1450 bp, Zea Mays
tttgttcgccctgtagcgtgtgaaatcgagctgtgtagatctatggtctgcgaggtgcggtggcggtggaatctcggttgatctttacctcagcggcgccagtgtagctcgtgtggctgcagttcatctgcgaatttggctctcggcggcttaggtcgcggagcttggattatggagcaccagctgcagcgtgaccctgttggttctcatgtggatctgttggctgaggttgcagacttcaagtgccactgccattgaccggagctgctgcacgattatactggaatatctagcggcaaacgcgagatcgggtgtcgctgtgaatgacgagtgcatgctcaagttcggcgagctgcagtcgaagaggctgcaccgcttcctaactttcaagatggacgacaagttcaaggagatcgttgtggaccaggtcggggatcgcgctaccagctacgaggacttcacaaacagcctccccgagaatgactgccgatacgcgatctatgatttcgactttgtcactgcagaagatgtccagaagagcaggatcttctatatcctatggtccccatcctccgccaaggtgaagagcaagatgctttatgcaagctcaaaccaaaaattcaagagtgggctcaatggcattcaggtggaactgcaggctactgatgcaagtgaaatcagccttgatgagatcaaggatcgggctcgctaggcatcatgatcatgcatcatggactcggcctactactgtggatttgtatgccattatagacttggtgctgtgaaagactgcttgatgatttgcgggtttgttgctgtgtaaaaaaaggtcccatggctcccagaagaccatgaaggttcggatctatcatgtaattccttgttatctgccaattatgtatggactatggacatgtgttgcgctgttcaacttactactacaaataagtaatcgatatgttcccttcccatgtctcggtgacaattgtctggagaagcttaggggtcgtttgtttgggattatgtctggagaaacttattttaaactaagtgtgagttcaagttaagttagattatataatctaggcagattataattccaagcgaacaggtccttagtgtttttggaaaatcctaggtgttcttttggctacattgttgtgtgtgcagatcccttgttggtctgtaagcgtggggaagtaagaatcgtccgtttctactgaagacctgctcgagttaggcaccgaggatgccggtaaccaaacagagcaatagtgtctctgtgggcacagtggagtgtgaatctgtgtgatgcaaatccgtcatttgtttagcaaaatttccagcgttgcatgatgcagtttctttaacacggacttaagggaagggaaaaaaatgttgagccaggagatccttcaatgtgttagactgacgtgatagccaactaaac

SEQ ID NO: 20301 - DNA, 750 bp, Zea Mays
ataagtgttgtttcataccttaacggttaccccagcccagacaaatggcaacaaacagtccgagctccttgttgatttgataagcacaaagtggagttgttcttttcacaatgtcaaagcagttttagactttgcagacatcaagcgttttgtaacgggatatcgaagatgaacaataaagcacagatgtttgtgtaatcatttggagacatgttttgtttccttcttacttaaggacctcccccaattgaaaaaaacgagatcagtctgggctggcttgggcagaaagcgaacaacacatgcagttgccccctttgcagagctcatcgcttggagttaaagcctgctggtggcaacaatatgtctcagagttaatcataaattcatattcgttaaaaaaatgtatcctctaggcatgcgaggtagtaatatgtttgtttggcagagccaagctgcgcatccaactgctcaagaaagctcgacggcagtagacgagagagagtgctgtggcagttgggctttcaggagactgtagctcgtatgtatctggccactagttttctggccgagttgggtggtgattgtgatttaattaaagtggaagcttttgtgcctgccttccaaaattattccgccgtccacacgccaccttgcgtgtttcattattgatggcgtggtccagttttctgtttttatttctttctgtctttctttcttgcttacttatgctgaagccatctccagagctat

SEQ ID NO: 20302 - DNA, 1658 bp, Zea Mays
taataatgagaaaatggacttggattatcttaatttatagggttatgaacggtccaatagaagatattgcaacccagcttggttttcaaggaaatccgttcctccaaggtcttgtggtgagcatattcattgttggtgccttttttgggagcttaggctcatctgcattagtagataagttcggctgcaagaggacccttcagatcgacagtattccattgattattggagctctcctgagtgcacaggctgattctttggatgagatgcttttgggaagattccttgttggcatcgggatcggcgtaaacactgttcttgttccaatatacatctctgaggttgctccaacaaaatataggggcactttggggactctgtgtcaaattggaacatgtctaggcataattgctgcactttccttggggataccttctgagagtgatccacattggtggcgaacaatgctttatgctgcatgtgtacctgggattcttattgttgctgggatgcaatttgctgttgagagtccacggtggcttgccaaggttggaaggttcgatgatgctagaaaggttgtagagagcctttgggaaccttctgaagttgagaagtccatggaagagatcaaagctgttgtgctaaatgatgattcacggggcagctggtcagaccttctggtggaaccacataatagagttgcattgattggaggatcccttttctttctgcaacagtttgctggaataaatggtgttctttatttttcatcattgacattccgtgatgttggtatcagtagtggtgctttagcaagcttatatgttggaataaccaattttggaggggcactagttgcttcaaatttgatggacaagcaagggcgaaagaagcttttgataggaagctaccttggaatggcttttgcaatgttccttatagtatatggtattagcttcccgcttgatgaaggagttgcccacagcttatcaatcgctggaactcttttgtacatttttacttttgcaattggtgctggaccagttaccggtatcattataccagagctcagcagtgctcggacacgctcaaaagttatgggcttcagtttcactgtgcattggatatgtaactttctggtgggactatttttcctggagcttgtgcacaagtttggggttggagcagtctatgcaggttttggtggggtctccctgctgacagcactcttcgcctacaatttcatagttgaaacaaaaggacgttcgcttgaggaaattgagatgtccatgagcagtgctacccctggcaagcaagagtagaacatctcaactgtatggacaaactgaacaactgacgggaggaatttaataagagaagagggggcctaatcccatgaatcttcagcagcagcagtttgttgcaaacaacatcaactcctatagataatgagcacaatcaaattcagcttttctttggtagcatgagaatcgttgtacaatattaaaaagggtgaagaaaacgacccttttaatttgttttttgtacatctgatgtatatattttacgccttctgtagtacgtaaaataaagggaacagatctttctgatattacttgattgatgaatttggaatattcgcatcctttgttctggca

SEQ ID NO: 20303 - DNA, 979 bp, Zea Mays
gtcgcacttcgggacacttctccctccgctgcatctcactttctctcccggctgtttcgtcttccttggctttcctcctctctacgcgctttcatttcatccatgtcggcttcctcgtttgctcggcttcagcacaaacgcttcatctggcagaatttgatctgggcacaaggtacaatatgtcctaccttagagattttactacaaaggggtacccatacgcacgcgcttgcgccaatcgtgccttattcaatggagaatagtgttgcagatgcaatgtacaacaaaattattgtttttgttttcgaccaagttgtggataccacaccctggaagagttggtggtagattcttcatcaagtatggaatgtctgcgatgcctagctaggtgcttgatggcaacaggtgcatatcaaaactattaattattttcatgtgttcctgcttcaagaacacatgcaatagtaataggtttccattagtttaaatgtcacatgcaaagaagcaaacaccacccagactttcttcttagtttgccattatcacatctgtactcatcatgcacatgaaacttttggttatgtacaactcaaaggtagaaggaagaccttaaggtatgttgtcatagtaattgtgaaatggatttggcactggtatttgatattttctgacttctagcatcactctgaaggcacatgataaagctcgagctttatcgatggtcggacgatgataacgcgctggaagaagtaatgagtagagagtatgttctttatttcttatttatgtacaaattaagatctcacggacgaatttaacaccgtgcgcagggcgcgcggcaatacactagtacagattaaattttgttgattgtgtgcctcttgaacatgcagttaactgtttcctgagcaatgaatgtaagaaaggttaccagacgttccaatgcagtcaaaagctttttaatatactagcagcattt

SEQ ID NO: 20304 - DNA, 2267 bp, Zea Mays
gattaggtatgtctcttgtcttatccgccacacacgacacgacacgcgccggccacagaaacagcgcttcactcccctccgcgccgcggcgaccatggagctcgccaccgtcgccgctgcagtcgcctccgccgctgcgcgcccgcacgggcctttctcctctccccgcgcagtctctgcctccgtctcgtggaccagtctctcgctcgcctacacctcccgctgtctctcctccacgtcctcgcgacggcggctgcgctggctccccgtcacctcggccgccgtggagctccgcgaggccactgccgggggcggagactcgctccgtgtcaccaagacgccgcagcctggatccagtgttaagttcagcgtggaggtgcctacttccatcattcacgagtgctaccaatccacgctacaggagtacgccaaacgtgttaaggttcctggatttcggcctgggaagaccattccagaaaacgttcttataaactatgtaggaccgcaacatgtacaggatgccacgattgaagctatcttaaaacatacgcttcctcaagcactgtcctcgaggagagggcattagaagattctgttcgcattctgactcaatttgatgatatgagaaattctttctcactcgacaatgtgtttagatatgatgttgctgtggatgttgcccctgaagtccgatggttatctgaagacaaatataggaacctcaaagttgtcgttgaaatagatgaagctgttgatgcggaaaaggcggcagagaaagagcttcagcgtcgtcataaagctctaggcttacttagaattgtggctgacagaggcctccagattggtgatctggtggtgctggatatatttgcggaaagcattaacaatgatggctctagaggtgaaaaaatttcatcggctgagagtacaggtttccacttggacactgaggaaaatagtaaccttgttcctggatttcttggttcgttgattgggattcgtgctggtgagactagatcatttcctatccagttccccgagtcatttgagcgagaaagtctacgaggtgtccgtgcacagtttactgttgtgtgtaaagagctgttctacagagagttgccagtaatggatgactcacttgctgtaaagcttcttccaggatgcactacaatagacgaggttcgagagcgtattttgaaaagatgtaaagaagtggagaagacggccatagaacaagcaacagacaacgcgatccttgaccagctcgggaagttggtcgaggtcgacgtccctcgtgccttgtttcaagagcaagggcagcagctttatggagccaagcttctgcagcttcaggcggaaaggaagctggataaagaccagctagcttcgttatcaaccaagaggtcagtgcaggcgtacctagaagatgagaaggagaacattacaagaatcattaaacagatgctggccgttggcgatattttcaaatccgagaacttacagtactcgactgatcagctcgtcaaggaagttgagaactccatagcggagttcaaacagtacaaccaagactatgatgaggacaacatcaggcagcaggtccaggatgtcctagaggcggcgaaggtgcttgaatggctcaaggagaactgctcggtcgagtatatcaggcgatgagtcccacgatgctgggtcaaggaaagctcctctgaacgtgagaaagatggtggctggtgtggcggtcggcagttttgcgagtggccttggtccttgccaatgccaaccagcctagagcagtgcagtgattaagaggtttacagaagagagaaattctggcagatccaattgctgttgccgtcattctgatacaacctgacttgatgactctcaatgaagctgaatgctgaaaggtgttgctgccttgcagaatgaagctttgagttcaatacatggaattcatatttggtggtggtgttttggaacttgtttatctgctaggtgttgctgccttgcagaatgaagccgtccacattgtccttgtttatctgcaagatgcatgcctgctctatttcttgctcttcagtcttgactgatgcctactgcctgagtgcagattcagtgtgatagttagattctgctgatgtgttaacatgttcattgtaaacaaatttcttgttaaacatgtgtgatctcttcaagaccatgtgtctttgacctaatatattgcgaaacattcttcagttgtgtggtgttatcggtttacatgt

SEQ ID NO: 20305 - DNA, 1945 bp, Zea Mays
ggggagcacacagctcggcggggcgggcagcgagcgggcgcgcgagctcggcgtcgtggcggagcaaaacttccggggcggggggaggagagagaaactttgaaaggacccagttttgcggggggggcgcgggtctctggatggggacaacacgtgcggcattgccgagaggggttgcgagagcgacgcttttggaggacgaagacgacgacgagggggcgcgccgcgacggtgagggtggaggacgccggcgatgggagggggctgccgccgccgtcgccggcgacggggccctacgccggcggtaggtcgcgcgggccgcggcggcagggcgagaccatagccaagggccacaagaactacgagctcatgctcaacctgcagctcggcatcaggcacgcagtaggaaagcaaggtccaattacacttgatctcaagtcatcagcttttgaccccaaggagaaagtatggacaaggttccctccggaaggctcaaaatacacccctccacacagctcatgtgatttcaaatggaaggattactgcccgcaagtattccggacattgcgcaagttgttcaaggtcgatgccgcagactacatgctatctctttgtggagaccaggctctccgggagctgtcgtctcctggtaagagtggaagcttcttttacctcaccagcaatgaccagtacatgataaagacgatgaagaaatctgaagtgaagatatttctgaagatgcttcgagcttattataatcatgtcagatcattcgagagcactctagtcacaaagttttttggtcttcactgtgtcaaattagccggagctaaccagaagaaggtccgttttgtcataatggggaacctgttctgctccgactactctatccataggcgattcgacctgaaaggttcatcccttggacgcacgactgataagccgcagacagagatcgatgagtacactactctcaaggacctcgatctcaacttcatatttcggctgcagaagcattggtaccaagagttccaaaggtcgacagggactgtgagttcctggagcaggaaaacatcatggactatagtcttctggttggtgtacattttagggacactagggataggctattgaccggaggttcgttcgatagcgattgcagcagaggatcatcgcctcaattgtcaagaggagacacggatccaaacaggttagccaagataaagcttgggtcgaacatgccgacgagagctgaacggacgataaggaagggcgactgcgaggtgcagatcatgggggagcctacgggggagttctacgacgtcatactgtattttgggatcatcgacatactccaggactacgacatcagcaagaagctggagcacgcgtacaagtcctttcagtacgacccgacgtccatctcggcggtcgatccgaagcagtactcgagacgcttcagggatttcgtgttcagagcgttccaggaagacaagttcgatttgtgactgaagaaggcacaaggaagccagcctaccgggtgccggccgctgacatgtacggataaccagtgttgaaatgcagagtcagacatgcatggcactgctggcatcgcattgcagcagagcttttggtgaccctacctgcttgctacttccacaccagactgcagcgcacggcagaagcttcagggcaggccgtcaggctgatgaagccctgagggggattcagctggcactcatgtagaagcgagggaggctccaattcgagatgtcggtgcatttcaatgtttttcatataaaaagctatgcctaagaaaaaagcatacatgcatatagaaaccaactgatattagcgtagacgctgacaacctacggagaaatttgtaatggcagttcagggatgtaaatcttttcttacgaggcaacaggtcacagttcttatt

SEQ ID NO: 20306 - DNA, 197 bp, Zea Mays
ctactttgtctcggttccaccaaatggctaacttgtagctaaggggtaccattaaaagctagccatattacattccattagtggcgatgaaattctccaggctggtaattcctcgtaccaattcctacattacctagacaaactgtattgtgaatgaatgtatgtatctatccttaattttcataatcatggcaata

SEQ ID NO: 20307 - DNA, 336 bp, Zea Mays
gttttgtccatttttatctaggtttcatcctacagtcaatatttcttctgataccacttctgtcacacctggatttaagggacgaagccgggtgcatctcatatatgtgccaaagaagacaacacatacaataacagagtgtatagagataaatgtcacaatataatcagagtacttattacatagcggaagtcttacaaaataataatataaaacgaacaaatgtccatccttggcgccataaagtcaactgggaaacgacacctagatcaagtggaactcctcattgtgtggctcctcttgaaccacatgttcttctcctgtggggggctgtga

SEQ ID NO: 20308 - DNA, 3183 bp, Zea Mays
ggttctcccaaagtctccggccaccgcccattcccgaaattcccaagcacgcatcgagatctcttgaggcccctgctcctcgcctttgacgtgcacaacccccagtctcagatcacaccaccaccatggggagcataccgccgccgcatgctcctgccgccgcctcgccgccgccgcatcctctccggcgctcccgctcgccctcgcgctccgcctcggcctgccaccgccaccgccgtctcacccgctgctccccgccgccccctgccccgccgacgctcgcaggctcctccgatcgctccaccgcctccgccgcctcctcgggctctggcgccgcctcccatccggctccggctacgcttcctcgtccctgtcctccccgtccctcgccgcgttcgagtgggccccgcgcgccactctcgcggcgtcattcctcgccccctccgcgcacggggacgttggcgtctccaagtcccccttcgtgacgctttccatcgaggagtccggcgacacggtggcggtcgttggggaagtgtcggtctgcgtcaattttgtcgggaacaaccacattgtggtggaggcggtggtgggtgaagatgaggagtttgaaatggtgagcggttctccgccggaggagatctacgcgcactttgccaataggaggagccctggggcaggtaggaggaggaggggcaagcaggggaggaaaggaggcgggatggaggcagagcacttcgtgaggattgcggacactgagccgacgaaggcacggccactgcaagggctgtggaaggtgcttcttctgtacacctgttgtatacgatctcctagcactatgctgttttcaattggaaagttctattgtttgcatatttagctgcaacacgctgttgaacgccattgcagcattgctggtttgtgtaattacccataaactagatgcctggcactgcactcattcccatgaagatgcctcattcactcagggaaccttacagccttgggatgggatggaatagaggatcaaaatttaccctgcatcctctaaatgttgaagcggaaagtgccttccgggttgacagcttctcctttttgaagattttggttcacaattgttgtcacacactactagaaccattgttggagattgaactaaaaaccgtactcatctgtttgagttttattcactctctattacagaagaattagatgctcgtagcagatgtccactcaggttgagattttgcacattcagcacatatgcttagtgcttaccacgcatcagggtgacatgcgtaaagttgtgtgcttgctatggtgaactacatctagaatttcagggatcattgttttagttgggctcaattgaataccatttaggagaacatgaagctgcttctttagaattggctagatgctagctttggccttttaatatttatggtgcatttatatactgccttatgggttgtattttctctgacataatttcctgctggtgtttatgtagactttgaacccttaactgttatcagaactacctgtccatgtggcaattgggttaatgaaatgacaagttttctttgtcaagcaaagctgtatggtttggttcctgccattgcatagtcccttgcacagatcgattctcatagtgttatgtcattgttgattaagagccatgaactgaagtgtactacgcctttggccttactgtgagtcttgaccatgaaccggtgtcagcaggaagcatgctagtgctgaattgcattatgtgaatgggttcccaaaacaaccctaagatttgttttaatttcatcggatcttgatacttcagaagcttggaaaaatctcattcaatcatcccaaaacatttctagacacaaaaactactctatgactggttagtttcaaatgctatctgtatgtgtccaaataataatggttttctggattatttcgttactaaaagctggggaattatcagttaacttttccagattccgatattgctgtgttgttatcaactacattttttatgaggaaacaattgtgggaggctgaatataattagctgtgcctgtagctgcatattattagggtgaattagttgtggtttaactaatcacgatccttgtaccgaatcctacaatattttgcagttagtatcatcttgtttagcattttgcatcttacctctgatttggagaaggcagatgtcatcttgtttattcattttcatcgaaatgttataaatttttgtttttatctcatcaatgatgaatgaccatttaatttttaatattcatttatctgtttctttgaaaaattgttttcatgttgttgatcactaggcatgcacacaacagaatgacgttaccaattttgaattggaggactactatgtacttggcagaatgatttattattagttgaccttttgccaagcacaatggattaatttccatgttcccaaacagggtatatgcgaggataggactttggaattttaccttgtcacctatgatgacattggtggagtaacttgtcgacgatttagggatacacagagccaaaactctggctactctcctgttttttggacaacagatactacatttcttgaaccaccattctctgagcaagagctggttaattatgccagccgcgatcatatccaaggtgttacttccaatcatgcaggcgctgagaacagggttgtctcaaggatattacgcatcaattccagttatgatgtggttgatactcatctctcaactcccttggatgatgggaggagcgtggagggaaggatttggctatatgaggatggaaccttcggttttggatttgttggcagtaattcaattatagatctgaggcatgtctcctcggctggctgtattcttgatacttaacattagatgatctggatcttgctggcacataatttttgccagcgagccccttgtacagtacttggtgtgaggcatgttgcctccgatttgttgtactctcgatgataaggtcactgaatactggtcccttctggcacttagctgttgctagaatgcccttgtaaaccgaaccttggttcctttgggcatgtacttgttgacataataccgatgtatattacagtactatttgttcattgaattccaataaactgcaactgttacttcc

SEQ ID NO: 20309 - DNA, 1945 bp, Zea Mays
tggtgagagttgtctcactgagtcaccaggtcacggattcgaagcaacctctccgcatttgtgaggggaaggctggcattggtttatacttcatctcttcccttgatggctagatcccactcatgtgggagtctccgaaaatggtcaatggtggtagagttagcagctgggcatgcattaacttctcacgaaatgtgcaagatggtgctgctaggagtttctgtcatgatctcgctttgatgtgccaagtatcaggaatggattttgcacttgaacctgtgctgccccctgtctatgcgaggcctgaacatgttgaaagagcactaaagagactttatcaagatgccatgagcatactcaggcctcagggccgagagcttgacttgctgatggtaatactgcctgacaataatggctctctttacggggatcttaaaaggatatgtgagactgatcttggattggtctcccaatgctgtctgactaaacatgttttcaaggcgaacaagcatcagtatcttgcaaatgttgccctgaaaataaatgttaaggttgggggaaggaatactgtacttgttgatgctttggcaaggagaatcccccttgtcagtgacgtagctactattatctttggtgctgatgtgacccatccccatcctggggaagattctagtccttccattgcagctgtggttgcttctcaagactggcctgaggttacgaagtatgcaggattagtgagtgctcaaacccatcgccaagaattgatacaggatcttttcaacgtacggcaagatccccaaaggggggctgtctctggtggcatgattagggaacttctcatttctttctggagggcgactggacaaaaacccaagaggatcatattctacagggatggtgtcagtgagggacagttctaccaagttctgttgtacgaacttgatgccattagaaaggcctgtgcatcattggagtctgattaccagcctccagttacctttgtcgtggtccagaagcgtcatcacaccaggttgtttgttaataatcacaatgatcagcgtgctgccgatagaagtggcaacatactgccgggcactgtggtggactcgaagatttgccatccaaccgagtttgatttctacctgtgcagccatgctggcattcagggaacaagccgtcctgcccattatcatgttctgtgggatgagaacaaatttacggctgatgggttgcaaactctcaccaacaacttgtgttacacgtatgccaggtgcacacgctcagtatcaatcgttcctcctgcatactatgctcatctggcagccttccgagctcggttttacatggagccagatacaagtgacagcggatctgtggcgagcggtgctacgacaagccgtggccctccaccaggggcgcgcaacaccagggctggtgctgcgaatgttgctgtgaggccattacctgctctcaaggaaaacgtgaagcgcgtcatgttctactgctaagattgacgctgcgctgatgctgtgagcaagcaattatcgttatggtggtgatgctaggacaccgttatgcaccggtaactttaataccttttgtactgtaactacttgtatggcattggaaactgtttgcgatatactcctattaagatgggcttgtcgtggattagattgcactattggaagccatcaatccagttctcatctgaaaattatgtaggtacgtacggtattacaacctctctctatctccctcccaatacagtacagaaaggacgcaattcttgatttcagatagacagtatctgttaggcaggtacttgttgcttgactgttcttcatatagatcgttggtaaagtatcggttacaatcctgagtatgtcacggagaatcaaggagatgtaggtcattaaatcaacgagattgctactggaaa

SEQ ID NO: 20310 - DNA, 4323 bp, Zea Mays
ctgcagtcccaaggcccacacggcacagaggcagcctgcagttgtgagcctgaagcaatgccgcggcacagcagtacacgcgctccagcaggcaacagcatggccgcaacctcatcttccatcccatagcaacgctgcagcagccggaggctcagattttgtaatccatcacttcctcaccagaccccaatcgccctcctccccagctgtacgccggtgtatcccaagacaattgacctccgttttatagcttctcatcacaaccttctctcactacatcccctctctctctctaccctcctaaaccccaaatcagagagatagagaaagagattgaggagaaagaggaaaaacagagctgtagagatagaaagttcggttgagttgagctctccgtcctgcttctggcttcctctctctctctctcactagatctactactgctactagtgtccagtgtccactgcctcggccttgttgctgcctgcgtgcgtgcctttgcccaaagcctgcctgctcggtgcttgcttcgcttgcagctgcagtggcctcacgctctatgcttgctctgccaccatgtggtgctggtcttcgcgctccaactaacctccaccagcacctcacgtaaccgcatcgcaccgcgatgccgaccctggtggcgtcacgcggcgcggtggcttcttccgcgcgcggcattgcaatgccgccaccggtggacgctcccgtgaaggagtagctagctggcccggcggcagtggcagcgggcgaggcgaagggagcggagaggtcgttgtctgttccgggagcgagcgcggcgccgccgacacgacatgttcaagtcgcggtggcgcggcggcggcagggccaaggccacgttcaagctgcagttccacgccacgcaggtgcccgtgcagggatgggaggcaatgatggtggtggtgacgccgcaggacgcaggccggccgacggcgcggtcggagcccgcggaggtcaccgatggcgcgtgccgctgggcggcccctatcatggatgccaccaggctccccgccggcaaggacaagatctaccagttcctcgtctatgagaccgggtcgagcaaggcggcgttgctgggggaggccacggtgaacctggcggactacgccgacgcgttgaagccgtcggcggtgacgctcccgctcaagggcagccccggcacgctgctgcacgtgaccatccagcgggtggtgggtggcgccggtgggtacggagacgacgcgagtgagagcggcgacgcctcgccggtggcaaagacgccacagagaagaacgacactgcagaaccagctgagccggtttgaggacgaggacggcgagaaggctagagcggccacggatgcgatgagtcctgtgcaagatggattgttgataacaaaacctccaggcatgaggtttccatcaagaagaaatgtgcctatgtctgttgacccagtgggccatctccacaatggcagcagtttcgatgctgtctcggtgtcaggttcagatgcaagttctgggagatatacccccaaaattagtgcgaccatgcacaactcatatcttcaggatagtagcaatgctctctcaccatttgccaacaatggcactgtgaggaacccattgaccagttcgggtgactggtcaggaagctcagctcctgatgctagtacagatgggtcaacgagcaattctggtgaggcagggttaagaggggaggatgacgacgtggagaagctaagaagtgaaatagccactttaaccaggaaattggatgtctcagatatggagttgcagactctccgaaagcaaattgtgaaggagagtcggcgtgggcaagatctctccaaggagatgagtagcctcagggaggagagggatgcactcagaagagaatatgaaggactgagaggggcaaagaagatgatccatgattcaaatggctcagggaaacggctctcagatgggtatgacccatggtcacaggttgaagaactgaagcaagatctgaatcatgagaagaatctaaatgcagatcttcgtctacaactgcaaaagatgcaggaatctaactctgagctgcttctggctgtgaaagatcttgatgagatgttggagcaaaagaacagagacatttccattttgcaagaggatacacaagaggatccacaggaggcagaatatgagcatgcactgtcaaatgtgcataattctggacgcaaaattgccttatctgaaacgagttcataccaagagaaggaagatgagcttatgctggatgcactggcaaagaagcgtgatgacatctctacctctgagcttgaaaagaaaatccttgagctgagcaatgaaatcgagttgtacaagaaagatcgtgaggatattgagatgcaaatggagcaacttgcacttgattatgagattctaaagcaagagaaccatgacatatcttcgaggctggagcaaacacaactgagggagcagctaaggatgcaatatgagtgttcagctcatttggctattataagtgatcttgaggccaatgtggagagcttggataatgaactccagacacaggctaaaaagtttgaggccgacatagcagaaataatgagtgcaaaggtggaacaagagcaacgggccattaaggctgaggattctctgaggaagataagatggaataatgcaactaccgcagaacgacttcaggaggaattcaaggtgttgtcttcacaagtatcttctgctttcagtgcaaacgaacaacagcttgtgcaagcaagaaaagaggttgcggagctgcagctgcagaagagccagttagaagagttacttcagaaggcccaaggagatcttggatcagttcaggatcagcaccgggtgaaggtccagcagttaataaccctagtggatttcaagtcaaaggagatagacaggctactgatggagctcaaaagcaagagtgatgagttccataaccaaaaaagatgtgatgaggcaaagctgaatgctctgtcagaagaaatcgacctactcaattccaagatcgacaagctatccagtgagagaaatgagctattcgaaaagaatgagcagaaagaaaaggaattagctggaattagcgaaaaggacatgcaattgcaagacaaaactgctgagattacttcactaaataaagagcttgtattcctcaaggaccaagtgaagatgcatttggacgaactgcacagtttaaaacgtttgaagaacgagagggaggaaacaattggaaaactgcaaatagatattgggtcactgaaactccagtgcgacaacttgaaaacttcgctgtccaagaaagagtctgagaaagacagccttgcctctcaggttctgaagctgagaagatcccttgaaacccgggacagggcgaaggcaaatggtcaaatttcagatgtgaaggacaatcagcatgctaataacaagcgcaccaagcacaataccggctccactgggagcattgctgcactgccaggcaccaacagacagggcgaagacggtgactgcaatggtcctgacatgaggaacaccactgaccagtcagcgaaggagctggcctcaatgaaggagaggaacagggccatcgaggaggagctgaaggagctgcacgaacggtactcggagatcagcctgaggttcgcggaggtggaaggcgagcggcagcagctcgtgatgaccgttcggtcgctgaagaactccttgcggtgactgactcgtgctgcttcactcacactgtagctacaaagattttagacgataccggtgggcgttgtacaggtgggcgagcgactggatgggctttttctctccgaagagagaggctccagaccagaggctcggggagaccaggccaggcgagacgggcaccccgggtatgtaccaatggggtgcctgcggtgtggtctgtccgtatcctcaagagttacagtacacagcatgtagatctcgtcacaataacattctttcgttttctttgttccgcattggcgtgtgtgcagtaatatgagttgtaatagttctttcttaccctctctggagtgtgttgtgctgtataatttccatggtgtcattgtgttgtggagaaaggaaaatgagaaggaaagagtggcctgtcagctttatctcagaaatgcttcgttgtgttccaagttcctgatcctgactgtttcatcagtgtggatttgggccttggccctagggtgaaaacatgtctgttgggtaacggacacgaattgacgaattgtgtacaaacaggagcgaaggtagg

SEQ ID NO: 20311 - DNA, 1808 bp, Zea Mays
caatttcgtctctttctcctttcagtcctcggcgaactcgactcaaaccctaagcccctctccttgccatcccgacccatggatcgcgagcgctcctcacggcgccctcgcgacgacgatgtgcaccaccggtctcgcgaacgggacgacgaccgacaccgccgccgcagtcgccacgacaccgacggtcaccacaggtatgagggcggagacgaggatcgccgccgccgccaccgccaccgcgacaaggacggtagcggaggcggcgaggatgaccgccgtcaccgcaaccatcatgacaatgacgacagccgtagccacagctaccgcgacggcggtgacgacgatcgccgccgcgggaaacggcggtccgtttccccgtccgagtccccgccaccttcggtgaagcgggatcgctcgtctagccgcccgcgggagtccgttgagcgtcgcgactccaccgaccgcgagccgcggtcgtcgtcgcggaagcggaaggaccacgagggcggtggcgacggggatgagcccgttcgcgaagggggcaagcgggccagggcctccgtggacctgcctccgtccaaggaggagaggcctagacgggagcgcaggaggtttgaggatgtcgatgagaacgggaagaatggtgatatgggtaaatggggcaaggaaatctcatctcatgagctgcagaaggaggagttatcaattaatggtggtttacagagctacgatgcacctaatgctggttctcagcaaccactcagtgctgtttctgtgccatcttctgttcccattccttcaaaggtatcttcaatttctaccaacaatgcaaatgagggagttagtattagatctgatgaggttaccgtaaaatctagtacagatggaagtgcaatgtctgctgctagcaaaagtagtaacctatctcttgatgctttagccaaagcaaaaaaagctttgcaactgaagaaggaactgtcagaaaaactcaagaaattacctatgcttaataataaactcgctacagctgttactgctacacaagtttctaaagaagcagcaaaaacttctgtatcagctgtagatgcacaacacttttctaaaggagaagcaaaacttactgatgtttctagtctgccaactagtagcatctccggaacgccagccattggtggtgtgattggtattccaggtcttacacacatacccaatctcgattctgtgaagagagcccaagagcttgctgctaagatggggttccgccaagatccacaatttgctcctgttatcaacttcttccctggtacatccactgaagttactgtggcacaaagacctgcaaaggctcctgttcttcgccttgattctcatggtagggaaattgatgagcagggaaatgttatcagcatgacaaagccaacgaatctgagtactctgaaggtaacttttcatagtctactatagagctttctgtatagttttatgattttatccatgattttctttggtatggtgacttgtactatctgtttttaccttggttaggtcaatataaacaagcagaagaaagaagcttttcaaataatcaagccggacttggattctcttgcaaaatcaagtgttcattttgatgaaaggatgggcataaaccaaaagaagctcctccgtcctaaaaggccaggatttcagtttgttgaagagggtaaactctctaggcaggctgaattgcaaaaaattaagtcaatttggtgaagcacaagctaaagagcttaaagtaaagcaagcccagcttgctaaggcaaagg

SEQ ID NO: 20312 - DNA, 1511 bp, Zea Mays
atggcagcatccacggcggcggcggccgcgcggaagggagcgctgacggatcagaggttctcggagctttcccccgcgctatccccggaggtggtggaggcactggaccgcggcggcttccagcggtgcacgcccgtgcaggcggcggccatcccgcacctgctgtcgcacaaggacgtcgccgtcgacgccgccacaggctccgggaagacccttgccttcatcgtccccgtcgttgagatcctccgccgccgctcctccccgcccaagtcacacgaggtccttgctctgattatctctcccacgagagaattgtcctcgcaaatattcaatgtggcccagcccttcttcgcgaccctgaatggcgtgtcgtccatgctcctggtgggtgggctggatatcaaagcagagctcaagaaggtagaggaagagggcgcaaacatattggtgggcactcccgggaagctgtttgatataatgcacactgatgctctagagtacaagaatcttgagattttgatcctagatgaggctgataggctcttggatatgggattccagaaacatattaacttcatactttcaatgttgccaaagctgaggaggactgggcttttctcagctacccagacgaaagctgttgcggacctatccaaagcagggttgagaaatcctataagggttgaggttaagacagaggcaaagtccacaagcaaagatgctggacagcaagagcttggtccatccataacaccattagggcttcggttggagtatatgatatgtgaagcatcaaagaagtcatctcagcttgttgatttccttgtgcagaatagtgggaagaaaataatggtattattgggctgttgttcttccactaattaagtcgcttaaaggttctccaataattgcttaccatgggaagatgaaacagagccttcgagagaaagctttggcatcattttctgctctttcaagtggcgttctagtctgcactgatgttgcagcaaggggtcttgacataccaagtgttgatctgattgtgcagtatgatccacctcaagatcccaacgttttcatacatagagctggccgtacagcacgctatgatcaagaaggggatgctattgtttttctcttaccaaaggaggatacttatgttgagttcttgaagcttcgaggtgttcctctcacagaaagggaatgcctcgcaaacactgatgatgtcataccgcagattagaagtgctgcgctcgaagatcgtaatgtcatggagaaaggacttagagcgtttgtttcgtttgttcgagcatacaaggagcaccactgctcttacatttttaggtggaaagatctcgagattggaaaactagctatggagtatggtttactccagatcccatccatgccagaagtgaagcatcattctctttcactagagggatttatttctgttgatgatgttgatattacacaaatcaagtacaatcttcaaggaaagggctatcaaa

SEQ ID NO: 20313 - DNA, 513 bp, Zea Mays
aagggtaggagattgagaagatccacgcgaacacagtagaggatgacttaccggagctcaagcaatgcaaatccatgtccacggtgacaggcgggcacgcgacggtgaccatgctccgacgagcgattcagccaacgccaaccgatcaccaccgctcacaaggtcacggccgagtctagagctgcatggcgaatctccctggccccatgccatggtccagagatcgacacgcgtgcatgccccatggcgacacatcccgcctcactctctctctctctctctctctctctctctctctctctctcaccggcgagactcacagttggtcctagtggctaagaatgaacggcgcgagattcacgcattaggaaggaggggcggaggttgaagatgggttgtcacagggctaggacgctacatgtaggagcaagaagatccgggattgagccacgaacccccgatctccccgcgtcagtccgcagttgagcctggcggcttttaaggacgtgcgag

SEQ ID NO: 20314 - DNA, 1669 bp, Zea Mays
ctccggtcgctctcccggtcgcagccaccgtttataaaaaaaaaacccgaccgagcagcgccgcaccagaagtcgggagcacgacccactggagccagcaaacaacaacgagtcccttttcgcctcttgcccgttgcccctcggtttcgtcgccgctacccggcgatctccgcgacagcgacccggtgccgccgccgcagatctcgccgagaagacaggtatcggtgccgccgccagatcaactggacctgtaaaacgagggcctgcgctacctgtggctgtggagttcccgaggcgctgttctgccaggattcggcatcctttgttgcccactagggcgtcgctgccccagtgcccgcaatttgggtctactttgtgcttcaaactctcaatcttcagtgattgagccggtccagctaccgaggagccctaaaagtggcgtagctccaaagaaatcaggtgaaagtgcactcattctgatacggcatggagaatcgttgtggaacgagaagaacctgttcactggatgtgtcgatgttcccctgacccctaagggcgttgacgaggcaattgaggcggggaaaaggatatgcaatatcccagtcgatgtaatatacacttcgtcgctgattcgggctcagatgaccgctatgcttgccatgatgcagcatcgccgaaagaaggttccaatcattttgcacaacgagagtgaacaagctcacatgtggagtcagatatacagtgaagagacaaagaagcagtccattcctgtcataacagcttggcaattgaatgaacggatgtatggtgagcttcaaggccttaacaaacaagaaactgccgatcgatttggtaaagaacaagttcatgaatggcgtcgcagttatgatattcctcccccaaatggcgagagccttgagatgtgtgcagagagagcagttgcttatttcaaagaccaaattatacctaaacttgtggatggaaagcatgtaatgatcgctgcccatgggaattcacttcgttcaatcataatgcatttggacaagctgacttctcaagaggttatcagccttgagttgtctactggcattcctatgctgtatatatttaaggaagggaaattcatcaggcgaggaagccccgctggaccttctgaagcaggtgtctatgcttataccaagaatttggctcagtacagacagaagcttgatggcatagttcagtagccatctgcaggcttttcctttgctactcatccgtcgaacatgcatttggtcccggaaaacaaggggccaagctcctaccatctcatcgacattcaactgccaagtagtccattcctgtcacaagtttgtagcggctcatttatctcttcagaaacctcccaccacgtggtagtaaaatatacggagtagatgccaattttaggtggtgagctgtagatacaaatggagatatactggatggcagttgtgttatctttccgctttccccagtcacttagatctcagatgtttgtaatggtgcagtaataaacacttgtagcgaactgcatggaacgagacgctgttatcgaatgcttgttccccgtctcatcaattctttgtgtgccccggtgtgtgatcggaatgttatgccctagcttggcagacattccttttcggatcct

SEQ ID NO: 20315 - DNA, 1596 bp, Zea Mays
tgtatatccagcgaagccatctcacatctcattgtggaaaaaagagttaactgattcagaataattttcatagcgggcattgctggagtgatctcatctaagatgctaatggagattgttagtgcatttggcccattggctgcataccgctttctttttaacaatgagctcggtggaccctgtgcatttcttgagtacgccgaccgctccgttacttctaaggcatgtgctggcctcaatgggatgatgcttggtggacgtgtactgactgctgtgcatgtgtttcctaatcctcatgtggaggctgctaatgaggcttccccattttatggtattcctgacaatgctaaattgcttctgaaagaaccaacaaaggtcctgcagctaaaaaatgtgtttgaacgagaagagtatatgctactttcaaaatctgagctggaagaaacattggaagatgtacgtgttgaatgtacgaggtttggagcagtcaaatctgtaaatgtagttgagtatcctgctgctggtgtcagtgctgcagaggagaacatagttgagctcaagattgaatgcactgaattttctgatacggaaaacattgcaaaggctgtatcagaatattctgtaccgattattccgagcatagatgttctaaatcattctgtcgcttcggatactaaagatgtggatcttattccagagagtcaggatcagaaggacaaacacctcccttcaaatgcagcactttgtgagagtgaggcacctgtagcagatgaggacgcagagcttgatgaaactcagtctagagctgctctccccacaccgcaacatgctgaagctgatcatacggaagcagctgtggatgagaataaacatacaggagcagggaaggttactgctactgcaacggacgacgatgcagtagaaaagagtcatggagacccaagaacctcagagacctgcaatcctgctggacctacagacaaagcggagaaacctggaaggtactccgaacaaggcgctggtgatgtgactgaagatcgtccagaaaaagaagcccaagctgttgggaccagcgacactggtttcgtgtttgaacctggttctgtgcttgtggagtttttgcgggaggaggctgcttgcatggccgcacattccttacatgggcgtcgcttcgggaacagaactgtgcatgctggatatgctccgtatgatctctacttgcagaaataccccaggtgattctgcgtttgcgactgcatgagttgcgatacgagctttgcctatgtgccagtatttcacagaaacttcagacttgtagttttggcttttgagcctttggatggttcttccggtccagatagtggtaccattagttgaacgaaatatttggaaatgttgttccacagtagatatcggatggacaataggatataagtactggatagagacacaagttgtcgttaacatcgttctttacttcgctattaatgtttttgatgacgtcagacattagtgtggatggatggatggaatggatttattgcaagattttgactgctataatctcatttttttactatctgctcacttgtgctc

SEQ ID NO: 20316 - DNA, 3051 bp, Zea Mays
ccctcatgtatcaatgatgccaaccagctgcctgcagatgtgggaaggactgattcagaaggctaaagatggaggcttggatgtgattcagacctatgtcttttggaacggacatgagcctacgcctggaaattactatttcgaagagaggtacgatttggtcaggttcgtaaagacggtccagaaggccggcctgtttgtacatctccgcatcggcccctacatctgcggcgagtggaacttcggtggcttcccagtttggttgaagtatgtaccaggcatcagcttcaggacagacaacgaacctttcaagacggcaatgcagggtttcactgagaaaattgttggaatgatgaagagcgaaaacctctttgcatcccaaggtggcccaattatcctctctcagattgagaatgagtatgggccagaaggcaaggagtttggtgccgcaggtcaggcatatatcaactgggcagcaaagatggcagtgggactggacactggtgtgccgtgggtgatgtgcaaggaggaggatgcacctgatccagtgatcaatgcgtgtaatggtttctactgtgatgcattttctcctaacaaaccttacaagcccacaatgtggactgaagcttggagtggctggttcacagaatttggtgggaccatccgccaacgaccggttgaagatctcgcatttgctgttgctcgatttgtacaaaagggtggctcttttatcaattactacatgtatcatggaggaacaaattttggacgcactgctgggggtcccttcatcacaacaagctatgattatgatgctccaattgatgaatatggacttattagagaaccaaagcacagtcatcttaaagaactccacagagctgttaagttatgtgaacaggctttggtttctgttgaccccacaattactacccttggaactatgcaagaggcccatgtcttccgatctccatctggttgtgcagctttccttgcaaactacaattctaactcccatgcaaaagttgtgttcaacaatgagcaatacagcctcccaccttggtcaattagcatccttcctgattgcaagaatgtagtttttaacagtgccacagttggtgttcagacatctcagatgcaaatgtggggagatggtgccacatcgatgatgtgggagaggtacgatgaggaggttgattctctggcagctgctccattgctcaccacaactggtttgcttgagcagcttaacgtcaccagagacagcagtgattatctgtggtacattaccagtgttgacataagcccatctgaaaactttctacaaggtggtggcaagcctccgtctctgagtgttcagtctgctggtcacgccttgcatgtctttgtcaacggacaacttcaaggttcttcgtatggtaccagggaggatcgaagaattaaatataatggcaatgttaaccttcgagctggtactaacaaaatcgcactactgagtgttgcttgcggattgccgaatgttggagtgcattatgagacgtggaacaccggcgtcggtggtcctgtcgtgcttcatggattgaatgaaggttcgcgagaccttacttggcagacctggtcctatcaggttggcctgaaaggcgagcagatgaatctgaactccgtagaaggctcaggctcagttgaatggatgcaagggtcactgatagctcagaagcaacagccgttggcctggtataaggcttacttcgagactcccagcggggacgagccattggctttggatatgggcagcatgggcaagggacaggtctggataaacggacaaagcattggacgctactggacagcgtatgcagacggggactgcaaagggtgcagctacaccgggaccttccgggcacccaagtgccaagcaggctgcggccagcccacccagcgttggtaccatgtgccaaggtcctggctgcagcccagcagaaacctactggtagtcttggaggaactgggtggtggggactcgtcgaagatcgccctagccaagaggtcggtctcgagcgtctgtgccgacgtgtccgaggaccatccgaacatcaagaagtggcagatcgagagctacggcgagcgcgagcaccgcagggccaaggtgcacctgaggtgcgcgcacgggcagtccatctccgcgatcagattcgcgagcttcgggacgcctgtgggcacctgcggcaacttccagcagggaggctgccactcggctagctctcacgctgtgctagagaagagatgcattgggctccagagatgcgtcgtcgccatctcccccgacaacttcggaggagacccctgcccgagcgtgacgaagagggtggcggtcgaggcggtgtgctctcccgccgcttaggcttagcctgcccgcccgcccctacttctccgactcaccgagcaacggatttgaaggccgaaaccgatgtgtgtggagagtggaactgtaagtatcgacttgcattggtcggagggaggtttagcattcgtccgtctgattccggattaggattggtgctctgctacgtctccatgaactgttcaaagcggccagctgggtccagggatggagctgtagagagagtaggagtagaagactgatcatgcgttcttttgctgttgtgtgttagtagtagctgtgtacctacccgtgacacatctcgtttttcttgaaacggaggaagacgcaggtgaagcgtgcatcgtgcctttgttgttgcaattgtgttgtgtgtggtgggggaggaaaaaaaaagaacaggctttgatgttctcagaagctcaagttcagatctgatagtgcatggaaaatcatgaaccctgaggaatcgattttcgcactctgatttgtaatgctgtactgtaattagacagacgcgtggcacgtggaatcactgctggcaaacacaaacaagaaggggtggccgacgcacgcgacaaccgtgctcgcaataacagagcgaggagtcctttttgacgatgtgccacccacctgaccttgaccctgac

SEQ ID NO: 20317 - DNA, 3269 bp, Zea Mays
cagcaagcgcccaagcgccatgatgccgccgccgccgacgcggtggtcgccgtgctgtccgcgtacgccgggaggctgctcagggacgcggaattcaggcgggcgctccgcgacaagtgcgccgcgtgcctcgcgcccgccgcgggcgcgggcgaggacgacgacgcggcggcaggccgccccgtgctggccaacctcgagctgggcatcgagagcatagagcgcctggccgcggacggctccgccgcgcagccacaggcgccgcgcgacgccaagatccggtcgctccgcaactccatccgcctcctcagcgtcgtcgcgtcgctccactcgccaccgccgccgccgcgccccggcgccgccgcgggggacggcggcggccgcacctgcggggtgcccaactcgcacctcgcagcctgcgcgcagctctacctcgccgtggtgtacaagatggagcgcaacgaccgcgtcgcggcgcgccacctcatgcaggtgttcgccgacgcgccgggcctcgcgcgcagggagctgctgccggacctctgggaccacgtgttcctgccccacctgctccacctcaaggtctggttcgccagggaggccgacgacctcgtcgctggccgggacgccgacgaccggcgcacgaggatgaaggccctgcagaggctctacagcgaccacatggacagcggcacggctcagttcgctgtgtactacaaggagtggctccagtcaggcgccgccgcgccgcctcccgtcccctcggtgccgttgccttcgacgcccaggagtttcgacgggcgcgagaagagctcggcttcggtgcacagaacctccatcaacagagacctgtataatgcggttttcgggacagctctcgctctcgggcaggaagacgtcaaggatacaaagctggacgatgggactggactagctctggatttggatgtcgaattggatcacgatgctgcgggcttcaagacacagaagcttgctcatagtaaaatggggctccaggaaaagcactcccgctctcggaaagaaggcgccgctctagcagaaacagcacctgcgcagcggaaatcatactcctttcgactgttctcgtgccaaggcgatataagcaggaacgtgatcagccatcccaaagcagcgaagaaggaacccgtggtgtctgtcgagaaagagctggacagcagcgagctagctcctgctgtcgtgcctctgctggaacgagcggtttccgtggtatccagttcggacagcctgagtcagtgcgaggacgccgtgcacgaggtcgccagagcatgctcggcctgggacccgagcctcgtgaacctgctgtcgtgcgcctctttcatccaaggccttctcgaggtcacgctgacctccaaagacgacgccgtgctggagtcggccatgtcgatcatggggaagctggttctggggaacgaggtgatcagacagctcgtgctcaacgcggacccgcagctggaggttttcctgaggctcctgaggagcagcgagctgttcctcaaggcggccgtggtgctctacatgatgaagcctaaggccaagcagatgctgtccctggactgggtgccgctcgtgctgcacgtactggagtgcggcgacgaggtgcagtctctgttctccgtaagatgcgcccccaagatcgccgcgttctatttcctggaccagctgctcatggggttcgacgttgacagaaacgtcgagaacgcgaagcagatgatcgctctcggtgggctggacctcctgatcggcaggcttggcgctggcgacgctcgcgagagcaggcactgcatcgctctcctgaccacgtgcgttcaggccgatggcagctgcaggcactacttggctgatagtctcaagaaggagcctctcgttcagcttcttgctggaaatcagaggaaagccagtgccgcgtcccttaacctgatgagtgaactcgtctgccttaacagaacaagcaaaatcgtggagttcgtcaaggagctgaagaacagcgggtgcttgaacacgatgcacgttctgctggtctacctccagcaggctcctctcgtccagcacccgttagcagctaccatgctactccagctcgatctcctgggtgatccttcgcagtacagcgtgtacagggaggaggcgatcgaggccatcgtagccgctctggagcacagctcgcagagcaggaaggtccaggaacagtgcgcccgagctctcctaatcttggcagggcggttctcgtcttcaggagagcccgtagcagaagcgtggctgctaaagagagcgggcctagacgattccctctctgagtccttcaggagatcagaagtattcaaagataagagtgttcgagcggaggaagagaagctagtggaagaacggcagaagaacctcgccttgatgctactgaagagcgggggcagaaggttcctcacggcgctgtcgagctgcatatccgatggaaccccgagcctcagccggtcgtgcctcgtcagcgtggcatggatgagcagctccctctcgccgctgcgcggatgcaacgacttccagcccctggcatgctccgtcctcgcgtctaagcttttggacagcttgagctacgacagagtcctggaggagagggtgctcgcttcgctgtcgcttctgaacgtcgtgagacacccagaatgcatggagaaggtcttcccgctgaagaaagaaaccatcgagtcactccaagatctcgcggaggtgacgtggactgcgaaggagctcctctttgcctgctgcagatgagatgcaagaccagatcgtcctcagcgatgaagaactagacaccagcatgtaattggaagtgattgttttgggagaagagtgatcgccactgctgtacacagattgtttcgtacttccgttgatatgtgaagccccacagatcctttccctcgtcatggactttggctttcgctgttgaattgaagcctgcacatggcttcctttcttcttcttctttagggcttgtttagattgccaggtatccatatcaatacacatccatgtgttgtacgttaacacacaacatactatattgagttggataatgatcatccaaataagtccttagttttacattatcctatacacgtggattgagttgaatatataatcacccaaatgtaagtcctcagtcgtagttcgttcccgtgataacatttttttgtctccagtgaaaataaggcctattggatctcccatcatcaatc

SEQ ID NO: 20318 - DNA, 1522 bp, Zea Mays
cgggttcccatcgaaccgcatctgagtatctgaccacgtcacacgacaccaccaccagccctccccttcatcaattggagcacggcgcccgttcattcccctctgctccgctgcttgcctccggctccccaattccacgagatctccaattccaccgcgtcgtctctgcatccggaccccataccccgatcgatccctaaggcccatggttttctccgccgccgcgtcgcctctagtagccaccgctgctgactctgcttcctcctgcgtcgcccacctccgctgctgctgtcgcgttagttgctgccgttgttgaagacgcgtagctctttagggttcgcgatttctcgccgatcggttcgagaattggtaagctatggatctctcgcggcccacatcgtcggacctctcgctcgggctccactctcacggtcacgcccacgcccacgctcgcaggcacgcggtagccgcgccgctgcgcctgttcgacgacgcggaggagccgaagccggagcgcgtcggggccggagaggccgacgcggagagggatgacgaggacgggggcgaccagcacttctccctcctcgggcactccctctgcgtcaagcgcccgcgccgcgccggcaacggcggcgggggcggagagacgtcatcctgctcgtccacgtccgcggcgcttcgccctgccaagcgacaggcgacgggggagggcagcggcgcagatctggagacccgccgcgccgcggtccgcgcctggggcaatcagtcgctggcggaggccgacccggacgtgcactcgctgatggagcaggagttggaccgccaggtgcgaggcatcgagctcatagcgtcggaaaacttcgtctgccgcgcggtgctcgatgcactcggcagccacctcactaacaagtactccgagggggccccgggtgctcgctactacggcgggaatcagcacatcgacgccatcgaacggctctgccatgagcgcgctctcaccgccttcggtctcgaccctgcctgctggggcgtcaacgtgcagccctactcgtgcacgtctgccaacttggctgtctacactgggctccttcaacccaaggaccgcatcatggggctggagccaccgtcgggcggccatgttagccatggttactacacgcccagtggcaagaaggtgtcaggtgcctctattttcttcgagagcatgtcgtacaaggtgaacccacagactgggtatattgattacgacaagcttgaagaaagagcaatggatttccaccctaaaattctcatctgtggtgggagctcttaccccagagagtgggactttgcacggatgagattgattgctgataagtgtggtgcggtgcttctttgcgacatggcacatatcagtgggcttgtcgcagcaaagggcaggtgaaataagcattttgttttgctttagcatatgtactagaaggatacccatgtgttgctgcagggatcgtggatggtttcgaatacaatcatttgacttaaa

SEQ ID NO: 20319 - DNA, 612 bp, Zea Mays
ggggggtatacctctttgggacgtgaatcttagagttggtacgtgaccccaagctcaaggggtctacgatcccggatcattgtattgggacgaaggtcgtgatccaaacaatacacaaagctgctgtcatatcttcctccacgaagctgctggatgtaatggctagtcggccggtggggcacgcgccgcatgccacgaagccgcgggcgagtgtgcacgaccagtgtcatgacggcgacggcagatgcggatggccaacggcatgacaatggcggatgtgcacagcctggagcacggcagcgttgtaaaaagctcacctcagcacggaagcaaatgtttatgctcagggcacctaaggtgctcgtcatacaactcaagaggtttgaggggataaatggtggaaagatcaacaggaatatagaattcaaggaggcacttgatctttctgattgcatgtacaataaaaaccaggttgctcattgatgaaaccacatgttaactgccatcagttgctagtttgtttaagatcattgtttccaattatgtggatcaaacttctttaaggtatatgatgtttgaacatcaatacggtttccaacatgcacaaattca

SEQ ID NO: 20320 - DNA, 566 bp, Zea Mays
cagagggcacaactacaaatggggattatctccttccattcaaaacaggtgcttttcttgcaaaggcaccagttcaaccagtcattttgagatatccttacaaaagatttaatgcagcatgggattccatgtcaggggcacgtcatgtatttctgctgctctgtcaatttgtaaattacctagaggtggtccgcttaccagtttactatccttctgagcaagaaaaggatgatcctaagctctatgcaaacaatgtacggaaactgatggcagtggagggaaacttgattctttcagaccttgggctggcggagaagcgagtgtaccatgccgcactgaatgtgatccggtgtgtggcgccaccggtggtgccagagccggacagggacgtcgcggcccccgtgggcggcggtgaccggaaggcggctaagctcgggagctagagcagcatgagcagcaaccgcgacagtaagaagtgaaagagcagcagcagcagcttcgggaggagatccacatccacctgcgaggaaaggcagggggtcttccgcatgctcatgagctggaac

SEQ ID NO: 20321 - DNA, 2256 bp, Zea Mays
atttagtcaggttcataaagacggtccagaaggctggcctgtttgtacatctccgcatcggtccctacatttgtggcgagtggaacttcggcggcttcccagtttggttgaagtatgtaccgggcatcagcttcaggacagacaacgaacctttcaagacggccatgcagggtttcactgagaaaattgtgggaatgatgaagagcgaaaacctctttgcatcccaaggtggcccaattatcctctctcaggcaagtataatcttttccttagatttgattgagaatgagtatgggccagaaggcagggagtttggtgccgcaggtcaggcatatatcaactgggcagcaaagatggcagtcggattgggtactggtgtgccgtgggtgatgtgcaaggaggaggatgcacctgatccagtgatcaatgcatgcaatggtttctactgtgatgcattttctcctaacaaaccttacaagcccacaatgtggactgaagcttggagtggctggttcacggaatttggtgggaccatccgccaacgaccggttgaagatcttgcatttgctgttgctagatttgtacaaaagggtggttcttttatcaattactacatgtatcatggaggaacaaattttgggcgcactgctgggggtcccttcatcacaacaagctatgattatgatgctccaattgatgaatatggacttgttagagaaccaaagcacagtcatcttaaagaactccacagagctgttaagttatgcgagcaggctttggtttctgttgacccagcaattactacccttggtaccatgcaagagctttccttgcaaactacaattctaactcctatgcgaaagttgtgttcaacaatgagcaatacagcctaccaccttggtcgattagcatccttcctgattgcaaaaatgttgtttttaacagtgccacagttggtgttcagacatctcagatgcaaatgtggggagatggtgcctcatcaatgacgtgggagaggtatgatgaggaggttgattctctggcagctgctccattgctcaccacaactggtttgcttgagcagcttaatgtcacgagagacagcagtgattatttgtggtacatcaccagtgttgacataagctcatctgaaaactttctacaaggtggcggcaagcctctgtctctcagtgtgcagtctgctggtcatgccttgcatgtctttgtcaatggacaacttcaaggttctgcttatggtaccagggaagatcgaagaatcaaatataatggcaatgctagccttcgagctggtactaacaaaattgcactgctgagtgttgcctgtggattgccgaatgttggagtgcattatgagacgtggaacactggtgttggtggtcctgttgtgcttcatgggctggatgaaggttcacgagaccttacttggcagacttggtcctatcaggttggcctgaaaggcgaacagatgaatctgaactccatagaaggctcaagctcagttgaatggatgcaagggtcattgatagctcaaaaccagcagccattggcctggtatagggcttactttgagactcccagcggggacgagccattggctttggatatgggtagcatgggcaagggccaaatctggataaatggacaaagcattggacgctactggacagcatatgcagatggggactgcaaagaatgcagttacacgggaaccttccgggcacccaaatgtcaatcaggctgtggtcagcccacgcaacgatggtatcatgtgccaaagtcctggctgcagcccaccagaaacctgctggtagtcttcgaggaacttggtggggattcatcgaagatcgccctagtgaagaggtcagtctcaagtgtctgtgctgatgtatctgaggatcacccaaacatcaagaactggcagatcgaaagctacggcgagcgcgagtaccacagggcccaaagtgcacttaagatgtgcacgtgggcagtccatttccgcaatcaaattcgcaagctttgggacacctacgggaacctgtggagatttccagcaaggagattgccactcagctaactctcacacagtcctagagaagaaatgcattgggctccaaagatgcgtcgtcgccatctcccccgagagctttggaggagacccctgcccgagcgtgacgaaaagggtggcggtccaggcagtatgttctcccgtcgcgtagccttacttctccaagcaat

SEQ ID NO: 20322 - DNA, 2638 bp, Zea Mays
catcacacactacgcacggacgacatcgaggaaccctagactagagcacattgcacgggcgacggcgcgccaccggtgactggcgtcccctcctcggtcctcactccccagcatggcgacgccctgccgcagcagaaacgatcaaccgatcggaaaacattaatttgtattcgatttgaaagcgcacccggcacctgctccgttcctgcgctgcttggcttccggtctgtgtcaaagcttgcatctcacgcgagtcgcacaaggacgaaccctatacagctccaggaggtcggtgccctagccacctaggccaccttcctggagaccgggcggcgacgacggggacgaacgaccgcgatgggcttcgagcgtgtggagctgcggtgtcccagggagctggacccacggccgagctggacgctcggcgatgtgctcgctgagcttgacgcgctggatgccacccgccgcgctgcgccacccacgcccctgaagcagccgccggattgggctaacggtggtggtgagaaggcctttgtgatgcgggttgatgacgacgacgaagacgacacagaagatgaagacgatggtacaagtggtgggaagtcccgggctctggtggccaaaggagcaaggttctcgtgtaatgatcttgcatcaagtgattcagaggatgaattagatggtcaggttgccccataccacttaatggagaaaagggacctagcgaagagcattcttcttgagctggaacacgagcatcatctaaaagttcaagaagaagttagaagtaagctagcttcattggaggtatgccaccaaaatgaaattcggagaacgatctctgcatttgcccgacttcagaaatatgcagaatcaagaaaggagatagacagaagacttgatgtacacttccagagaagaattgcagaagtactcgataaacacttatctatggtccaaagggatcatgaacaaaaatcccagattgttgaacgccgaataagagatgatgcagctcttgaagaagctaaaagaaaagagcaagctgtcaaggaagaaaagttaaggcaggaaagagcccagcaagaagcagaggctagacagaaggaagctgcaaaattagcagctgaagcacgaaaaacagcatttgaggctgctaaaaaggaagcagcagaaaaggaagcagcagaaaaggaggctgctaaattgagagatgcagcagcttctcaacctagtccgaattcccagaataatactgcagaaggcattaaagtttttggcgataaatacgcactagaagcagagtcacggaggcatgcattagtacagaatcaagtgccagaaaacattcatcacagcaaggaattcagcaaatatgaccgacaaattgccaaatccataagtaaacttatgccaactactgacagtgtcagaacaagggctagtgagcttgttaaagctttaaatggacaggattgtccccgtccaatctcttgttgtctatttgctaacaagattatttccattgtcaagagtagaaatacaaaggacaagacctttggaaatttggcctttgcgtgtggatatgtcatgctattagttacaaatcaggtaccagacgcaatggattatcttttagctgagttcaacagagtttgcatatacacggttccaaagcatatgcatgctttgaatgcacaagcacgaaatagagattattacagactgataggttaccaggaagaaaatggacagctcgagagcactgaaagttatctaacatacgtcgttgcatatgttaaactctacgcagcaatgattcagacggaaatcaaaggtgttcgtcatcctcatggtttagctgagggatggaagtggcttgccatgttcctcaattctctcccagctactacagccactgcatgtgcccttcacgctttcctcaagatggctggttttgcacttcacaagaaatatgggtcacagttcatgaaaatcctggatgtaatatcacggtgctttttaccagctttgaaggaacaaggcaacaagatgcaggctgaggctgtcaacaatctacagaattacctgaacgacaagatctacctggaggaaccagaagggcagtacctcgtccagcaactactatccaaggagttgttcatgtaaagatcaaaacaccagatcggtatgagacatcgtgtgtgatcgtctgaagggcggtacctcgtccaagctaccactatcgcaagaggggcctcatgtagagatgaaagcaccagatcgatatggagctgttcgtgtttcagaaacacgatcgagcctttcaaatctcacgaacattatttatgggacagtcccccagatcatttcccccctctgcacgggatcctgacgatgtatttgtttatgtgacttgtatccggccaaggacaggtatgataggttgaggttttatgtttgttgtagttgtacatgtactactagaatcgtgaccagaacaaaataatactcgaccacttcggcgtgggcccagcggtggccaaagtcaaggtcaacttgacacgcgacactttgtctactctgtttgcaatgaaatctaatgtttgtgcttcaaacaaaatagttttaatataaa

SEQ ID NO: 20323 - DNA, 2499 bp, Zea Mays
tttcttgcgcaattgctcgcccttgctgacgaggagcagcacctcatactgaagcagcacccaggaggggcggaggcggcaacaccaacaccaacaccacaggccgccgccgcgcctcgagctggctatggcgcacgcgcggggcggcgggggccacggccacggccacgaggaggaagcggaggcggccgtctgcctggacggcgactccgaggcgggcgaagcgcgcagcgcggggcgcgcgccgccgtggcgggaccagctgacggcgcgcgggatggtggcgagcctcgccgtcggcgccatgtacagcgtcatcgtcatgaagctgggcctcaccacagggctcgtccccacgctcaacgtctccgccgcgctcatcgccttcgtcatcctccgcgggtggacgcaggcgctcgcccgcttcggcgtcgctacgcgcccgttcacccgccaggagaacaccgtcgtccagacatgcgccgtcgcctgctacagcatcgccgtcggaggtgggtttggctccttcttgcttgctctgaacaagaggacctacgagatggctggggaggacacggaaggcaaccttccgggaagctacaaggagcctggcattggctggatgaccggcttcctcttcgccgtaagcttcgtcgggattgttgcgctaatacctctaaggaagatttttcttcgatttcagtctaacatatgttggcgctgggatgatttgctctcacctcgttaatctatctctccttcttggtgcacttctctcatggggaataatgtggccactggtcagtgatttgaaaggggattggtatcctgcagatatgccagaaagcagcatgagaagcctgcaaggttacaaggccttcatctgcatagcgctcctcttgggcgatggtctttacaattttgttaaggttgttgcattcactgttaagagtctacttggcagatcaagactgaagaatgcaaagaaagaggaagacattccagtgcttgatgaaattcagcgcaatgagatttttacaagagacagtatccccacatggctagcctactctggatatcttgcactatcagctgttgctgtgtttgccattcccttgatgttccatgagatgaaatggtcgcgctctttattcttgcggcctgggctgggaaggactctggtgttgtagctggcctagtgggttgtggtttggtgaaatcactggtgtcaatatccgctgatctgatgcatgacttcaagactggacatcttacattaacatcacctagatcaatgattattgctcaggctattggcactgccatgggctgtgtcattggaccactgacatttttactgttctacaaggcttttgacattggaaaccctgatgggtactggaaggcaccatatgctctaatctaccgcaatatggcaattcttggtgtccagggcttctctgctctgcccctgcattgtttgcagctgtgctacggattctttggatttgcagtggcagccaatctgatgagggacctcttgccaccaaagtacggcaaatgggttccattaccaatggcaatgggggttcccttcctagttggtgcgagctttgccatcgacatgtgtgtggggagcttgatggtcttcatctggcacatcattgacagaagtaaagcatctttaatggtgccagcagttgcatctgggttgatatgtggcgatgggctttggatcttccctgaatccttgcttgccttggccaagatcagtccaccattgtgcatggcattcaggtcttcacactagagtaacaaaatgctcgacatctgagaacagttccatgtccaatcggagaagctgttggcatgccaagtttgttattaattagctgggatatgatacatgcaggtaggtaaagatgcagtgcctatctggatgttacctacatataatgacgtaatgtggtacccctgtaaaatttatcatatgcaagatgatacatcacattagagcaatggtaagtttgagaatttcaccccagtggtaatggatggatgcaagagctagcagtagccaaaattttgcaccataggttgtacccccacccctatagtttaatatggaaccacaagctacagtatacaaaccatcttccaaagacagctgaccctattgtcaatcacagctggttttggtaaaagaaaaatgcagtcaaatcttgcatgaatggttagcaaatcatgtatatatttatgtatgtctttgccataacttggattcacaagatgcaatgtagtaagaggcatcttggtcaggcatctgatacaattgtaaaatcatctgctgcgtccttttatcataaacaaaatcatcaggtgatgtatgcctatgaatagttagcaaaaggtacatatatggttatgtatattaaacacgttctgtgaagaagaaatgtaaccattcaacaagaacaatccaatgatacatttgtcagc

SEQ ID NO: 20324 - DNA, 440 bp, Zea Mays
tgtcctcccacagcagatcagacagcgccggcatcagcttcccaaccgtctccgatgggtttgccgtcccactcgacgacgggcagcacggggaggccgctgccgacgaacgccatctcggcgctgcgcttggcgtcctcggctgtgatgtccctggtgctgacgcccgcgagcaggccggcgtccacgaggcgaggcgccagcgcgagcatcctcttggccgtgcacccgctgaggatcttgtcgaaggccgggagcacgagctcccgctcgggcgtcacgaacgccacgttcaccatggggccctcggccacgtacccttggtcgtccacccacacggacgcgaaggcgccgcggtcctcggcgtccatgatggacagcacgttgggaaggtagttcacgttcttcacggtcgcgaactgcggcggcttcatgggcac

SEQ ID NO: 20325 - DNA, 4429 bp, Zea Mays
ctctctctcctcagccccagtcgaggagacgccgctgcggctctcgtcccatgttccaatgattgttaggtgattgagacttgagagggtctggaggctaccaactggtttggtggctcggccaagccgagcggttccacgctgttcttgccgcctggtgccggagtttctatgtcgaaggctgtgttcggagtttctgcgttgaaggcggtgttctgctgattggagaaactggtttggtgcggatgtttgatgccgtgttggttatagggaccgggagggtgggtgctggcatgaatttggttttctgtcgattcaattggtgcttaatttgagcctttggaggctttttgggatcagggagttggtctccgtcgaaggaggctgctagcttgcaggctcatcgccattggcgccggacctgcctgtcgtacggtctttcctgtgccgaagtttttgctgctgtgaaaacgctttaagcgattacctttggcgacctttccatgcaaaggcttgaccttttgggttccggaactgattggtggtcgaggagtcttggagtgctggtctacctgcattatcaacagggcatttctgcagaacaaaagttgtatcctgtgcagatagccagatactgctttgctagtgtattaaattgcttcttgtgtttgaacaaagattctattcagccagaagacagtgctcttctttatatcctgtccggagctcaatacagtgctccaaatccatatcagcctgctaggagtggataaggatctttgcctcaacgagtggagcaaaaccatggatgtgcctacgcctcccaaccgtgccggctgcaacagtaacatcagcaacatcggcagccccatgcaatcttttgatgatccctttggtggtgctgccatgacgagctttgatggatactcggagctcagcagcccatcagttgctgatcacatattctccctgctgaatgatccctcgtctgtgcaacatatgtttgccttgtggtcatcttcggggtcatctccgcgtgcttctgctgtgagagaagacatgtcgtttgacacctatcctggacctatggacgtgacagcatcacttgctcaaaggatcaactcagcatcagtattcaatccaactgaagtggacagaggactaaaagactcagatgggcttgttccaaataatggttcacaacaagggagtagcatcattccgaggtcggttggcaacattcttgcagacaggatgctcatggcgctatctttgttcaggaagtcattgagcgatggtgttcttgcccaagtctggatgcctgttgagcacaatggtcgtgtcgtgttgagtacatccgagcagccctatttacttgaccaggatcttgcaggttacagagaagtttctagaaatttcttgttttcagttaaggaggagcctggtctgcacctagggcttccagggagggtcttcatatctggggtgccagagtggacctcaagtgttacgtattacagtaagccagagtatttgagaatggagcatgctcttcttcatgaaatacgagggtcacttgctatgccagtttatgatcccagcaagggttcttgttgtgcagttcttgaacttgtcacaaacaaggagaaacctgattttgatgcagagatggacattgtttgtgatgccttgcagggtgtgaacttgcagacaacaacagatcgcagcaatcagaaggtttactctgaaaatcagaaatatgcttctacagagattttggatgttctaagagctatttgccatgcacatatgcttcctttggcccttacatggatccctacatcaaacggcaccgctaatggtttttgtgtcgcaaagaatatcaggcttgattcgcaaccaggaaaatcagtacttcgtatccatgaatcagcttgttatgttaacgatgcaaagatgcagggatttcttcatgcatgtgctgaacgtcatcttgagaaagggcagggtattgcaggccgagcccttaaatctaatcttccattcttttcgcctgatataagagagtacagtatcgaagactacccgcttgcacaccatgctcgtaagtttggtctgcatgctgctgtagccatccgactgaggagtacgtacactggtaaggatgactacatactagaattctttctcccagtcaactgcaagggctgtggagagcagcagatgttattaaacagcctttccagcacaatgcaaagaatatgcaaaagcttgcgaacagtttctgaagcagagaccgatagtgttagtgctactgaaccaatgtatgagaagactaatggaagttgtttaccaactggtaactctgaaagttcctcacatgatgaccagccaatcacagaatctgcattccatgatctatcttcgggtgacaaacaaggagacagagaacctgctaaggcacggagtagctcaaagcgagttgcagagaaaaaacgcagtacatctgaaaagaattttagtctggatgttcttcgcaaatacttttctgggagcctcagggatgctgcaatgagccttggcgtttgtccaacaactttgaaacgaatatgcagacaacatggaatttccagatggccatctcgaaagataaacaaggtcaaccgttcactgaagaagatcgagaaggtcatcaaatcggttcatggtgtggacagatccttgcagtacgatcctgccactggatctcttgttccagcaacctcccttccggataagatgcctacctcatctgcgggcgtaaaaacagtggaggaaaaatctagcccagaaccaggacaggatttctcttcgcctgatggatggcaaagagaaagtagccaacttcatgcctccagtatacctacaagggtaggtgatgaagtccaaatgctggcaatcaacaacgaaggcagcaggaactatgcttctggtatcgcaaatatcgcgcagcattcaaactccgaagacgcacacggtcctttatatcccgtcggtgctgttaattcttcgcgtaccggagaaacaggctacatcgattctccaacctccctccacatggatagcgtcgaaggccaaacaacggtgagggactcaagatctgtacagcaagcagatgtcaccatggccaccaaggagcagacccttccctccacctctggcacaaccgattcttcgagcggcagcgcctcaagtcagcctgctttcaaggggaacccaggacgtgccctcaaagttagcagcagcgatgcactgacggtgaaagctacctgtaacggcgacaccgtgcggttcaagttcctgccggcaatgggctggtaccacctgctggaagaggtagcgaagaggtttaagctggcgacaggagcgttccagctcaaatacaaggacgacgaggacgagtgggtgatcctggcgaacgacgccgacctccaggagtgcgtggacgtcctggactcgatcggctcgcgcagcgtgaagctgcaggtgcgcgacctcccctgcctcgtcagcagctcgggcagcagcagctgctgcttgcaggtggaaggaagcgcctagctcatgacggcaggacggaagcctgggtcatggcacgttgactgttgtagtaggttttagccttctgctgtcgccgtaatggatccatgtctacgctcaatacaaaatggcgagtgcagaaaaggagaagtgtaatactcgtcgcacggctgaaacaatgccgtgaaggccttgccataatctgttgtttgttcacaaaagtcgtggcaataatctgttgccatgaatatgggaggttttaagacgcgacaccaagtttctgagcttgctgtgttccgaattttcagaatctagttctctccggatcccgtcggtctgtatgatcggcgatttgcggctatgatatagcctgcagcgtttacagaaccatgtggacgtgatgcagtttggagtcggtttcgagaaatcttttctccgatatcctacgactacgagtgacagcctgacgttttggctttgagtgcggggagtggaggttggtttccagtcgtgtcgcggcgcctgggcgtgccgttgaaggcgtggtgcagctcgtgagtctggacgggatagctactatttgtattcagactgatcagaagccgtccaacttggaagaattacagttcgcagaaagtttccgcggtagggaacggctgcactgccaattcgcgtgaaactggggaactttgtactatggtggaggacctggaggtagtttaatcgtggtagagaactcgacggctcgaggagctggagtggcttacagtgtaattcttgtctgttgtctcactggccatggcgcttgtgcagcttactctgtctccagtagatcgtacacatggtcgtg

SEQ ID NO: 20326 - DNA, 179 bp, Zea Mays
gcttgcgaccggtatctttattccacgcacaatcatgaaacaacaactcgcaacgtcaccatcttcgtggcgagaatgtggagcataggacaaacagtatgcaacagcatcgtttccgccagctcgtagccgctgtacctgtcgtctttacaatagctgcagcctgcagggtagttagg

SEQ ID NO: 20327 - DNA, 2102 bp, Zea Mays
acacaccaccaccacccacacaaattagaggattggtgccttgctccctcccccttcttgtcgttgctccaccctctcttcttttattattgggttctttttttctctctctccccttggatttgcgcttgtgctcgtctggccgcatactagtatccgcaccagagaggagacacctccgactccgacctgctcttgcatatagattgggcagagagtgagagagcgcgcgcgcgctcaaggggtgccaaaaggagattttttttttaatccagcttcttagcctcactgtctttgatcccggagagcagccgccagcccaactaatccttgctgctggcgcgccggggctccgattgcgctccagatctgaggcacctgctcggtggattccaggaatccgagcaccaactcgacaggggagttctcagggtaaaggaagaggctgagagcgcgttggagatttggactataagagcgagcgagcgagctgggtgccttgctgccttgaggacgccgtcaagaaaccgcgtggaggggagggcgatgagatgagggatgctggccgcggtgatggactacttcagcacctgctggggcccgcggtctcgtgcggggcaccggggcaagggctccgacgccgccggccggcaggacggcctcctctggtacaaggacgccgggcagctcgtcaccggggggttctccatggccgtggtgcaggccaaccagctgcttgaggaccagagccaggtggagtccggatcgctctccctggctgactacggcccgcagggcaccttcgtcggcgtctatgatggccatggcggcccggagacgtcccggttcatcaatgaccacctcttcaaccatctcaggagatttgcaactgagcacaagtccatgtcagcagacgtgatccggaaagctttccaagaaactgaggagggctttctttctctagtcatcaaggaatggtctttcaagcctcagattgcatcagttggctcctgttgccttgttggtgtaatctgtgctgggactctctatgttgcaaacctgggcgactcgcgtgcagttcttggaaggcttgtgaaagcaactggagaggttctggccactcagttgtcagcggagcacaatgcatgctatgaagaagttagacaagagctgcagtcatcacatcctgatgatccacgtattgtggttctcaaacataacgtttggcgagtgaagggtctcatccagatctcaagatctatcggagatgtatatctaaagaaaccggagtataacagagaacctcttcacagcaagtttcggcttcgagaaaccttccagaagccgattcttagttctgaacctcaaattactgaacaccgaatacagccaaacgatcagtttgttatatttgcttccgatggtctatgggagcacctcagcaatcaggaagctgttgaccttgtccaaagtagtccccgtaatggaatcgctcggagactagtgaaagccgcgatgcaagaagctgccaagaagagggagatgagatactcagacctcaagaagatcgaccgtggcgtgaggaggcatttccacgacgatataaccgtcgtcgtggtgttcctcgactcggatgccatgagcaaagctagctggagcaagagcccctcggtttctctccgagggggcggcgtcacccttcccgccaagtccctcgcacccttctcggctccggcacagttgaacggcacccactgaagctgctactgctcttgaaaagaagggcacagtgcagatctgctagagatgatgagagaagcagcaatcaagtgtagctgttgctcgtacacctgctgtgctgttgctgtttgcaaagctgccgtcttgactccgcctggtggctgtaaatttgtccagaacatgttttccctaatagcccatcatatcccgctctttttcttgttgatatgaccaaggctggcagcatcgctgctcaagataatgtttggggcgcatgatttgaccagtccgaatcattacttttgatgatgtgttgtagcatcacgttactctcaacaaggttagcagcgtcagtgaattga

SEQ ID NO: 20328 - DNA, 1397 bp, Zea Mays
tgcaacagatgcagggtccagcagaaacaacgatgaaaattcatctctgaccactggggctgacgcagaggatggtacatcggctgaagatttggaggaggccaaaaagaccatgccagttgcagggaagattaatgtcactccagtggaggagaaaacaagtgaagaagaacctgtagtctatgccactaagatggaagcaaaaaatgcgttcaagtccctgcttgagtcggtaaatgtggagtctgattggacatgggatcagactatgagagtcatcataaatgacaaaagatatggtgctttgaaaactcttggagagagaaagcaagctttcaatgagtacttgaaccagcgcaaaaagtttgaagccgaagaaaaacgtatcaaacagaggaaagcacgtgatgatttccttgcaatgttggaagaacgcaaggagcttacatcatcaacaagatggagcaaagcaatacttatgtttgaagatgatgaaagattcaaagcagttgaacgtccaagggagcgtgaagatttatttgagaactatcttgtggaactgcataagaaggaaaaagccaaggctgctgaagaacacaaaagatatgtagcagaatacagagcttttctagaatcatgtgacttcatcaaggcaagtactcagtggagaaaagttcaggaacgtctggaggacgatgaacgttattcccgacttgagaagtttgatcggttggatatttttcaagtaattattttcctaactttctgtcaacttatgcttttttgtggttctggttcaattatacgttttgtattttgaaggagtacattcgacacctagagaaagaagaggaagagcagaagcgggtacaaaaggatcaagtgagaagacaagagaggaaaaaccgtgatgggtttcgtaaaatgctggaagaacatgttgctgatggcacacttaatgcaagaactcggtggcgtgattactgtgcacagataaaagattcacagtcctacttggctgtagcgtcaaacacatctggctctacaccgaaagagttatttgatgacgtgatcgaggaacttgacaaacagtatcaagaagacaagacccaaattaaagaagtggtgaaatctggaaagattcctatgacaacatcatggacattagaggaattccaaactgctattctggaggatgatgctcttaaaggaatatcaaccatcaacatcaagcttatctatgatgatcagcttgaaaggctcaaggaaaaagagcaaaaggaggctaagaagcgccagcgtttgggtgaaaatttttcagatcttttgtattccatcaagaaaccatatcatatctgtgctctgtccaagcataccatatttggatggcagaatct

SEQ ID NO: 20329 - DNA, 1573 bp, Zea Mays
cgcgcgcatccgcaccacggcgccccatccctcccgtcagcgtcgctgcctgcctgcctgcctgcgtccgctcgcaactgcaacgacagggaggcgcgcggggagggagagggacaaaccgagaaaggcacggcacagctgcctgcctcggccctcggcacgcgctcgcgccctggtgactggtgaacactgaggactggaggcggtgggcgcggcgggtccagccaccgcgcggttcacggcggggcgcggcgcgggcgaatgccggccgtttcaacggcgggcggatcggcctgttcccctggcgctgctggcgccccccctaggcggtgactgcgaggcccgatcctgaggcgggcggcgactccgagagggcggttggctggttttcttgccaagtgccagtcagtctctctcgtctcggcgacgccgcgcgaaggtcggaactcggaatcctcttcccggcgtcgtcatcccacccccgtcggttcccttctaactcctggctcctggggccgccgccgagccgaggagaggcgcacgcgcctcgggaatggagctggcgcctccgctccgcctacgggatccgagcctgggatggcttcctgcaacttgcgcaggtaacaaagctgctggaagaaccccattggactgggagaccagggtgaagatagctctgggcactgcacgcggaatggcttatcttcactccgtgggtagcggcgggaagttcattcacgggaacatcaagtcaagcaacatccttctctcacaggaactcggcgcctgcgtcaccgagttcggccttgcccagctcatgtccacgccccacgtccacccgcggctcgtcgggtaccggtcgcccgaggtcctcgagaccaggaaaccgacgcagaaatctgacgtctacagcttcggcgtcctcctcctcgagatgctcacaggcaaagcccctctcaggtcccccgggcgcgacgactccatcgaacacctcccgaggtgggtgcagtccgtggtccgggaggagtggacgtcggaggtcttcgacgtcgacctgctgaggcacccgaacctagaggacgagatggtccagatgctccacgtcgcgatggcatgcgtcgcggtcgtccccgacgagcggcctcggatggaggaggtggtcggcaggatcgaggagatccggagctcctactcggacacgaagacgtccccggaggacaatccgagggagggcgctttctaataaatcaccgagtaccacacgtaccggaacggcagtgacttgccgtctacagaaagtaggtcggttggtttgacagctctgtgtccagtgaagctttgcagtcagtcagttgattattcctgatcattctttggtaaaagttgttttctgttcttggttccatgaggtagccccggaacgctggtggtggtttcgtttcattagcgctgctgattactgtagggtgttgtttgtggatcgtgccgcgactcggtttcgtattcgtttgaggcagcccgactctttcaagtttgatttattgaatgcgcataagtttttgccactttcctg

SEQ ID NO: 20330 - DNA, 2003 bp, Zea Mays
gcggcgtcggcccggcatttgggggcccttctgttgttcgttgccggagaatggcgccgccgaagatgacggcagcggcgtgccggtgttcgccgagtacagcctcgccgagctccgggtggccaccgacggcttcgccaccgaccgcatcgtgtcggagcacggcgagaaggcgcccaacgtggtctaccgcggcacgctcttcagctccggccgcaccgtcgccatcaagcgcttcggccgctccgcctggccggactcacgacagttcctggaggaggcgagggctgttgggcagctgcgcagtcgccggctggccaatctgatcggttgctgctacgagagcggcgagcgtctcctcgtcgccgagttcatgccgcacgagaccttggcaaagcatcttttccactgggagacaaatccgttgagttgggcaatgaggacgagggctgcattttatgtggcacaggcgttggaatactgcagtagcaaagggagggcactctatcatgacctgcatgcatacagggtcgtcttcgatgcggtgggtctttacttgttcgcgttagttgcttttctgagttttgatacaaagcattaacctttttgtgttttgattgtgggccaattttataggaaggtaacccaagactatcatgttttggtctgatgaagaacagccgtgatggaaagagctacagtactaatttggccttcacgcctcctgagtatcttaagacaggcagagtaagtcctgagagtgtggtttacagttttggcactgtcttgcttgatctcctgagtggaaagcacattccaccaagtcatgcactcgaccttataagagggaagaactttctagtgctgatggattcttgcttggaaggtcatgtatccagctccgatggaactgacttgatgcgattagcatcccgctgcttgcaatatgaagcacgtgaccggccaaatttgaaaacggtggtatccggtctcgaatgtctccagaaagatgtttctactccttcacacactttgctggggatccaacatgataataaaaactcagatcgaatttctttatccgctattgggaaagcttttgccagagcagacctgaatgaggtgcacgaaatattactgcatgatggatatgatgaggatgacactgctaatgctgagctatctctccagtcatggaatgatgatgtatctgagagctttgttgttaagaggcatgcagacaacgcctttaggtctaaggattactcgactgcaattgagtgttactcaaggttcatcgactcaggtgcaggggtggctccaaccatgctggggcggagatgcttcgcatatgtggtggctggcaacccacaggaaggccttgaggatgcaaagagagccgaggttattgcatcggactggccgatgggacactacctgcaggccttggcacttcacaacctgggaagggaggctgaaagccaagaagcactgaagaatggcactgccttggaagctgcaatgaatagtagagctagaactgtatagccctgaatttgtgataccctgtcctgcttgtacctagatcgcctccctccaatgcttcgtcaccagtaggggctgtttttggtattccctaacttgtatcggtatttcccctagtttcacaagtcgaaaaaactcctaggggctagtttggatactttgggattagagtgttttgaagggattggagagggtgtaaatccctaatagatcaaatactctctcaatacatctcaatccactccaatcccactcgttactagagtatccaaactaggcctaggctggctgttgttacacctccaatatatttatgaatacaggaatgggcaactagcattctgttgatgtgagtttgtaaagtgagagtttctatttatttcaacaaattcatgtacatacacacttttgaaccctgcaacttaagatatttgaggtcaggcaaacttcaactctgg

SEQ ID NO: 20331 - DNA, 1201 bp, Zea Mays
agtgataattccgtcgcatttgttttcttcacggctcctcctatagagccgttggatagtcaactgagcttagatgatctagacgttataaaagtgatatcgggaaaggtagcagcggaaatgtgcaattggtccgccacaaatttactggccagttttttgctctgaaggttattcaactaaatattgatgagagtatacgcaaacagattgccaaggagttgaagataaacttatcaacacagtgccaatatgttgttgtgttctatcagtgtttctatttcaatggtgccatttctattgttttggaatacatggatggtggctcccttgcagatttcctgaagactgttaaaaccattccagaggcctacctcgctgctatctgtacgcagatgctaaaaggactgatctatttgcataacgagaagcgcgttatacaccgagatctgaaaccatcaaatatattgataaatcataggggtgaagtaaaaatatcagattttggtgtgagtgccattatatctagttcctcttcgcaacgagatacatttattggcacacgcaactacatggcgccagaaagaatcgatggaaagaaacatggttctatgagtgatatctggagtttgggactagtgatactggaatgtgcaaccggcatctttccatttcctccttgtgaaagcttctacgaacttctcgtggctgttgttgatcaaccgccaccttctgcgccgccggatcagttttcaccagaattctgtgggttcatttctgcatgtctccagaaggatgctaatgacaggtcatcagcccaagccttattggaccatccgttcctgagcatgtatgatgacctgcatgtagatcttgcttcgtacttcacgacagcaggatctcctctcgccaccttcaagtcggtgattggctccatcactttacatatatgacatacatgtacagccttttaggataaaaatgagcactgaagttttgcctatctgtatatcggcagcaaacgtttggtcatgtttgtttcaccttgtaatgtattgactcagatatgggattggtcattgtctcatttggtgtatgagtcaagtccagattttcttgtatcctgattttttttttgtttagggttagtttgggaacctaattttcccaatagattttcatttttccaaggaaaattagt

SEQ ID NO: 20332 - DNA, 2858 bp, Zea Mays
caaaatggcccgggccagcctgcaagaaaaaacttagggttgcaagaaaaaccccagctcctttccttgtattgtcggaaatcactgtctcccctccctaccttcgcaagtttgcgcctaaaccctagctcgcttcccaatggcgccgaagaagcgcaaggccgatcccgccgagtccgccgacgctgcggaggcagccgccggcaaccaccgccaggagccagcgccctcggagcccaagccccgcgccaccatctacttccccatcaccgacgacccgccggagcccgccgccgaggaggacgaggaggatggcgctggcgaagacgaggacgacgtggaggacatcggcaagctgctcgagccactgtcgcgggagcagctcgtcgcgctgctccgcacggcggcggagacgagccccgctacgatggcggccgtgcgccgcgccgtggagtcggaccccgccagcaggaagctctttgtccacggcctcggctggggcgccagcgccgaggacctccgctccgccttctcatgcttcggcgagctcgaggactgccgcgtcatctctgacaagcagtccggcagatccaagggctatgggttcgtcctcttccgctcccgccgctctgcactccgcgccctcagccgcccccagctccaaatcgggggccgtcttgctttctgccacctcgccgcctcaggccccgcgcccccagcttctcagtctcagaaccctagctccaacccaaacaccaatgccaactctaactccaataccaccaccaatgcttctggctcatcatcgtcgcaacctgacaatatgccgcgcaagatatttgttggtaatgtgcatgctgatgtggacgtggaccgcctatataactattttgcacaattcggtgagattgaagagggtccgtttggctttgacaagaacactggcaaaccaaaaggattcgcattgtttgtttacaagtctgtggagagtgctcgccgtgctttggaggagccaatgaagaattttgatggcaagacgctcaatgtgcagaaagccatagatgggaggaccaagggctcatctggaacgaatacaaatgctaactccaatcccactactgcatctgtggctgctgctgcagctgctgcgcagatgactgctcctgccactgccgccattagcccatatgatccatcggcatatggtgccactgcggttcctgacatgagttttgcacaacaagccgctatgctgggatttggtgcacagcaacaggcattcgctcaacccaatgcaatgcttgccatgatagcggcaatgcagaacccagctgcactagggatgacaccagccatgtttgctgctatgaacccagccttcgccgctgctgctttaggtgcaggcgggcagcaggcacagacagctggtcttacgggctttggagctcagggttttgggacgcaggcatttggagctggaggtgcagttttcccaaatgcagcaggtgttcaagcagcaacagctgcatatcaaggaggtggggctcctcctggttttcaagggccacctggatttcaggttggccaagcaactacccagacaagcactgcagtggcagcagctggttatcaggctggggcagctgggcagggccaggtgcctggtgctcagattggaggcactggttttcagggtggatattgacagaactagggccctcctatctgtggtgtgccgccggactcgaagatgagcaataagcttgaacctgttgatgctggcgatgaagatgatggtgactctgggcagggtgaggagggcatctcagcgggcggagggatatgacaacctaaagggcaacgagaacaggagaagcgaagaggtgatgccaaggaaaacggtgaagaggattgaggaagaagtggaagaccaggaagatagtggcggcagcggcgacgacaatggggatggccatgacgaggagggtgtacatgaggaaggtggcgacaaagagatagatgatgatgacgacgacacactccagcccctaaagaagccgaagaagtgaagatcttcgctccgattagttaccatgtgctgaaaatttaggaagaaggagaaaattagtttattttcacctaaatttcctccgatctccaagaggatttgaatttctaaactatcctaaaatggctccacacgttcaacagcacgtgtgtgggcttgtaggagctttatgatttgaggcaattagggagattgaaattgcctttttcatcccgtatggaatcaaacgatcaatgatgcagccctggttgccttcaacttcattaatggttgccttcaacatcatggcagcttcatgtgaatcgtacgtttgtactataccttcaaatctcaactgatgtaacggaattctgacaggatacgaaaaacgctgatgcatggttagcattggaggaaaggagagtgagtaatatggagaagaaagtggatcttcggcgaagaatgttggagctaagaaagatgagcagatacgaggttaagttacattgttactcgataccgagaaactgactccgttggctcgtcgctactacatcaagaagcgaaagcagatagccgcagcggctggagttaaagttgacgatgaggagtgactgatgtgaagtactagctgttttactattgtttatccttttaccttttatttttagggctagtttggaaaccctatttttcaaagagattttcattttcctaacgtcccgtttaaatcattagaattgaatttcattctaatactagtaattttggcatatatcaattaagctaattcagttttatgcaaaatata

SEQ ID NO: 20333 - DNA, 644 bp, Zea Mays
atcaacactcaaaataaattgattctgaaacattaacacgaggcactcaatgtaattcgactttttataaatagtactccaaaggataacacgctatacaaaaaaaggctataagcatcctgtacggcgtggtcgcgtggaaagcatatgaggcggccacaccatggcgactatcttctgttaggatcgaaccaacggcagtcgttctactcagggaatcggccccaagtcaaaagtcctggcccccaaaatagaggaaaggaaatagcctaaccgttcgagattggtgaggcggatggaagggagcatgaatacctgggcttgagcgaggtatgcgcggcgaggtcgcgggacaagtacttctgggaggggccgaaaatgcgagtgcccccctgctcgttgccgcccttggccggcgcctaggtggggcacgtcgccgtcgtcatctgcaaaccctagccagcaagggaagctgtagacacgagaggagaggagaggagaggagaggatggagacgacgcgaaaggaggagagaggcgacgcggtcgggttgtcagatggcttgacttcacaggtctcctatatcctatccgagtagaaaattgtcaatttgggtcaatctaagagcattaacctataaaaat

SEQ ID NO: 20334 - DNA, 576 bp, Zea Mays
atctttctagaaggattttgcagaaggattttgcttggcatcaaggaacagtgcaaactagaagaaacccccgtcatcagcgacctctccccaacggcgccgacgatggcgcaacagcagacgcagctaaccactggctcgggcatcctggatgccgtcccgctcttcgtcgtcatcctcctcgcggcccacgtcctggccctcgtgttctggatgtacaagctggcttccgagaagcaaccaccccggaggaagacacagtgacggcgccgatctacgccatcggcgatccttcgctagcctctttatcgggaatacgcgataatcatgaattgcaacatctttatctatgtctgtatttatgtttctgttgttagtacatgtgtctgaatatgacctgaacattttgatacttcagctgtaatgtgcgttcctccttttctctacatttttagttggtggcatgtgatacttgtcgcatttaacaattttgacgtgcaaataccattatatttagcaagtagtagccatgtatactttgtggcatgcttcgttgtagaagctgttcaatcccac

SEQ ID NO: 20335 - DNA, 148 bp, Zea Mays
aaggtactggacgaggtgcggccgagccccgatggcggacggcagcaacacggcgctgcacgagatcgatggcctcgtcttcatgctcaagctgcaggaggcatgcggctcctgcacctgctccaccatgacgctcacgattgatcat

SEQ ID NO: 20336 - DNA, 2208 bp, Zea Mays
agttgacagaaaggggtgctatttcttctgttattgagataatggcagccaaagggaaactttctgaaaagcctgtttctgacgagtcaccacaggaaacttcaaaggtagaccaaaatgtcaattgcctaggccaagaaggtagtagtccaaacagtactccgacaaccgccattagcaatggtgctgctccagttgacaatgtcaaatctccagatggaccagattcttcaaaacagaagcaagaactgacttctggtgacgagcagacaccagattcttctaaacagaagcaagaactgacttctggtgatgagcagacaccagattcttctaaacagaagccagaactgacttctcttgacaagcagaccaaaagttctgagcaattgatatcttgtgaccaagaagtacgagaaccagtgactgttgaaactgaaaagctatctgatgtcaattcaaagaaagatcacaagctttgttcttccattggatctgagatggctgaacaatcaaaggttgttaaagacaatgagagtatagtagcatctgaggagttatccccagggacaaatgatgttgataaaaagcagataacagagaccggcaatataactactgaggaatcatcaaaaccaagtgatactaagcctgctgtggttaagccaaagagaggccgacctccagcagcaaagtctcaggagaaaaagcctgctggaaagaaacatgcatcagacctaaaatctgcaaaacttgatcctatcactgattctggagggagagctacacggcacctgaataaagatgctgcgaagtcttcatcaaccaaggctgctgaaggagaatctgagaagaagcaacataaaaccagtatgaaattgcagaaagaagatgctgtctctgataaagacaccaatgaggatattagtttgaaggaaatgatgtccccaacaaaaatcgataaatcaaaaggccaacaagaggataatggggcatcatcaaaaagaaaaagtttgcaggaagctcaagagacccctctatcaaagaaaaataaaatacttgatgaaaaccttattggctcaagaatcaaagtttggtggccagatgacaaaatgttctatgcgggtgttgttgaatcattcgatgcctcttcaaagaagcacaaggtttcgtatgatgatggtgatgttgaggtactaatgcttaagaaggaaagatgggagttcatttctgaggaacaagacactgatcctgatgcggtatctaatatgccacgtggcagaaaagctaaggggagctcgggtccacaaatgaaaggagggaaaacaggaacacctcaaagtgatgttaagaatcctcccaagaagagagggcgtccaaaaggcatgcacgacagcaataatatgccaaatgctgatagctctgtgactccagccagactgaagggaaaaagtgttgagaaggatactcaagtgacacctaagactggcaataactccaagaaggaaggtgcaaggcactctcgatctactactggaaaagctcagaatgctgttgtcaaggcaagcagcaaggatgaacctgatagcaccgacaactcaaaagatgatgctggtagtgaagacaagaattcaaaagatgaagtgaaatccagcgaaggtaacgatggatccaagaccaatggtctttcaaccaaaaggaagctagaggagaatgaaggtgagtcatcagaggagaagggttctgctaaaactactaccagaaagaagcgcagaagaaagagccgcaactagttgctcagaagctatgcagctcatcatcttaggggcgttccgcccttgcagtctaaagtctcaagttgctggcatgggacatgccatgtatgctttatattgcctggaccgttttaccagcttagcgctttggcaatttgggcatcatgagtcggctcgtagttgtagcagtcttaaactctcaataggagctataatgtttggtcttacttttctttttagaatctcgttgccaacggttgtgcctctggcaaaaatggatttgatgcttttgctctgcttaaagcttttgtgccaaatcgtaatgcatttcgacttatcttctggcaaacaaaagtatgctcctgttatgaagcgaatgtttcagaagaaaagtagtctgagtttgtacttcctctgtttctttgtacttctt

SEQ ID NO: 20337 - DNA, 975 bp, Zea Mays
gtgcgggaaatagtttctctctctcttcttcttgtaagatatttcggagtaggaagtgcgtgccttcctcgcagctcattcgccgagtatgctcacagagaatgtgtgcaacgatggtgcaatgagaaaggggatacaatctgtgaaatctgccatgagttgtacaagcctggttacactgccccaacccaggtgcatcatgatgaaactaccatagagataagtggtggagattggaccatctctggcaaccgtttggatttacatgatcctagaatattggcaatggctgctgctcaacaccgtctacttgaagacgactatgatgaatatactgcaacaaacaacaacgctgctgcattttgccgctctatatttctgattttgatggcccttttgctcctgaggcatacactgaccattactaacagcgatgatgaagatgatgcatctgctattttctcgctatttcttttgagagcggctggatttttgctgccatgctatattatggcttgggctattagtatcatgcagcgtcaaagacaaagacaggaagaagcaatgctattaccaacggaagtggcgatcattctgcatcggaacggaagaacaatgcaatttgcggtggcaccaccagaaacccctatctcacctcaccccgagctaaaccaatagaatacatcatcgacagggtcacagtcctcgcctcgggagtgcataacaggtggaaactcgaggacattgtgcaaagcatgtgttgcatcggccacctcgaacggccatgttgcagcaaaaatgttgtgccttcgaattgagttaactttctagcttcagattcaatgcttgttttatggcctctcagcatcttctgtacataaagagatttctctaataaatgaatataagttaaatcaacacaaatttcgattttgaacagtggcacctcagaaaaacatcgctgtatttctaacc

SEQ ID NO: 20338 - DNA, 657 bp, Zea Mays
tctctccctaccgatctctccctacagattttttcagccgcctgcattatcttctacgcgctaccacccagcctctgtcctcgtcgcgatgcccagtccccagctcggcgtcctcctcttccgcggcctcccactcctccagtccgagctcccttctcttcttcccatggcggctgtcgtcgagttccctgcgcaagcgtcgcacgcagccgtgtcttcaagcccgggtcttcttcctcccttttctatggacgctgcccctctctggtttctggtggccggccacctctgctgctcccatgtaaaatccctggagaaattggtggagaagaaggttaagttcaacgctccttaggtgttcgatgatatgcaagaactggtggccgtcttcgctcttgctgaaatcgagtcggggcatgatgtggtacgctagatgattatgtgaattggagggcatggatcaggatggatcacaaggtggctttgatgaacccatctctatagggacgacttgatcaagtgtcaggattgttgatgctcaccaagcggacgtcatctaaccacactaacctagtgttatcccaggcaagccccggtgcatttgccacctccttgttgttttaaaacttttatcgcttatatgctgcattaggtgat

SEQ ID NO: 20339 - DNA, 5036 bp, Zea Mays
gctttcaaaaaaaatgctgattataatgagaatgaaaacttaggcaacatgttttcaaccccaaatacaccaagagttgtatattggaagatggcaaaaggtcacgatgctacgttctgccagtggtactacgccagcaatgaaaatgtactctaatttacctatttatttccagaagggagagatatcttttggagttggttatgagccatctttcgctgatataagctatgcatttcaagtagccctgcggaaagttaaccttagcactagagcaagctgttctggtctagcagtccaactgcctaaaaaggagcgcagcttaccatggtgggatgacatgagatactacttgcatggaaagataattttatatttcaatgagaccaaatggaagttcctggcaacaactaatccttatgagcatgtggataaactccaaattgtctctgaatacatggagatccagcaaactgatggtcgtgtggatgtttctgcgaaagaattcaagatatacataagcagcgtagagagtattacaaagaaccgccgcataaaagttccatctcgtgtgcccagaccttttatatatgctcctctattctccctaaatgtggttattgattggcagtgcgaatctaggaatccattgaatcattatttgcatgcactccctgttgagggggaacctcggaagaaagtttatgatccatttcgatctacttatctctctcttaggtggaacttctccctcagaccattgcaatcccagtatggtaatggcccaccacctcccttttatggaaataattcaatgctccgtgggatcatgtctggtagtccttgcaaaatgactgatgatgacttccctaccatgaacctgggagctcatgaccttgcttgggttttcaaatggtggagcttgaattacagcccccctcacaaacttcgttccttctctagatggcgtcgttttggaattcctcgggctactagatctggtaacctctcgctggacaaagttttggttgaattctttttccgtgttgatgctactccctgttgcataaggcatgcacctttaagtgaggatgatgaccctgcttttggtttgacgtttaagatgtcaaatttgaagtacgagttatgttacagtcgaggtaaacaacagtacacatttgattgtaaacgtgaatcactggaccttgtttatcgtggtctggatcttcacaggccggaggtttatttgatgcgagataacaatttgtcttcagttgaaaatgtatccaaagtaaggactatggtccaacagtcacatggaaaatttgttcatgacagatgcaacatgggtaatttccaagaaaagcatgaggatggcttcctcttgtcttcagattatatcacgataagaaggcaaacacgtaaagcagatcctgaaagacttatgggatggcaggatactgggaggagtcatgagataacatatgttaggtctgagtttgaggatgacagtgaaagtgaccacactctatctgagcctagcgacgacgacgatgattttaatgtggtgcttgctgacaattgccaaagagtatttgtttatggccttaggattttatggactattgagaatcgagacgcggtttggtcgtgggttggaggaatttccaaagcatttgagcctccaaaaccctctccttcacgacaatatgcacaaagaaagatgattgaagaaaggaatgctgagggctccaaggtgccgcaagattccagctcttccatacatgtgggttctccatcagtgcaacatctggatgcttcgggttcatcttcctcgttgcatagtaaagccaatcgctcctctgatgtggctgtaaatcatgacatttttgatgattcggataaaggagggacagcccaatatatggttaatgttattacaccccaattcaacctacactctgaagaagcaaatggaaggtttctacttgctgcagccagtggtcgtgtactggctcgttcatttcattcagttgttcatcttgggaaagaaatactagaacaagcacttggaacaagcagtgcacagattcttgagttacaacctgaaatgacctggaacaagtcggaactctcggtgatgcttaaagatgttcaagctcatgtagcccccactgatgtggatcctggtgctggtctacagtggctccctaaggttctgggtagctctgagaaattgaagcgcacaggtgccttgttagagagagtgtttatgccttgtcaaatgtatttccgttacactagacacaagggtggaactgcagacttgagggttaaaccactgaaggagctacgctttaactctccagacattactgcaacgatgacctctcgccagtttcaagttatgtttgacgtgcttagaaatcttctattcgcaagacttcccaagagtagaattagtgatgaactagaaatgtttggttccaaatgagcacaacttaatagtgttagtttcctgtcacaggcctaggaaaaacagtcttcagtatccatcagatgatgaagatattgaagaagaggctgacgaggtagtacctgatggagttgaagaagtggagcttgcgaaaattacactcgaacagagggaaagggaaattaagttactgcttgatgatataaggtctctcactggaaatggtgataatgggaccgatcactgtcattctgcagaaaaaggtgattgtttatggatgatcaacagcgggaaagcttcattggtggaaggactgaaaagggatttcgcaaacctacaaaagtctagaatatttgcatcatcagcattgaggaaagcactttcaaatgcttcacaatcacatttggagaaagaaaagaacaaaaccacttcttgtgccatgcggatttctatgaaaattagcaaggttgtatggagcatgctcgcagatggaaacacttttgcagaagctgagatcaatgatatggtgtgtgctcagccttgtcccttcacctctgtggctgtctgtagcttcaatcgggttggagagagcgagaggcgtcaaggaggatgaacggcgagggtgtatgattttgatcgggattacaaagatataggcattgccctgtttacaactaaatactttgttgtgcggaattgcatggttaatgcgaaatgtgacaccttattgtctgcctggaacacacctcctggaaaaattaacatgcttcgtgtggatgccaagcaaggtgctcctaaggatggaagttctccacttgagctcttccaggtggagatctacccactgagaatatatctatctgaagcaatgtatagaatgatgtgggattacttcttccctgaagaagacgattcacaacgaagacaggaagtttggagagtttcaacatcaaccgggcctagaagaacaagaaggctctcttctggtgtcgatgctgttacttctagcagctattctgtcagagatcatgaacttcctgggaaatcaagtacaactgtatctacatcaacaaatgtttcaagttggcaaggtatactcagcgataactcacaggtgtcaaagtttcagagtataaaagcaaatatggtatgtggttcgcatcaagagttgcaccggtcgtcttcatttgaaaggaattgggaagaaagcgctgcagaaagtgttgcaagtaatgatgtggtatcactcctgaattcttcaattgtttcttcaaaagtagatgctagcaattctgtcttagagaaccctgttgtgggaagtgagatgtggagaagtaaaacgaaagattctaagcctgccaagtctggacgtctatctcacgaagaaaagaagcttgggaagtctaatgatgaaaagaagacaaaacctcggaagtcaatggaatttcataacatcaagattggcaaggttgaacttcttgttacatacgagggatcaaggcttgctattaatgacctaaggttgcttatggatactttccacaaggcagaatttactggtacatggaggcgactattctctagagtcaaaaaagggaagaagtttagcaaccatagggaaacacttgagggttctattcctgaaaatgatcttaacttgagtgacagtgatgttggtcaacctggaagacatgatcaattaacagcttcatggttgaagaggccaggcgatggtgcaggtgatggatttgtcacgtcaattagggggcttttcaatacacagcgccgtaaagcgaaggcctttgtgattcggacaatgcgcggtgaagggcataatgacgaatatcaagacgaatggagcgagagcgatggtgaatacccttttgcgaggcagcttacaattacaaaggccaagaagctcatacgaaggaagttccgtccaagggtgcaaaagaacccaggtctgtcgatgcaagattcactcccatctagtccgcgggaaacaactccatatcaaagtgactcctccaggtcatcttacgaggacttccatgagcagtaaaacaatctggtgatgctgctttcagcttctacatttggtcgataagatgcagccatttatattggttatagtagggtgtatgtatatagtaggatgtaccatcaaaatccaatgtatcatgtatagtggttaggcaatactccgtaattatgtgcttgtaagttaataagaggccagctcgtactcctagaaaacaaaacccgtgatctatggcatggggcattctcattcccttgtacttcaggactagtatggattgtaaattcaacggtgaaggtgttgcaacatttattcagtaaagtatccttgttgaagaatttgtaaaaactatggcagaaacaatagggaaggagcaagtgactaggtgcctaggtgtattatgattcttttgctgactagttggaagttagaaatgcattgctccacgtcaaaaagaaatgcgtggcagacaaggttgttgcttaacagatcggtgagctatgaaatgctatctgttca

SEQ ID NO: 20340 - DNA, 1720 bp, Zea Mays
cgcgcacctcgccgtcccagccacctgccgttgtgcatgcgctctcaatctctgatctagtcatctgatctgtgcgggagtgtggccgccaccaccacgaccaccaccataactgctcatctatatataaaacacccccaccacaccgttctcccccactgtcctgccgccgtccgatcctgtggttgcgccgactctctggccgcgctagtccccattccttcatccgacgaatctaccctcgatcggatcctctggccggcggcatgggcgacgacgacgaccacaatgaggggctgagggcggggccgacggcgtcgtggcggctcaacgtcagcgacttccacatgccggagcggcccaaggagccgcccttcgtcgccagggtcttcctccgcagccacgggaagcagaggaagatcgcgaagtactacaagaaacaagagaatctactgaaggatttcagcgaaatggagaccatgaacgaaatgggtggcctagatcagaatgctcctaccgaggaagagcagaagcagttggcgaagagcgagaggtttgccatcaacctgtcgaatgcagtcaacctggtcctcttcgtaacaaaagtcgtcgcttcagtcgaaagcgcgtccatggcggttatagcgtcgacgctggactctctgttggacctgctgtcagggttcatactttggttcactgcgtacaagatgaaaaagccgaacaagtacaactatccaattggaaagaggcgcatgcagccagtgggaataatagttttcgcatcagtgatgggcacacttggcttccaagtgctgatcgaatcagggcgccagctcataactcaggagcacgcggatttcaagttcaagcaagagctgtggatggtcattagcatgtcctctgttgcggtcgtgagttcttcctcatgctctactgcagaacgttcaagaatgagatcgtgagggcctacgcccaggaccatttcttcgacgtaatcacaaactcggtcggcctggtctcggcgctgctcgctgtccggttcaaatggtggatggaccctgttggcgccatactgatcgcgttgtacacgatcacgacgtgggcgcgaacagtgctggagaacgtaggcacactgataggcaagtcggcgccggcagagtacctgacgaagctcacgtacttgatctggaaccaccatgaggagatccagcacatcgacacggtgcgagcctacaccttcggcacgcactacttcgtcgaggtggacatcgttctctcgggcgacatgccgctgagtcaggcacatgacatcggcgagtcgctgcaggagaagctggagcagctgaccgaggtcgagcgcgccttcgtccatgtggatttcgagttcacgcaccggcccgagcacaaggccgaggtctgagtgcgtggttagtggttactgcagagttcagaccagctgtagcgctactgcagatttgacttcatatgctattagttcgtaagatgaatgctatattcatttcccacaactcttcaaaaagaatctagatattttttgtcatgtacgtgcagactggaataaaattttgtatagtcgttcatgaaccggtgaaaaatatattttttaatacatttgactaataaagaattattcatattagtttctttttattttctataaaacaaacataatagatatccaaagtgtatattttaa

SEQ ID NO: 20341 - DNA, 215 bp, Zea Mays
cacaggagaagaacaggtggttcaagaggatccacacagtgaggagttcgatttgatctaggtggcgtctcccagttgactttatgacgccaaggatggactttagtttgatctatatttatattttatttttgtaagactaccactatgtaataagtactctgatgatattgtgacatttatctctatacactctgttactatatgtgttgtct

SEQ ID NO: 20342 - DNA, 814 bp, Zea Mays
cttgattggtggtgtttctataaacccaggacatatttgcctatacatgctcttcgtctgttatcctttctcggaaatttattgaatattgtattgttggtatggataatctgccaagaactctgctgatgtactacactaacatgcccttgccacacaggaagtattttcagacagttctttgcaactccgctgaattcaacaagactgtagttaaccatgacctacactattcaacatgggatgctcgttccaaaaacgagccacgcctactgactatagatgatgtagaaaatatgaccgaaagtggtgcagcctttgggactagatttcccaaagatgatcatgcgcttgatcgcatcgatgaagaaattttgcaccgtcatcctggagagctagttacaggaggatggtgcataggtgttgggcatgatagtccatgcgacatttcaggtaacccagatgttctgagacctgggcctaaagctataaaacttgctaagtttctttctgaaaggctgtcatatcggaacttttattcccagcaatgtatatgggattgatgcttgtataatttcattatcagggaactgttatctctcgggttatgtgtttgcggtttgcctcatactgcggtgcatttcgttcgccatcatttgcatatgatgtctgtagttgattctcttgtgataacctaaaacagtacaagtggatcataagaaatgttctaccataagcagctgcggcagcattgcatttgctatcaaggattcaaggggagctgtggtacgcgagagatgaaaccacacgcgag

SEQ ID NO: 20343 - DNA, 3988 bp, Zea Mays
cccgagcggggagcaccccttctcactttgtcaaatctccaatagctccggtaaccctactcccggcgacggggatcctgcactcttgggttcttgcatcccgcataccctcgaaagctcgaaagatcccgcggcgcagcagccacccttctctcctctccgctcccaatcttatcgtcgcctccctcgaagtcgccgctgccttcattccaccatggcgcttcacgccccggtccacgtgatgaaggactcgctgaagcgggagtctggcgcgaaggttcaccaagccaacatccaggcggccaaggctgttgctgacatcattcgcacgacattgggtcccagatccatgctgaaaatgcttctggacgctggtggaggtattgtggttactaatgatggtaattctattttgagggaaatagacatcgcacaccctgctgccaagtctatgattgaactaagtcgtacacaagatgaagaagttggtgatggcactacatctgtcattgttctagctggagagatgctacacgttgcacaggcattcattgacaagaactaccatcctactgttatttgtcgaggtaagattcctttattctcagtactgcagtttactagggtaatacttgacttttattcttgatctcttgtcttctggaacttatattttctcatcttcagcatacaccaaagcgcttgatgatgctattgctgtacttgacaaaattgcaatgccggttgatgtgaatgatcgcggggcaatgctaggcctcgtgaagagctccattggtacaaaattcactggccagtttggtgatcttattgctgaccttgctattgatgctacaacaacagcaggcgttgaccttggtcagggtatgcgtgaagttgatatcaagaaatacattaaagttgaaaaggttcctggtggtcagttagaggattctagagtccttaaaggagttatgatcaataaggatgttgtggctcctggaaaaatgaggagaaagatagttaacccccgtatcatcctgttggactgccctgttgagtataagaaaggagaaaatcagaccaacgctgaattgatgaaggaagaagattggcaggttctcctagagatggaggaagaatatataaagaacctttgcgctcaaattctaaaattcaagcctgatttagttatcacagagaaagggctcagtgatctcgctatccattatttgagcaaggctggtgttactgcaatccgtagacttaggaaaactgacaacaacaggattgctaaagcttgtggggcagttatagtgaacaggcctgaggagctccaagaatctgatgtgggaacaggagctggcctgtttgaggtcaagaagataggtgatgaattctttgcctttattgttgactgtaaagatcccaaggcatgtactgttctgttgaggggagcaagcaaggatgtattgaatgaagttgagagaaacctgcaggatgccatgtctgttgcaagaaacattttgaaaaatccgaaactccttcctggaggtggtgctacagagctgactgtatcagcaacactgaagcaaaagagttcttcagttgaaggcgtggaaaagtggccctatgaagctgctgctctagcatttgaggcaattccaaggactttggcccaaaattgtggtttgaatgttattaggataatgacacaacttcagggaaagcatgctaatggtgaaaatgcgtgggttggcattgatggaaggagtggcgatatcgttgatatgaaagagcgaaagatctgggattcctacagcgttaaagcgcagacgttcaagacagcgattgaggctgcttgcatgcttcaatgagtctgagtctgtggatgccatgaacaacaatatagtcgaattggatgcggtcaatgaagacacaaggagccagagattgaatgatgaatcagagttggtggaagaggatgttaagggtccaaacttagatgacaagaacactgcggatgagcatgtcaatggcacaaacattgatggaatatgtttgggatttgtggcagttgaagtggtgcctgctgtacatgaggcaaggcttgacaataatgaggaaacagcagaggtagcaccaatggggggcgatgatgtgccagtgcctacagatgtggatggtgaagaacccttggtggaggcagcagctgtaacacaggaggtagtggctgttgcagaggaattgggggatgatgaggctgaggaggatgaagagaaggatgcaatgggattgagcttggggtttgactctaccaatggttatgttgctatggatgtggaagaggaaactaatgttgagaatctggacgaggatgagagtgacagtgccaatgaagaggcagaggagtcagaggatgatgcatttgaggttaatgatggagaggacatgaattggagaattggggatggcaggggggatgagggaatgtcacattctttgcaacgctgtaacacatttggaggcatggagtttgagaacctgaatgaaggggagactgtaatgaaggatgagttgaggtttgatgatttccctgcgagggcatcttcagaaaggatgacaccatcaaacctcctccaagccatgaactcaattccctcaacgtacaatgtagcagggaatgtgcatgatctgccttctggggatttcttggctatgggggctgatgcacataagaatggagtggatctgggaccagggagctcatatttatttgggaataatggtaagaggaatattgatgatattgatggttacgatgacaatatgcaggcgcaagaggactttcctcagtctaatcagcagaagaggatgcgccatagtaacagtggcaacatatcacctggatcaggctttttcaacgcaagcttttcggtacctatacagaacttgatggttgaggcaagcaggctctatgagcagaaggagcaaaaacttcagagtttgcaatttgagaaacaacattggtctgacatgctgcaagagaaggaagccattatccaatccctaaactcagctcggtttgagcaacagaacaagtatcaagtggagcttagacgcttcgagcatgatctgaatgttatggcccatttggtaactacctacaaaagagctttaaaacagacccgggcttcttttgatgagtacaggaagaagttcccttgcaatgttcctctttatgatgatgttgctggtggtggtggtcttgttcttagtgtgagggagttggagaagaggcggtgtgaggaggagcagcaaaaaattgccatggtaaatgatatgatcgaaagattccagtacaaatggttctcaaaagcttgaagagtggggactgtctgtcaactcactgtggagcagaatggaaggactctataaggagattgagcttctgaaggaaaatagaagatcaagatttgctaccccagctacagaggaatctctagctacagaagaacctaccccagctacagaggaatgagttccctgacagtcagaggttcagatgtgaatatgactcccagtcactccgctagatgttttgatgtcaacgagcatacattccctctgctggatgactcccagttagtccctaccctctgctgccaccaagagtgtggctgcctattggtacatactgtagcaaggataaatagtttcgcaagtaaccctgcttgtatcctcatgtgggatattttgattattagtgatcaaggccctgtttgtttccttccaggattattagtgattaaggccctgtttgataaatagttctctagattatataatccacctaataatctatgatgtttgtttgcctcccaacttatttaagctggattatataatctcgagggtaaacaaacatggcttaattcaggtgcatttagggtttcttaatctacgtggaagtgtgtgctttcatatcctt

SEQ ID NO: 20344 - DNA, 2615 bp, Zea Mays
gcatgtcaccagttcattctcccatgatatctcgttccataagaaacttgcagattgcagtattgagttatcaaaacaaaacaaatacttctgccgttacagatgtggaggagcacaagtgtctgaactcggagttgtggcatgcctgtgccggcccgcttgtctccttgccagcggtgggtagccgggttgtgtacttccctcagggccacagcgagcaggtagcagcatcaacaaacaaggaaatggagtctcagatccccagttatcctaatctgccgccacagcttatatgccaactgcataatgtgacgatgcaagctgatgcagagacagaagaggtatatgcacagatgacattacaaccactcaacccgaattaggtttggtcagtaaacagccaacaaactatttctgcaaaacattaacagcaagtgataccagtacccatggtgggttttctgttccccgtcgagcagctgagaaagtgttccctccactggatttcacccagcagcctccatgccaggagttgatggcaacagatcttcatggcaatgagtggaaattccgtcacatatttcgtggtcagccaaagcggcatcttctaactacaggctggagtgtctttgtaagtgcaaagagactcgttgctggtgactctgtcctttttatctggaatgacaataaccagcttctgcttggaattcgtcgggcaaatcggccacaaacagtcatgccatcttcagtcttatcaagtgatagcatgcatattggtcttcttgctgcagctgctcatgctgcttcgacaaatagccggtttacaattttctacaacccaagggcaagcccttcagagtttgtcataccgcttgcaaagtatgttaaggctgtgtatcatacccgtatatctgtggggatgcgcttcaggatgctttttgagacagaagagtctagtgttaggagatacatggggactattaccggaatcagtgatcttgattctgttcggtggccaaattcacactggcgttctgttaaggttggctgggatgaatcaactgctggcgatagacagccaagggtgtcactatgggagattgagcccctgacaactttcccaacgtatacatctccttttccgctcaggctcaagcgtccatggccaacaggcttgccttctctgcatggtgggaaggatgatgacctggctaactctctcatgtggcttcgagataccacaaatcctggtttccagtcgttaaattttggtggacttggtatgaactcttggatgcagccaaggctggatacttccttacttggtctgcagcctgacatgtatcaggcgatggccacaggtgctttccaggatccaacaaagcaggcatcacccacaatgctgcagttccagcagccacagaacatagctggccgggctgcgccactttcaagtcagattttgcagcaagcacatcctcaatttcagcagcagccgtacatccaaaacatctctgagagcacaatccaagcgcagggtcagtctgagttcctcaaacagcagatccaacgcagccagtcattcaatgagcagaagccccagctgcaaccccagcaagaatcacagcagcagcagcaatcacagtgtctgcaagcccctcagcatcaacaaatacaacagaacatagccaactaccagtctgtatccaatgcattatcggcgttttctcagctgtcgtcagcctctcagtctacacctatggcactgcaaactatattaccgttctcacaggcacagagctttacagacacgagtgcaagctcattgtctccatccaacaccaacacaatgcaaaatacgcttcggccattctcatcagaagcagtttctcacctcagtatgccgaggcccactgcgatacctgttcccgacgcatggtcatcgaagcgagctgcggtggagtctttgcttccttctcggccccaagattcgtctcaaatgcaacagttggactctacaccagctagtatacctcatagctctgcgttggcaccacttcctgggagaggatgcttggtggatcaagacgcgaaccctgatcctcaaaaccatctcttgtttggtgtcagtatagattcgcagtcactgctaatggagggaggcatccatggtctccaaaatggcaatgattcgaccgctataccttattccacctccaatttcctgagcccttcccagaacgattttcctttggatcatactctgaattcttcaggctgcttagatgattcagggtacgtcccgccatgttcggataattctgaccaagtgaaccgaccaccagcaacctttgtgaaggtttacaaatctggaacctacggaaggtcgcttgatatcaccaggtttagtagctatcacgagctccgtagggaactagggcgcctatttggccttgagggccagttggaagaccctctgagatcaggctggcagcttgtattcgtcgaccgcgaggaggacgtccttctcgtgggcgacgacccttggcagtaagttaccatgaccgtccatcagtcttggtgatacatcctcaacaaatttcatgtgtttcttc

SEQ ID NO: 20345 - DNA, 4671 bp, Zea Mays
cgccgcgcagcgtcacgagagagggggtggggcgcttgccagtaaattgcgtaggcgtaacgacgaatccggcactcgcaaccaccgcatccgtcctcgtctggtccggttgcctactcccctcccactgccccgctgctgctgcctccccgcgcaatggcgccgagatccccgcgctgagcgagcctcccgggggtcgacctccgaaccggcgctgccgtcccgcagtgcacttgaagaccaggcagctgttctctactcaaggaagagatggcccatgtttcgttcaaaagcaaagatgtggacagcggcatgtcccggtggtctgaatacctaagtgttgaagagccaattccttccgcaatggcaacctggaggaacatgagcgctgatgcgccgcaaggctcttctgctggtagccacaaacatcttcagatggagccggtggttcagctgtccaaggttgcggaaggcttgctggccaaaatgtaccggctgaacagcatcctggactatccagatccaaacacgcacacattctcggatgcattttggaaagctggtgtctttccaaatttccccaaaatttgcatcacgatgtcaaaaaaatttccggaacatcctaacaagctgcagctagaaagggtagataagtttggtcttgatgctttaaacgagaatgctgaaggttacatgcacaatcttgagcagtggatcctgttgcttcttgatttgctggcatttcgtgaacaagctttgcgacttattttggatttgagcagcacggtcataacattgctgccacaccaaaactctttaattcttcatgcttttatggatctgttttgttcatttgtccgagtgaatcttttctctgacaagatgccaagaaagatgatcctccaggtttataacatcttgcacataatgctaaagggtggtcgtgattgtgagttttatcaccgactggttcagtttgtggactcttatgatccacctatcaaggggttgcatgaagatcttaattttgtgagcccaagaattggagaggtcctggaagctgttggcccaattatatttctttcaactgatacaaaaaagttaaggaacgaaggtttcctcagtccatttcatccacgttatccagacatcctaacaaattctgcccatccaatgagggcccaagacttggctaatgtcacatcataccgtgagtgggttcttctaggatatcttgtttgtcctgatgaactacttagggtgaccagtatagatgttgccatggttgttctgaaagagaacttaatacttcctctgttcagagatgagtacatcttacttcatgaaaattatcaactttatgttcttccaaaagttctagaatcgaagagaatggctaaatctggccgaactaagcaaaaggaagctgatctggagtacaatgttgcaaagcaggttgagagaatgttaacggaagtgcatgagcaagcactggtgtcatgtgatgctatgcatcgtgagaggagaattcttcttaagcaggaaattggaaggatggttttatttttcactgatcaacctagcctcctagcacctaatattcagatggttttttctgctcttgctttgtctcaatgcgaggtgatttggtacttccaacatgtggggattgcatcatcaaaatctactcggttgaaaactgttgacattgatgcgacagacccaactattggtttcttactagatggaataggcaaactttgttgcctggttcgtaaatacatagcagcaataaaaggttatgccttatcatatttgttatccagtgctggaagaatacggttcttacttggtactccaggaatggttgctcttgacctagatgcgacactgaaaggcctttttcagcaagtcctccattgtctggagaacattccaaaacctcagggggaaagtgttcctgacattaccgctgacttggctgatttgcgtaagcactggctgtcaatcttgatgatagtcacatcttcacgatcctcgataaacattaagcacttggagaaggctactgtgtctactgggaaggagggtttggtgtcagaaggcaatgctgcatataattggtcaagatgtgttgatgaacttgagagccaactctccaaacatggaagccttaaaaaactctacttttatcatcagcatcttaccacggtcttcagaaatacaatgtttggcccagaaggtcgtccacagcattgttgtgcttggcttggagccgcttgcagttttccagaatgtgcttctgcaattattcctgaagaggttaacaaaattggcagagattctatctcttatgtggagtcccttatcgagtctatcatgggtgggttggaaggtttgataaatattctagattcagaaggtggatttggctcattagagatgcagctttccccagagcaagcagctcttcgcttaaataacacaagagcaaagggtgtttcaagcttgttaactccaggatatgagagctatcctgataacagttcatcaattaagatgctggaagctgctatgcaaaggctgacaagtttgtgttctgttctaaatgacatggagcctattggtgttctcaaccatgtttttgttctacgcgagtacatgagagactgcatcataggaaatttcaggagaagatttcatagtatgattagaactgagaactgcattcagcgaccatcaatcatagaatctcttctaagaagacatctgggcatcatccatctagcagagcagcatattagtatggaccttactgaaggcatacgtgaagtgctgctagctgagagttatactggtccatttcccaatcttcaaatgtttgagactccagtggggacacaaggaggggggtctgccgttgagatgatatgcaactggtatattgagaatgtagtaaaggacgcttctcgcattggagttgcttttgatgcaatccaaaattgcttcaggagctcacagcctattggtggtggatgtttggctgaatcatttacagataaaagagaaatgaaatcacttgttcgtctttttggtggctatggaatagataaaatggataagatgctaagggagcatacgtctgcgcttttaaactgtatcgattcagcattgaggtcaaatcgtgatgccttagagggcctagctggaactgtaaattccggcgataggattgaaagggatgtgaacctgaaacaaattattgacctcgaaacactggctgacctctgtattcaagcagggcaggcaataactttccgtcggctgttggttgaggccgtcggagcagtccttgaagagaaagtgcctctgatatattctctgctcaaaggattagccttgcagttgccagacgaggtacctgataaaaatgagataattagattgagaaaggttgcgagcagtgttggtgttggcgacaaacatgatgctgagtgggtacactctattctggcagacgctggtgcagctaatgataattcttggatcctacttccatacctttgtgctgcattcatggtgtccaacatttggaacggtgctgtttatgatgtcaatataggtggactcagtaacaatttgcactgcctagcaaggtgtgtaagtgctgtgattgggggaagcgaatacactcgggtcgaaagggagcagcgaataaattctctttcaaatgtgcatacagatgagctgcaagaggccgagttaccgagccgtgtctcagcagaagcaaatatcaaatcttgtatgcagatctacgtcaaactgtctgcagggatcgtcctggattcatggaacgacacaagcaggcagcacatcgtcccgaagctgacattcctggaccagctctgcgagctgtccccgtacgtgccaaggagcaccttagaagctcacatcccatacaccatcctgcgctcgatataccaccagctgtacggaggctctctgctggcctcggaaccggcggagcagtccccaaggcagtcgcctctcatctctctggcacacgcgtccccgtccgcaaggcagatgcagaaccgaccagagacaacacccaggtcccacaccttcgacccaggctactacagctcgtcggggtcccagcacgacgatggctacgacgcggataggaggaccggacggctgctgcggagcttgaggcgctctggaccgctcgacttcggtgcgagcagaaaggcgaagaagttcgtcgagggctccagctccgggagcagccatggagctggctcgctgcagaggttcgcagtgtccagatctggccctctatcgtacagatagggccgcatgtaatgtaaactctagagagcagtagatcttcctatgcgtgctggtttacgtagctagcagtagcaacagcagcagctagttgtgctgtaagtaaaacccattaattgcttaatttgtgttgactgtcgttaggcaagtgatttgaattagctgttgctcgtttggtttgtgtatcaacaatacaattgttcgttgatttttcttgatagcaaagtaaagtaaaccaaccttctcttgaaagaaagaaatagagagaaagattagacggaggccgattaagcagagatgaattggttctgagtgtag

SEQ ID NO: 20346 - DNA, 673 bp, Zea Mays
gcggtacttcgtcaatgaactgttaacaaaaacgaagagaagctcccagaggtgacaaagtcactgcgaccatttggtcccaaggaagattcgtctctctcagagttccaagtggagttgattcaacttgcctcgcagcttaacggcgaccatgtactgaacacgtacccagatattggcaggaccatgactgtcggggaagcgaaccgctacgcagaggatgctgtcgccagattcctggaagctggtcggattgctttgagagctggtgcgaatgaatctgctttggtgacgatgaggcccgctctcacaagcagggcctcaatgtcctctggtttatcatcagagctctagtagatggttccagtctgcccacaaattacacatcgccattccctctgattcagctcttgggtggtgtagtgcaaatatgatagtttggttctgtaaatagacagtcggtacatgtcaaagcctcaatgtgtagtggggatttctaaaagcaatttgtgggtacctgcttgtcaagcagctggactgcactctggagtaaatgtatgatactgtacagtaactgaattttcatgtctgtaaacatgggcttaaacatgtgtaatatgatacttaaacatttgcttgggaggatgagggttaacacttaacaatgtgaaca

SEQ ID NO: 20347 - DNA, 643 bp, Zea Mays
ccactatatcgcagcatacttggttcatcaagatgcttgaagagcaccccaagttgcggatgtcgaaagccagcgtgacgcacgaaggtaacaacctgtacatgcagtcaccggaggtgctggagcagatgacacggccaaacctgagcatccccatgtttgagcttctcaaagaggtcccatacaccactgtccatgccacgggcatggcagagaacaacgggaaaaaagtgtcctcgttgaggaagctccgtgtggccttcaagggcatcgaagacgcctccaagatggatacgaccgtgagctcatgatgccggtcgtcgtcgtcttgttgctaatttcaagtctcccaggaaagatgaggattaacccaatgtttttggacaggttaagtgtagttttcgagcgccatattacaaattgaaatgtgcgcctgatactgttcaaacatgaagaaatttatcgtagatgatactatggttttgtgagaatctacttcttggtgtttcgaatcttgctcgacaagtaaattaaatttattgtgcgtattctgagttttggagcgtgtacgcggtggagaatgtaagatttatactagttcggacagaacgttcttactttcagtcattgtggcttatgctat

SEQ ID NO: 20348 - DNA, 2495 bp, Zea Mays
gtactacacggccttgccctcacccttttgcttgctttgtcgtcctctcctcttcctcttgcgggcgcgatttgtggtgggtaccgcggcagggttgtggcgcgcgctgcggacaagggagccgtctccgtgcttatcgcgcgcaacgcggacggcggcatcgagagaggagtcgttcttctcggtggccccggcgatccgctcacccccgggtgggccgccatcagcggtgcggagcgatcgaagttcgacgataaggcagtcaagcagcggttttcgagtatcccctccatgccggtccaccgatgagcggtttctgagtgcagtctgcccggtccaccgatgagagggagactcgtctatcaccctcatcatcattattgagcactgtctggtactctggtcaaaatggtcagtttggacttgactgagttctatcgttgccctgtgaggataaccggttcacaaaggcaataattagcaaggtttgtgctgattgcatgcatgaagccgatgaattagcttcagtatgaggcagacgatttgagtcccacagtgtctttgattcctaaatcacccagctggctagctccttggtggtgcgcactgcagaccgataaccgattgccaggacacaagccagccagctggccagttgaagatttggaggtttcacctgctcaaagaaatgccctgcgcaacctgccagtttgctgtgtcgaccgttggtggcagctgcatcgacgacatcacatagacgagctgactgtcaagcactgggttgatcaggacgaccctggccctgccattcttgtttagagttttgcttgccaagttgatagtgattttttcagttcgattagtgtaggtgctggctggaggcacacgcagacacgctggtagcttattgactgaaagtgccagtcctagataattttggggaaaaaggctccacgctggtagcttattggctggaggcacacgcagacacgctgatatctaagaaactcgttcatacaatccaatatatctaaacattttatcttattcactagaatcctttaatacacggcttatttatatggattatatgggtggaaccatatattatacttagggaaccgtgctatagacgttccttcatttttaaccgtgtttggattattaacttgcttctacagataagatgtgaaggctcatattagttttcacttttcagttgcctgacacagataggtaagtcgtggtgtaccatgattagttttcagttgcctttataggtgtgcacggatcagttctcagttttctcgtatggaggattgacaaaccgtgatctataaggattagtttttttaaaaaggaaagcgagtaacacacaactagattttatttcgtgggaatcgtacaggaatcgctacgtactccagtaataagtacgctgaatggatagaaaatgtttatgtttttttagaattatagattttatctttccttgaaacgtatctcaagaggattgacgtcaagaggattgatgtgcttgtttcttgtacccatcagatagttttttttgtctccagttgctctacacagcaagtctatgaggaaggagcaaaagaagttgctctttcagttgtcagcggaattaatttaactcaagcatacttgcctatggcaaacaagcagtggacttacacaatgatcgaaatgacagactgttcgtgctatcggtttggaaagaacatgtggaaagctaatctcggatcttgcttccttcagaagacccaaaggaccttgaacagcaaaatctaaggtttcaacattgcagacacacaagagtccagcatgcgccaacgctcctgcagttgatgcttcttccagtagtttgtgacagattgctcaaagaaaagcaagacagctcgccaatcctagaagtggaaaaaaacaacatagaataattagccagctacagggagtaaaccattaagagaagaaacatcgtaatgccatgtttccaaatgggcacaaagaaacttcaagcacctctagacggaagctgtctgcactgaagatcaggacacgaatatcgcgagctttatcaaggctcgccttgtgcggaaggtgtatttctgtgagatctccaagatgaagcattagggggtcaatcgccccagattttacatgtagctaacttagtagggcacccataatccataatttattctctgtagttgtagcagcgacctagaggtgttattctgtagcacattgtgtaacatgtaggagagagataaacacatatccccattctttctactgaaacaccagaaatagttgctcttgctccataattcattaatgtgaacttctgaagccatgccaaggtcttatattgatcctctgttgtcatattgataaaaatagggtatgtaaaaccttttctcataacagtttaacacatattttatatataagttatcgtaatattacatgtttcc

SEQ ID NO: 20349 - DNA, 814 bp, Zea Mays
aataaacagaattcaaaatttcatttggtatatccacgcagctcactgaaacaaatcctaggaaaaaaggacacagtaacacaagcatggacctcatctaaattttagcaatcccgcagagcaaccaatgaaataacaaagtgcgacgaacgatctgggatgtacctttaagctgaggggatctcgacctcaccatcatcgatctcctgctgcaactccttgacggtcccggccaactccttggccatggacctgttccgcatggtcttggcgatctcgatgacgtcgtcgaggctgatgttgccgctgtgcttgatgttcttgaccttcttcctgtccctctcgggttccttgagcgccttgatgacgagcgccgcggcggaggggacgacggagaccttggcctgccggttctgcacggtgagcttgacggtgacgcggaggcccttccagtccttggcggtctccttggcgatgtcctcaccgatcttcttcggggagagaccgagcgggccgatcttgggggccagcgacgacgccgcgccgacctcgcctcccgtcacgcggacgaagacctccaccacctgagaggggtccaatttgggcggcatggctgctgcggcggcggcggcgggtacagatatctcatctacctgtattattaggatgctacaagcagtacatggaaagggacgacgcacaggcatctgcagtccagtggttcgtgccgcattcgtgcgtgtgtggtgtggtgactggtgacgacgtcggccgtgggccgtggcacggcgctgcacggtacggctttatgatg

SEQ ID NO: 20350 - DNA, 832 bp, Zea Mays
caggcggtgtcctcatccgtggcgcatctgtagagaaactgctccgggaggaagtagacaaggagagagagagagaggtcaacagggcactgccggatccggagccaaaaaaaaacccagaaggatccatggctcccggagccggagacgactctgatcccgcctcttatatccacacggtgcagcacctgatagagaggtgcatgacgttcgggatgagcatggaggagtgcatggaggcgctggcgaagcgcgccgacgtccaacccgtggtcacctccacagtgtggaaggagctggagaaggagaacaaggagttcttcgacaagtacaggcagtggatctcggagaagagaagcgggagtacctcctagtcctagtagcacgggactcgatcgtgtctctctgctggcttagctcgctttaaattagcccgtgatgtgtattacgtgtgcttagttattttaggatttattattacttactgtgtttgattagggaggaataagcggtagggagggagggaggcttgtaatgtgattctctgtaagcaagcagagcagtagtcacctgtacggcgcgggctgtggcgttatgtgtacagggtaaagcagggaaagccatctcatcatgcgcagcgcagaactgtacgcaagtagccgttgctggcgtggcgtatgtatgtgtatacacaatttgccccctacttctctaccgtatgggctcatcgtcgctaaaagtacacagcagttgaaaaagctcgtccttttctgacagtaatgtaaaccagaaattgagcttggtgtacttatcaaggcggtaccgttgcgtt

SEQ ID NO: 20351 - DNA, 2081 bp, Zea Mays
gtcgaatcttagctctctgttaatgattagacagatctacacaagagctgctggtggagcgatggatgctggtaacctgttgaagccaatgctaggccgtggagaactccgctgcattggagcaacaacattggatgagtacaggaagtacattgagaaggatgctgctcttgagcgtaggttccagcaggtttattgtggtgagccagcagttgaggataccatctccatattgcgcggtttgcgagaacgatatgaactgcatcatggtgttaagatatcagatggggctcttgttgctgctgcagttctatccgatcgatacatcactggacgttttttgcctgacaaagccattgatctagttgatgaagcagctgccaagctcaaaatggagataacatcaaagcctattgaattggatgaggtagacagagaaatcataaggcttgaaatggaaaagctctcattgaagaatgatacagataaggcctccaaagaacggctgagcaagcttgaagctgaactagaatctctcaagcagaagcagaaaagtctttcagaacattgggaatatgagaagtctttgatgactcgtataagatcaattaaagaagagactgacagagtgaacctggagattgaagctgctgagagagaatatgatttgaatcgtgctgctgaactgaagtatggaacacttttatcacttcagaaacagctggaagaggctgagaataaacttgttgaattccagcaatcagggaagtcaatgcttcgagaagaggtgactgacgtggacattgctgagattgtgagcaagtggactggtattccagtgtcgaaccttcaacagtctgaaagggaaaagctgctgctgctggaagatgtacttcacaagagggttattggccaagacattgcagttaaatcagtggccaatgccatccgccgttctagggcaggcctatcagatcctaaccgtccgatagcaagcttcatgtttatgggacctacaggtgtgggaaagactgagctgggtaagacactggctgaattccttttcaacactgagaatgccctaatacgaattgatatgagtgagtacatggagaagcacgccgtctcccgtttggttggtgccccacctggatatgttggttatgaggaagggggccaattgactgaatcagttcgtcggcgaccttactcagttgttctgtttgatgaaattgagaaagcacaccaggaagtctttaacatattgttgcaactgttggatgatggaagaatcactgattcacaaggcaggactgtcagcttcactaactgtgtcataatcatgacatcgaacattgggtcaccattgatccttgacacacttagaaacaccacagacagcaaggaggccgtgtatgagataatgaagaagcaggtgattgagatggcccggcaaacattccggccagaattcttgaacaggatagatgagtacattgtgttccaaccactggatacaaccgagatcaaccatatcgtggagatccagctgaatcgggttcagaaccggctgagacaacagaagattcatctccagtacactgcggaagccgttgagcttctggggtctcttggctttgaccctaactatggtgcgaggcctgtcaagagagtgattcagcagatggtggagaacgagattgcccttggtgtcctgaagggcgatttcaaagaagacgatactgtcctcgtggatgtaagttcggcggcgatcgcaaaaggactcgctccgcagaagaagcttgtccttcagagggtagaaaacggaaacgacgagttagttgctaatgactaggtcagatgggatcaccttttagcgagaatgttcaagtgtgatgaaacgcagctgttagctctgcgttttcgcgtatgagaaacttggccttttatttaggttctaccatgaagtcgtgtccagtctccggtggcaaaactcaatgttcaaatctctctgaatataatcttgagagctctacctcaagagctgtgaatatctgttcaggcaacccctatctttctcg

SEQ ID NO: 20352 - DNA, 5530 bp, Zea Mays
gtcacccgcgctgccaaaacacgcgctcgtcgcaatttgcaagcgcaggaaccaggagaaaggtcggcggagcgagcaggaagggcaacgcagcgctgcgtgttgcttgtcgtccttccttccccagcctcccaccgcatcaccaccaaccctctacctctcactttctgaaattcccacgttgctctcccgtcttccctcctcccctccccaaacccccaccccaacgcccagatctaccctccccatttacagctttctctccggccctgcgccccagggcaccgcgccgcccgaaaccgtcggcgccggcgcgatgcgcgtgccatgctgctcgttatgcaacgtcagatatgacgaggaggagcggacgccgctgctcctccactgcggccatggattctgccgcgcgtgcctctcccgcatgctagcggcagcccccggagccacgctgccgtgcccgcgatgtcgccatccgaccgccgtaggcaactcagtctctgcgctgcggaagaacttccccattctatcgctcctctccgcatccccctcatccccgtctttcctccactccgactcggggtcatcctccgacggctccgaagatgaggatgacttcttcgcacggcccactcgccgccccgcgcccgcgcccgccgccgcgtcgcccggatgcagctccttcgacctcgcctcgcacccggacctcaagctcgcccgtcgcatcgggagcggcccgcctgggcccgccgggcaggacgtgtgggtcggcacgctgtctcgtggcggcggcggggtcaagcggtgcaagcaccaggtggcagtgaagagggtgccccaaaccgcgggggatgggctcgaggttgttcaagaggaggtggagcggctgaggcgtgcctccacatggtgtcggaacgtgtgcaccttccatggtgctgtgagggtcggcggccacctctgtttcgtgatggatcattatgtcgggtctgtgcaggcggagatgcggcagaatggtggacgcctcacgctggagcagattctcaggtatggggctgatattgctcgtggagtagcagaactccatgcagcggcaattctgaagaataggagagttcctgatgactccggtgctggcattgatgctatgctgcttagtcccaattatacagctcctgaggcatggggaccactgaagaagtcactgaatatgttttgggatagtgcaaacggtatatcaccagagtcggatgcatggagttttggttgcacgctcgtggaaatgtgtactggtgctgttccatgggctggactgactgcagaggagatctgtaagtctgttgcaaaagagaagaagccaccacctcaatattcaagagtagtaggtgtaggacttcctggggagctgtggaagatgattggtgaatgtttgcagttccgagcttcaagaagaccatccttccaggacatgctgaaaattttccttcgacaccttctggacataccacggagcccacctgctagtcctgagaatgatttcgcaaatgaaaacttgcccaatggcatggaacctccaacaacctccatcctagagatggttcgttataatccaaatgccttgcatcatcttgtatgcgaaggagatgctgctggtgttagggatctacttgcgaaggttgcatcagagagaaatggtggtttcatccgttctctcttagaagcacaaaatacagatggactcactgccctacatttagcatgtcgccgaggctcggcagagcttgtggaagctattgtggcttaccaagagaatgtagatatattagataaggatgaagacccacctatagtatttgctttggctgctggctctccacgatgtgttcgtgcacttgtaggcaggtctgctagtatcaattctaggcttagagaaggcctgggtcctactcttgcccatgtctgtgctcatcatggtcaaccagagtgcatgcaagagctgctgatggctggagctgatcccaacgcagtagatggtgaaggtgaatctgtcctgcatattgccgtggccaggagatatactgattgtgctattgctatacttgaaaatggaggctgcagatcgatgggaatatcaaattctcaacataaaacgccattgcatttatgtgttgagacatggaacacgactgtggtaagaagatgggttgatgttgcatctctagaggatatagcagaagcaattgatgtacccagccctgttggtacagctttatgcatggcagcagctcttaaaaaggagcacgagaaagagggtcgagagttagtaagaatattgcttgctgctggtgctgatcctacagcacaagatgatccacactgtagaactgcattacatactgcagcaatgatcaatgacgtggagcttgttaagattatactggaagcaggagtcgatgttaatataagaaatgctcaaaatacaaccccactccatgttgcacttaatagaggtgcaaactcgtgtgttggcttgcttttagcatctggtgcaaattgcaacatacaggatgatgatggtgacaatgcttttcacatagctgctgacgcagcaaaaatgatacgcgaaaacttgacttggattgctcaaatgctactacagccgtcacctgctgttgatgtgagaaaccaccgaggttggacactacgagactttcttgagaggcttccacgagaatggatttatgaagaattgatggaaatgcttgaagataaaggagttcatctctcaccaaccatatatgaggttgcggattgggtaaaatttagaagaactgttacatcaccagcttttggctggcaaggtgcaggacctagaagcattggttttgtccagtctgttgtagacaatgaccaccttgcggtgtcattttgtactggagaagcccatgttttgacaagtgaagttatcaaagttattccattaaataggggccaacatgtgcaactcaagcctgatgtttctgaaccaagatttggatggcgtggtcaatcgcgggatagcattgggacagttctctgtgttgatgatgatggaatcttgagggttggttttccaggagcttctaggggatggagagctgatcctgcagaaattgaaagggttgaagaatataaggttggtaactgggttcggattcgtccttcactaacggttgctgtgcatggcatggagtccattactcctggaagtgttgggattgtatactccatcagaccagatagcagtcttttattgggactttgctatttgtccaatccatggctgtgtgaaccggaggaggttgaacatgttgacccattcaagattggggaccaagtatgtgtaaagaggtctgttgcagagcccagatatgcatggggcggtgagactcatcacagtgttgggaaaataattgacatcgagagtgatggcctgctcatcattgatattcctaatcgggctgcaccatggcaggcagatccatcggacatggaaaagattgagaacttcaaggttggcgattggattagagtcaaagtgacagttccctcacccaaatatggatgggaggatgtgactcgaaatagtattgggataattcatagtctacaagatgatggagatgtgggtgttgctttctgctttagaagcaagctttttctttgctcagttgcagatatcgagaaggcacaaccatttgaagtaggggaaaaagttcatgtgtcaccttccatatctgagccacgcctcggctggttaaatgaaactgcagctactattggagccatatcaaggattgacatggatgggactttaaatatcaaggtttctggccgaaaaagcttatggaaggttgctcctggtgacgctgagaggctttcagcttttgaggttggagattgggtccgcccaaaaccaagtattgggagcagacctacttatgactggaatagtgttgggagaataaacattgcagtagtccatagcattcaggactctggttacttggagttagctggctgtttcaggcatgggaagtggctaacccataacacagacattgagaaagtgcagacagtaaaaattggtcagcatgttcggttccgtgctggaatttcagagcctagatggggatggagagatgcgaaccctgattctagaggcatcatcgctggtgtacatgctgatggagaagtaagggtcgccttctttggtgtgccgggattgtggagaggcgatcctgcagatcttgaaattgagaatatcttcgaggttggagagtgggttaggctgaggaacgatgtggagcagtggagatcactcaagcctggtagcattggtgtggtgcatggggtgggatatcaaggtgatgcttgggatggaaccattcatgtcgctttttgtggtgagcaggaaaggtggattgggccttctagccagcttgaaggagttagcaagtttgttgttgggcagcgtgttcgaatcagaggctgtatccgccagccaagatttggttggtccaatcatagtcattcaagcatagggacaatctcatctattgacgcagatgggaaactgaggattcatacaccagctggtgccagggcttggttgacagacccagcagaggtggaaaaagtggaggacgaggaggaagtctgtattggggactgggtgaaggttaaggactcagttggaaccccagtgtatcaatggggtgatgtgaaccacagcagtataggggtggtccaccgggctgatgatggagagctctggattgctttctgcttctgtgagaggctgtggttatgcaaagcatgggaggtggaaaaggtgaggcccttcagacaaggtgacaaagtacggatacgatctggtcttgtatcccccagatggggctgggggatggagacctacgcgagcaaaggcgaggttgtgggtgtggatgcaaacggaaagctgaggataaagtttcggtggagggatagactttggattggggacccggctgatgtcgttcttgatgatgcccatttattgacggaggcttctaatggcttttgacctttttgttcataggcttgtggtattcttttgaccccatatctcatttcttgcacccatccattttgcagcatttcaaatttagcaaaatctcaacctgcagtggagttgcaagttgcacatagttatcatcgcataggcatgcatggcagggtgtatttcttgttgataaccggggaatgagaagacagcgatagtgaaatactcctagagttgataaccaccacctaggtttttttccctttggtctacatgtataattatgccgcctgataccttttgggtttcagtgtaccatatataccagtgtacaggttcggacctgaacattaatttgattgatagtggtctactggtcttgtatgtgctgactcgttgtgcaccgagtggctggcaatgccgcgtgtaccaggagttactgcaagctgc

SEQ ID NO: 20353 - DNA, 708 bp, Zea Mays
cagtgctgtgctaggaggctgataagagcggcactgcaagaggcagccaagaaaagagagatgaggtactcggacctcaagaagattgaccgcggtgttcgccgccacttccacgacgacataacagtcatagtagtgttccttgactccggcctcgtaagccaggcgagcacacaccgaggtccaactctttccttgcgaggcggtggcggcagcgctggcctgcgcagcaacacacttgcacctacgtgactataaagtgcctggtggagtggaggctactgactgaaggagaggcgccgaagttcctcaccagcgtatctgaatgccctcaatggtgtcaagttgtggactcaagtggatagcttcgctgaatcttctgatgatgctctgtggaaagctcgaatcctttccacctgaaaaagcaagtaatatgtcttccagtgctggaattaacccctagtgcatatatatatgtatgaaataataataaggcaaaaggaggagtaacttatttaactaatgctgtgaggtgtatttatgttttgtatgtgtactgctttttgactgctactgcatctactgttgttaattgaccactggtgaagtgaaatcactggtttcgtcttgctgtctcactgttactagttgttcacagcattgctggtttgactgttcctactatatacatatagtttatatattata

SEQ ID NO: 20354 - DNA, 840 bp, Zea Mays
ccatcccgtcccgattccaatccaatcccccgcaagcgcgaagagaggagacgagaagggggagggatccacagttcacacacaccccgcttcccatggcgctagcgctgcgctgccctcccgccgccacctcgtcccggagccccttcctaccgtcgacctccccagcccctgcggggaaggtcccgaggaggccgcccgccagctggaggtgcctcgcctactacggcgacggcggattccgcaagaactacgaccacatccccaagcagttccgcgaggagaacctcaaggatggactgatggataattacaagcatgttcctcaattcctttatggattaagtgatgctcagatggaaatgtttatgaatgacgataacccttataatcggcagtcccagaaagttacagaggaaagcgtttctgctgcgaggagctacgatgagtttggtatgtacaccttgtcaggcatgcatgagggccctgcaagttacagcatgggtatgggcatggggggcagcatgagcatgagcatgggcagaggagggagaggatatagaagaatgagaagctctgctccagatcttccgtcattgctactggactctcgaattatatttcttggaatgcctattgttccagcagtaactgagcttattgctgctcaatttctatggctagactatgacgaccgcacaaaacccatttatctgtatataaactccactggaactatggacgaaaataacgagcttgttgcatctgaaactgatgcttatgcaattgctgattttatcaatgtctctcattttcaagaactatgctggataatcttgg

SEQ ID NO: 20355 - DNA, 797 bp, Zea Mays
gctatctcttcctttctcttgcagcaaaaaggtctcaaagtctcttgagagtgactttagcaataaaatgaaccagctgttgctaatagttctgcaaaaacaaaggcaacaacagatgatggatggttttggaggatactatgatgaatgcatgtactggagacaaaatgatgaaattcatgatgctcataaggaggcatctgctccatgttcatcagctcctgtctcacatcttggtgctcatcagcaagagtgttggcagcactcttcatatggaagtcaacatcacgataaccaaaatttacttgaaatggaagtcagggtaaggggtgaaatgtcccagattcaacatgaaatatatgaactgcagaagttggtggaaagttgtattgcatcccaagtaaagatgcagcactccattaaagaagaggtgtgcagtgcacttcgtgaggcaggcttgatgccaaaccaacccgacacaacagcagcaaaagggggtaattgctgcatctgccatcgaatgcaagttgactctctactttacaggtgtgggcatgtgtgcacctgttttgactgcgccggtcagctgaaatcgagcggcaggagttgcccaatatgtcagactcctattgatgatgttttccgggcgcagctgaatttttgagcttaggatttaggaaaggccaagagaaaagagccggcactcccagatttagatgtggagtttgcgaactgcgaagccctggatgcttcgtcgacgcgaggaattctacggcgaccaggtcgcctctggagac

SEQ ID NO: 20356 - DNA, 905 bp, Zea Mays
attgcttcctgccttggtgtttttcttctcccgttcaagtcgcgtgccactttcttctctcgttcacctcgcgtgcgcgaaccaactagggcgaccgctgccgccctacggcctacgcccagctgctcaggtcttattcgggcctttggcggcgagaaccgaccccgccaggataatggctcaccgtggacacctagatggactgactgcccaagctccagcactgatgcgccatggttccttcgctgcaggcagcctttctagccactcacctttggagtcttcatctacactggagatgctggagaacaagcttgccatgcagactgcagaagtggaaaagcttatcatggagaatcagcggttagcatcaagccatgtggtcttgaggcaggacattgttgatacagagaaagagatgcaaataatccgcacccacctaggtgaagttcagacagagactgatttgcatattagagatttattggagagaattagattaatggaggcagacatacatagtggtgatgcggtgaagaaggagcttcatcaagtgcatatggaggcaaagagacttattactgaaaggcagatgctgacccttgagacagaggatgtgaataaagaattacagaaactctctgcctctggtgacagtaaaagccttcctgaattgctagctgagctagatgggctaaggaaagagcatcttaatttacgatctcaatttgaatttgagaaaaatacaaacatcaagcaagttgagcagatgcggacaatggaaatgaacttgatgaccatgactaaacaagctgagaagttacgaggtgatgtggcaaatgctgaaagacgggcacagggtcttgccgtcttagtaggggcggagggtagtggaggtgaatctg

SEQ ID NO: 20357 - DNA, 643 bp, Zea Mays
gcacatttatggattggaatcccataatgcctccaatccatttccatgccaggtatttacctaacgtacattgaacctgcacacaaccctgtctgtgagaccagaaggtagatttcttcaaggggaacaatgtggtgtaacttcatcagcacaaccactttgctgaaggtgtccggatcatgatgcagacaacaactggtgtactcattcccactttgatggtaatcgaaatggagacaaacacaattggagggaaaatatccaaagacaaaaggagtgagttttcacttcttcagattccaccaatcagaataagaactagacatcatagagaccaacttttggtaagagcaacaaaaaactggactactaaaatttactagcgtgatcttcaactgtcctgttaccaatattttttggggtctattatggatagcaatatgcatttgttctttgtacagagatttttcctcgcaatattatgttcgtttggtcatttgtaattattagcagtaaataaacgccatttgcttcaacggttctaggttgtacacaggtaaaggaacaatcgattaccaatgactaagggtattcataaattatgctacggtcccatggctaaaatccctaatcatcggcgacg

SEQ ID NO: 20358 - DNA, 1514 bp, Zea Mays
agaaattttttgctttaagatttctgttggaaagaaatgataacatatattgcatccattttagagaagatgggatgtgaacaaaattggtgaggttagggcaccctgctcgtttactgcctcaagtgctcgacagcgctcttgatgcacaggttttacgagctgataatagtagcttggcaggagacattcgcaaggaaatgaaggtgctcaatagcaaattgctgaaggctaaagataggaacactaaacgggacatcaggaaagagctcaaaacgcttgcaaaagaggagagaaaacgacagcagcttgcagtcactgatgtactgaaaaatgcagatgttgtgctgaccactctgactggtgcatcttcgaaaaagttaaacggaattacatttgatttggttgttattgatgaagctgcccaggcacttgaggtggcatgctggatagccttgttgaaagggccgagatgtattcttgctggagaccatcttcaacttcctccaacaattcaaagtgttgaggctgaaaagaaggggatgggaaagacactctttgaacgccttactgaagcttatggagaggaaatcacatccatgctcactgtgcagtacagaatgcacgagcacattatgagctggtcatctaaagaactttacaataataagatcaaagcacattctagtgttgctgggcatatgctctatgatctagaagaagtcactagatcttcttcaacagaaccaactattgtactcattgacactacagggtgtgatatggaagaagtaaaagatgaagaggagagcaccatgaatgagggcgaggcagcagtatccattgctcatgccaagttgcttgttgagagtggcgttaatgcttctgatattggaataattacgccttacgctgcacaggtaacctgcttgaagatgatgagaaacaaagatgccaagttgaaagatttagagatatctacagttgatgggtttcaaggccgggagaaagaagccatcatcatttctatggtccggtctaactcaaagaaagaggtggggttcttgagcgatcacaggcggatgaacgtggcggtgacgcgagccaggaggcagtgctgcctggtgtgcgacgtggagaccgtgagcagcgacaggttcctgaaacgcttggtcgaatacttcgaggagaacggggagtacttgagtgcttcagaataccagagcagctgactggcgtcgatcagatccattcagctcttcttctagtggctcgtggtggcatctggctggcatgtccgtggagcaagtggataggatccgcatggagtcttggagaacacaatatcaagctttggttcctagatatctcagcttttcttttcttttctcttggtgaacgcataaatgatgtattgttgtgacgttgccaatgccatgggaatgagatctttaacaaaacaaaaaacaaaaaaacaagagggcagtggagaatgtgctgtggcatagtgtgtg

SEQ ID NO: 20359 - DNA, 404 bp, Zea Mays
tgggaatgcagcccaaatcgggcggtaaactccgtccaaggctaaatacaggcgagagaccgatagcgaacaagtaccgtgagggaaagatgaaaaggactttgaaaagagagtcaaagagtgcttgaaattgccgtgagggaagcggatgggggctggcgacgcgcaccggccgtatgcggaacggctcctgctggtccgccgatcggctcggggtgtggaccgttgtcgcccgcgccggcggccaaagcttgggggccctaggcgcccccggcagccgtcgtcggcgcggacggtatccgcgcgcctctggcgcgcccctcggggcgctgcgccgcaacggcctgtgagctccccatccgacccgtcttgaaacacggaccaaggagtctgacatgcgtgcg

SEQ ID NO: 20360 - DNA, 2903 bp, Zea Mays
cccactgctgcttatctcgtggccgatccgcgctcgccccgtccccgcatctcgccgccgcgccccggtcagtgtgcgcttgagacatcgcccacacgagacatcgtgtgtgatgcccgcccccaacccttccccggtgtgatgcccgccgttgacgtctcttctctcgcccccatcctcctcaacctcggcgccgcccctgcccctgtcctcgatggcaaggaaacttcccccgggcataaatctcactgctcacgcgccattagcgccatacccgctacctcctctggcatgccacacgccgccatccccctagcccatcgtgtgtcacgcgcccagatctcctatttttacgcccccacgcaacataggccatcccaccatggagcaagaaaccctagcgtagccaccaaccactgctgccccacatggcatcctgactgtggctgcatccatctcggcgcctcgcccaccacgttgcaccaccaccgccgctcctcctccccaccgcgctgtcgccctgagtaccaccgccaccgccaccgtgcatgtcgctagggccgcatctctcgatgttagggcccaaccgaacatcgtcgtcgcctccacctctgcgtctgggccaccgcaagagtttagggctcctccggggttcgagatcatgtccgaccagcagagcagcatcctcagcaccatgctcgacaaccccctccacctcggtactggcgtcttcgccctcgggtacgcaccacaccttttctcaccatccgagcattgccaaggagctcctctccatccccaacgcgcgccacgccccaccaccaacgatgaatgggtgcttcagattcactaagacgatggcgcgtctgcggcaaggagcttcagattcactgccatcagaaacttgcaggtgaggaaggagagggtccaagttcctgacctctgcatcgattgggagggtccaagttcctgacccctgcattgactgattatctttgagtttaatcattatgttgaaattggtgtgcattcaaaatattcaattgattctcacggctaccatggctcctagcgaaacttgtttatcgttggtgtatctggcgtattaatggaaaaaatttaccttctctctttgagggttccagtccatttcgttctctataattgtcacctacccttcctgagcctacttttgttgctaatgtaagaataagaaagaaaaaagcttcatctctatttgtttctgctatgcattgtgtagcttagagttgtcacttaacttacaatcttacgttggtgtaaaacagtgaccacactaaaagcacaaatgcaaggttttatagaccatgtgtgatgctgctaccactaacatgtacaaataggaaaggcaacaaaatggcttagagcaagtattttttaaagaaaaaaatgatccatttaagaaaccttttaataagttactcctgataccaactcctcaattcgcgagtgtcttcagcttcgctttctctatttgttgtatgctggtgtttcttcgtcttgtgtgtgagttggatgagaactggacaactggtaggaaccactctcagtttcagtttctgattgtgtttcactttggttcaggttgtctgcgctcttctcttagggatcgagaatcgcagggaggttcctcgcttctataagaaagatgtgcttttttatttcattttccttgtggagttgtagttcagttcagtttgtcttcatgcatggggagtgcttggttcgattgttcatagccataggtgctacagattcgtctatggccaagacagaagtttttgttttcatgatgttttcatggaagaagatggcgagaagctctctgcccttctcatagttaactcttttgattaagtgattaaccaatttagtaacacatatttaatgtttcagcttgtttggtttagacatggtccctcagtaaattttttatttttttattatctttatccataaactaagttggtatgtagtgacgggtaagaaatactgtggtggtttggacctcagttattggccagatgaagggcgaaggccattatcagatcctcgtccacctttgggctattgctgacaagtggacgagtgtcgtacacctctccaattccccccttcaatgtggtcagtgttgaatcatctacgtcatacagtgagcaagggcatactgatgagggaagggatgacatggatttttctcgttcgagcatcaggttttgtgcgttgattatggtgtgctcgttggtgagactgcgacgtcctcgttcaagtcagctgataatcgtgtcctccaagagcaactactacagaagaatgtggaaatcaacgatttataagaaaaagtttttcacgttgagcaataactctcagcaaaagtggatatatcctctgagaaggaagctgattgtgcacatcaggagactattgatttgaaatctaaacttcagtccaaggaagctaaaattgaaaagatgaaatatgagcatctggcgagggaggctgctttggtagaggatcttcttgaagaggagtacaagaaaaagtttgatgaggcaaacaaggaactatctcttgagaatgatctagcaagcatgtgggttcttgttgctaagttgaaaagaggggctttagacacatctgatttgaatgttgatgatcgaactaaagtgtaagggcgtagagatcgccacactgttgtctcataattggtgttaataaaaaataacatggtgctgcacggaatctctactttgtcttgtaagcaggattgttctgtcggtataatttgatttgtatgtataatgtcttcatgctttacttgcccttttatgaaatgtggcgaccggtcctcttgtctttctttt

SEQ ID NO: 20361 - DNA, 1992 bp, Zea Mays
  misc_feature (1991)..(1992): n is a, c, g, or t
gtgcacctgctgtcttataaaattgtcggccttggcccaagccaaggaccctttcgcttctctcagtctacgactaggcggcggcggcggccttcacgcacgagccttcgccgcctatacttgcgcttcgtcgagccggtgaattgtggtctaagaacaagagggaaggatctttctccagacttcgcaattttggacgacgaggtaaggaagtgtataatcgtgcatactcggtgtttgtttcttggtggcgactgcaattagctttagtttctcttagtgttagggtctgtttggataccaaggctaattgctagctagctaaaatttagctctagtacatccaacatgagagctaatagttgagatattttttagccaagtcttcaactagttattagctaacgacctagccaaccataactaattgagctaatttttagccctaactagtatctcaaacaggcctttaaccttcatgcttgtgcggtgtggttttataaacatgtaaccacagcttggttccaatcttgtattactgtcatttcgaaatataagatgttggtaattaaattgattggaactatgtgtctcttttgctgcacccagattcataaccataatcatgtttaaacacgtgctgtatgaagagtcatctttcatttatcaagggcaactgattttggtctaccatatcgtcctcgcataagtaatttttaggatattgcttataattgtgatacctttgagatcccttttgttaacatagttttatgagcttaaaatcttagaagccatctagctttgaacatgattgattggccactcttcttagaaagttgtcttgaacaaaaaatgaactgcgtgggtattatatgagaatactttggttacatttgaggcttaaactagctcaaagcgcctccaagtaatttgatgccagggattaattcaccacatttgttatgcctgtacatggaagtttattgtagaaggctttcaatctatctgattagatttacatctctactattgtgctatataatttcacaagttcaaaaaactaacagtgtttttatctctcttctatgagatgcacttccttgcatcatttcatgtccctacaggttttgtgttatctggtttgtcgggatggatgccaaaaagttcctgcagctggtcgaagagaagaaaaggaggatcctcgagaagaaagaagccccactaaagtggcagcagaagctagaagcagcagttaacgtcaaagctgatgcagaagcgaaggcgaaaaaactaaaatcaagaaagcataggaggagaggagattcttcctcggactctgacagtgactatgacagcgatgttgatcggaaacaccggaggaggaaggatcgtagaaggaacaagaagcatgagcattctgactctgatgatgccaggagaggcaagcgtaggtccaaaaagggctcagactcaagtgatgagagcaaccgtgaatatgaaagcgggtctgaagaagaacatacaaagaagaagcgtttgcacagaagaaggcatcacagacactcttcaaggtcagactctgaagacaacagtgatgaggaagagcggagatctgccaaggaccattctcagccccgcagacgccaccatcagtcttctgatgatggctcggacaaggtcaggttgagacatgggaagcgtctgagatcaagtgacgagaatgctcggccagattccaacagccataagcatctcaggagccaatccttggaggagtcatcagatgatagagatgatgatggaccagagaagataagaaatggcaaaaggtatcacaagaatcatcaccgtcaccaccatcatcatcgtcaccatcggcaccaccatgaaagacataataactcagcagaacctaatgacaggaggcaagtactgaaagatgaccagagggcccttgaaggtagcagtgcagactgaaggtatccacnn

SEQ ID NO: 20362 - DNA, 1054 bp, Zea Mays
caagtaagcctttctatataaggagagatttcacacgcctattccctgtgtacgaccacaactcctctgccgtcgaagacaggagttgcccttggtcatgagctcactgacaagatgccacctaatgagtactatgagtattttggtccagattacactctacatgtcgctccaagtaacatggagaataaaaacacacggcatcaattggatgacataaaatcaaaacttctagataatctttcaaaactccgacatgctcctagtgttcagtttcaagagcgacctcctgaggctgagttacctgagcaagatgaagacaaagagaatcctgatgaaagacatgatgctgattctgatgtggagatgaatgatgccaaacctttgcaggactctggaaggatgtcaatagtgtagctgcagaacattctagaggcactggacctgtggctgatggagttggttcctcgaaacaaacctttccgaatgccactagtcgaatggccatagatgaaccaaacgctcttgagagttgagcaagagggttcaaacaaattgcaggaccaaccatcgatgcacctcaagtagctaatgtcatctgtagcctgtcgattcttttgcgcaaattcattaactgtaggcaagccatgcgtggactgaagcagggagcagaagcaagtgctcgaccaagaagttgtgcatctgaaatctatattttttgcgcgtcatatttgtattaccgacagttgcaaacgatggtttaatcatgaaaaatttgtctttccacccttggcttctgcagtggaaggggttgatatcgtagtatgcatcaattatgcattttgtccattccccatccccaaatgagaagtgggtagtccccgacgggttttgaatggccaacagttttaagggagggaagcagcccggaggccaaaaaaaaagcaacgagatgtacggcatcagattgtttgcaatgttttttttttctaaatttgatcatttatatcttacttttacgccacgttatctaaattctgcccctatttttctc

SEQ ID NO: 20363 - DNA, 900 bp, Zea Mays
ggcctcgtgctttttggccatctatgagccgcacacttagcatacatacgcaagaagaggagaggccggaggtgcgcgtgctccttgctgttctgctgactggtctcaccatctcatcccaccaccaccaccaccaccaccatctttaggataagatagcaaatatatggccatcatactcgtacgagcagcgtcgccggggctctccgccgccgacagcatcagccaccaggggactctccagtgctccaccctgctcaagacgaagaggccggcggcgcgccggtggatgccctgctcgctccttggcctccacccgtgggaggctggccgtccctcccccgccgtctactccagcctcgccgtcaacccggcgggagaggccgtcgtctcgtccgagcagaaggtctacgacgtcgtgctcaagcaggccgcattgctcaaacgccagctgcgcacgccggtcctcgacgccaggccccaggacatggacatgccacgcaacgggctcaaggaagcctacgaccgctgcggcgagatctgtgaggagtatgccaagacgttttacctcggaactatgttgatgacagaggagcggcgccgcgccatatgggccatctatgtgtggtgtaggaggacagatgagcttgtagatgggccaaacgccaactacattacaccaacagctttggaccggtgggagaagagacttgaggatctgttcacgggacgtccttacgacatgcttgatgccgctctctctgataccatctcaaggttccccatagacattcagccattcagggacatgattgaagggatgaggagtgatcttaggaagacaaggcacgaacatgcatgtgttcaatagcacagatgtgatgatatgactgtcaccat

SEQ ID NO: 20364 - DNA, 3281 bp, Zea Mays
gttgctaccactcaagtgcttctctattagactgcggttgttccacttggagatgaagagttgcatttagttgcgatgacatccagaagaaacttgacaaatcatgcatgtttctggggctataaattgccatttggtttgtataattcttgcttgaccatgttaaatcttcggtgcctgggtattgtatttgaccttgatgagacattgattgtcgccaatacatcacggtcttttgaggacagaattgacgcacttcaaagaaagctgagtaatgagactgatccacaacgtaggaatggtatgctatcagagatcaagaggtaccaggatgataagtccatcctaaagcaatatatagaaggtgatcaggtctatgatgatggaaaagtgtataaagcacaacctgagattgttccaccattgtctgataaccagcaaccaatgacacgtccagttataagattacaagataaaaacattatcctgacaagaataaatcctctgattagggataccagtgtgcttgtatgtttaaggccagcctgggaggatcttcgcagctacttaattgccagaggtcgcaagcgttttgaggtctatgtgtgtacgatggctgaaagagactatgctttagaaatgtggagattgcttgatccagattcaagattgattaattctgttcaactccatgatcggatggtgtgtgtaaaatctggtttaaaaaagtccttgctaaatgtcttccatgatggttcttgccatcctggtatggcattagtaattgatgatcgcctgaaagtttgggatgagaaggatcaattacgagttcatgtggttcctgcatttactccatattatgctcctcaggcggaggcaaattgttctatcccagttctgtgtgtagccagaaacgttgcatgcaatgttaggggtggtttcttcaaagactttgatgaaggcctcttaccaaggattagcaatgttcactatgaggatgaagtaaatgagatatctgcgccagatgttggcaattatttgataacagatgatgaaaatgtcgcattagtgaatgggaatagagattcattgccttttgatggtatggcagatgcagaggttgagcggagaatgaaggaagccaatgctcaatcattccatcaaacagcgggagactttgtcatgccagtagcccctgcccagaatttcgtttcgacttcagttgcatcattagccccacctcttggcatgatgccatctccatttagccagccagttgctccaccaggtttttcagattcactgcaaggttctccagctagagaagagggtgaagttccagagtctgagttggatccggacacaaggagaaggcttcttatattacagcatggccaagacacaagagatcctacatctccactaccagcaataccacccgtccaagttccagttcctccagtgcaaccccatgggaattggtttcccacagaggatgggataaaccaaagtaacctgaatagaggctcagcaggattcactgtagaatctgattctattgtctatgagaaaaagcaaccacctcatccttcattctttcatggtggggatagtcctatgccgtctgatagatttggctatcagaaccagaggtttccctctcagctaccacacgaggatcaccccatgatgcagaaccatgcacctccaaaatacagatccttttctggtgaggaactagcatcttggcatgttccctcaagccagagaaacaaccagatagaatcaggaagacactttgcacaatatgctgggacctctgctggcatattagaggggattgctctgaaatgtggttctaaggtggagtacaagtcagcattatgtgatactgcagaactacaattctctattgaggtttggattgttggggaaaaggtcggtgaaggaattggtaggacaaggagagaagcacaacgccaagctgcagaaatgtctttaagaaacttggccaataaatacttgtcatctgatccaaataagttgtctgatatgaaagaaaatgatttcagtagcaacagaaatgtctttggttactctggaaatacgagggatgatatgttgccactttcaagtacttccgaggaatctcgctttatgaaaatggagaacaataattcccggaaaacaggaagttctgttgctgctctcaaagaactttgcactgttgagggatataacttagtttttcaagcctgtccatcttcagcagatggtttagttgggaaagaatcttatgctcaggtacaagttggtggacaaattctaggcaaaggagttgggttaacatgggaagaggccaagctccaggctgctgctgaggctcttggaactttaagatccatgctaggtcaacttggtcataaacgatctggctctccaaggtcattggcaccaaattttaacaagcggttcaagccagattttccaaggaccgtacaaagagttccttacggaacatattctaggatcgaaggtcatgttccttaagaggtctgcataaatgatgtgcctgggcgctaaacttcaaaactggatgaagctttgaactgtcaggtcttcacacattgaatgcaagccgtagattcctggcttatagttggcttccaaggctctcacaagctgccactggctgagagtaccgacgaatataaaatacgtacttcatttaagtaagcgccaagagattgaaggattaatggtggccataactttatgcagaatttcattgccatgatcttaccagtcacaagtgttaccccatgttgtcaacttggcataatcgttgacctggaagtttaacggttgaaccagggaccggcatgcagctccatttcttttttggtgtgtgtccatggatcaaagagcagcgccgtggttgggcatttttacccttcctttggtttaggtgaaagttggacctctgtagctcggagtcttagcaggtagccagtttttatttctgataagtttttaggcaagttgtaagttgtagcacaaaatcgatcacttgatagtattaacattgcattgatgtagacatgtagtcatctttgtagctgtactctaggcaagcaacacgaatccagtggcttacatcattcatttgtatgctgtagtcatcttgtaatatatggcccatttctttgcaaggctggaaatttgcctctctaagggccagtttaagagtccaaaaaccggagggaactggaggggttaaa

SEQ ID NO: 20365 - DNA, 2197 bp, Zea Mays
ccgccgaccccgccacgccgcgccccggcagcgccgccgacccggcctccgcctccgactccgacaccggctcgccgcgcggccgcgtcggctgcatcgtcaagaagctcagcggggcgtcgtcgctgcccgaggatgagctcgacgacgccgccaagtccgagctctcgctctcgcagtccgcgcccccgtcgcccgcgcccacgcgcgacgcctcgcagtacccgccgtacgcgtcgggcgcgatcaactgcccccgcccgccgcagctcgtcgtccggacggtgcgcggccgccgcgccatggaggagctcgtcgccgccatcgcgcaccggcggaggcgcgaggtcgccgcgctcgccgagaggcacgccgtgtcccgcttcgcgcacaagggcaggatccagtccatgcttcgtctgagattgttacgccagagaggtacagttgaggatgaaccgtggagtctactaaagccggttaggccacaccaacaaaaacatgtgggcaagttgaggtacgatagcagggacacagacttacaaaaagcaaacaattcctgtcaacaaaataatagcaagtgcatgcctgacgaacaactttataacgatagagttccagctgaggaaaaatcaaatgatatatccgctgaaggccttgttgatggttcaggaaatctacagtgtgatgagcagatgaaagcaaagggggatacatgtcagaaagattgtgaaaacttttgtgttcatagtcaacactattctgaagcatcaagctttgcaaggtatggtgagcatagtactatcgatgagaatcagtttgtggaagatatctccccaagcactacaagcacgttgcatgaactagaaactccatcgtccagaggagataatcttcgcgaagaagacaaccaaagcataaacggttcctgggaagagagagggttatggataagcagcctaggttggcctgcaccaattgatactatgagtccggatagctggcatcaggaaacaatgggtgatattgagaatcataataatccaattcaattcaatgaccgcccctggatagagtcccctaactcgtggagatcactatgtgttgtcacgcaatcagactgtcatgctctgtcacacaatgctgacatttgcaaccttcttgagagaaaaaaggtctcaaagtctcttgagagtgacttcagcaataaaatgaaccagctgttgctaacagctctgcaaaaacaaaggcaacaacggatgatggatgactttggaggatactatgatgaacgcatgtactggagacaaaatgatgaaattcgtgatgctgataaggaggcatctgctccatgttcattagcccctgtcgcacatcttggagctcatcagcaagagagttggcagcattcttcatttggaagtcaacatcaacaccacgataaccaaaatttacttgaaatggaagtcagggtaaggggtgaaatgtcccagattcatcaggaaatatatcaactgcggaagttggtggaaagttgcattgcatcccaagtaaagatgcagcactccattaaagaagaggtgtgcagtgcacttcgtgaggcaggcttgatgcgaagccaacccgacacagcagcagcaaaaaggggtaactgctgcatctgccatcgaatgcaagttgactctctactttacaggtgtgggcatgtgtgcacctgttttgactgcgccgatcagctgaaatcgagcggcatgagctgcccaatctgtcaatctcctattgatgatgttgttctggcgcggttgaatttttgagcttagaatttaggaaaggccaagagaaaaagagccggcactcccagatttagacgtggagtttgcgaagccctggttttgaggcggcttcttacctttttgcttaaccaccactaaagaaatacgagctagttcttggagaaaatgtaaatatgtttttttggcgcaagagcggtgtgcttgtatcgcactaaaggaaaacagagttctaattaaaatgctggttgtattccccgtatgtaccacatcacttgttcacggagagaatgtaatggttctggttctatttgcgcgataggtttgaactcacagcattgatactcttcactcaggcctatttgaacaaattcaacgccaactaataatatgtttggtttgaggaa

SEQ ID NO: 20366 - DNA, 2537 bp, Zea Mays
caagccgaccgacggcgaccacctcagcagtcacccgcgatcccacgctctgcccccacctgacacaccctcgcccgcgcgcctcccgtgccccgaggccacgtgaattccccgccctgcccctaccgcccagcatccccagggggcatgccagtaatttccttccgccaccgtgtgccgtccggtctccggaccccggtgggctgtatcctcgcctgacctgcccgcctgcgctacgacgctgcaggccgggctctcgctcgtcgcgtttttatctccacccacctctctctctccgaaaccaaaaccgaccggcctcgctttcgccggttacccggtcaaacgcatcaaccgccggcacgtctccgatcggatcacgatggctgccccgtgcccccgccggtcaggccaggtcgcgtggtcacgtgcgacgcgcatgccgtcctcggccggcgccccagccccctcgccgtgtccttttattctcccccgcctcaccgcccgcatccccaattcacgcccccaccacgacttccgtgctcgccgccttctcggactaggggggttcggctcgagatctgatttcgggcgccggaggactacatggaggttagggagatggcgatggccgcggcggctgcggctgcggcgtccggcgggggaggcgtcaagctgccgccgcccaatcccaacctgccctacagggaggactgctggagcgacggcgagacggcagctctcgtctccgcctggggcagccgctacgtcgagctcaaccgcggtaacctgcgccagaagcagtggcaggaggtggcggacgccgtcaactcgcgccggggagcctccgcgcggcgccgcccgccgcgcaccgacatccagtgcaagaaccgcgtcgataccctcaagaagaagtacaaggccgagctcgcccgcaacgcgccgtccgcctggtcctacttccccgagctcgaccgcctcgtcggcccaaccctcagcgcctccgcctccaagagacccttggcgtctctgcctcctcaattcgctttgcccatgcatccaccagccgtgcggaggcccccgtcgccttcgccgtcatcgtcctccccgccgcagccgcctatggctttgcctctacccaattaccgccgtgggtccccgctccctgctgctgccctcatccagaaggaagccgcggctgctgcggctgctgcgtctgattcagaggactccgatgatgcggctggcggcaataatcacaaattgccccggtcgccttcgcgctcggtgtcgtcactctctgccagtaacaagaagcgctgcagagatgaggctggcagcagtgctgacaaaggtttcagagagttagcaagggcgatcgaagcttttgcggagatgtatgagcgtgtggagagtgctaagcaaaagcatgtggtggagatggagcgccagcgaattgaattcctgaagcaactggaggtgaaacgcatggagaatttcgttgatgcccatgtgaagctggctagagcaaagcgcacgaagaagactacagggggtgctgccgacggtgctggtggtatggagttggttgccaccgttgctgcgctgcctttcgtctccacctccaccttcctctgatattgaggaagagtttagagaaagagggagcaaaaaatggtggtccaaggaagcaagctaatccgaaagatagcaagtgaagcgtttggccgggcgtttgggtggtgcgaatttctgggtgatcaaaactggaatgtggattctgcagttggagatagcctttcttttagttgatgacttgaatctgtgccttttgttttcgcctgtctgtcgtgatctggttgtaaataagaaagtcttatgccgctagtcgcaggtcgaactttatcttctatcctaggccctctacttatctaggttgatagtgtaaggtgtctagatagagatctgacctaattgctattctgtcggatcgtttgatcgcgatggatgtcgttgttctgaaactttcctatttcctaatgaaatagggggcttcgccccttcgtcaattttttttgggatggatggactagttggtaaagtacttgcacatgtgttctaaactgttgatataaaaaagggctgtcaagggcacggtgatcccaagtagctggccctcgactgcggagctcgtagtcggcggccgattcctccaaggcggaggttatgcccctcacgtataggtgtatatttgggccgggcctaatgggccggctcgaagcacggaaaaaaacacggtctaggcacggcacgacacgaaatattttagtgccgggccgacacggcccgatatatcggcccgggtttgggccgaggtcgcggcccatgggcgggcacgacccgtttaaggcaggcacgaaatggcccatatagaggcacgaaaagactcatatatttattaaaatcacacttcattccacactttcatgtatttgataaagaacacaaagctagagataatgttagttagatgtttttta

SEQ ID NO: 20367 - DNA, 1041 bp, Zea Mays
cttttttgttattgtttatttaaagggtggcggccttgctgacaagaaaagcatctctgagacgctaagagatgcatgccgaaaaagattgttggatgctcttggacaagcaaagttgcgactcgggaatattccgtgcggagacgaggcttctgctacacaccttgaaacagagtgcttcaaaaaatatgtgaaggcgggcaagacgttctacaactcacagatagccgccacagttcggtggctgtcatctgcaacactcagtcagatgcgtgaccgcctcgacactctttatcgaccgaaccaaagatgatggtgcgtcaggctgccccgacattgtcccagagtcacctccagcatctcctgaaatcgtcgtcggcgcaaggtcaggagaaaccagtaacgacaaaccgcagcatatttgtgagttgaagagttcagatgagtctgcaaagggtgctgcatcatcgactgggaacatggtgctccccgccataccgacgttcagagaattcttgagccaaaaaggaagggatcgggcgaagtgctattcaaattctaatgcgacgaaccagccatctggtattcgtaggaagtttagtggtcaccttgataaggaagaagccagcaagaggatgaaatcatgaatatctgtcgggcaacttgattttttttctgccttttcgttgtcactaatcaaacattgcaaatctacgttgtagtgaaacgttcctgaatcagaatctccatgatgattttcttattatatctagtttgtacagtgaaaaggggtgttctacgcttctcgtgcaacatgaaggatctgcctcccaatccctatccaccctctataggttagtcatctcatgtggacacagccagaagggaagcggtaaacttaagcaagtatatacacatgtcggacctataacaccctatttgatcagctcttacaacggtcaactacacctgacgcaccctatttgatccgaggaatccttctcaagctccgcgatcagctgctcaatgtttcttctgtat

SEQ ID NO: 20368 - DNA, 513 bp, Zea Mays
cttgccacatctgcattcggatggttgctagtaacggatgacgaggaggcatacgacctgcctgcgttccaggagtttaccttcgagcagttgcggctagctacatcagggtttgcggtggagaacatcgtgtctgagcagggtgagaaggctcccaatgtggtatacaaggggaagctccatgcccagcgccgcatcgccgtcaagcgcttcaaccgctctgcctggcccgacccgcgccagttcctggaagaagctagatcagttggcctgctccgaagcaaaaggttggcaaatttgcttggctgttgctgcgaaggtgatgaaaggttgcttgttgcagaatacatgcccaatgatacgctcgcgaaacatcttttccactgtgagtcctttgaaaacattctatcataaagctgcaaaggcctgatgggcatgattaagtcagggatcagtccacacaagtgactcgatcacgcttcacccgagcctagcctcggccgaaggcagccg

SEQ ID NO: 20369 - DNA, 1571 bp, Zea Mays
atgatgtcgggtcgaggcagatcaggacacacgctaggagtcgcgggcgggggcgggatcagggtaggaagacgacgcgagcgggggcgggattacaggaaggaagatggcgtggcgcgaggctggagcgggggcacgatggctgggtatatgtcaagagggccccaaaatggttctgtgtatgtctgcaatctacctcctggaactgacgagaatatgttggctgaatattttggcaccatagggttgctaaagaaggacaaaaggaatgggcgcccaaaaatttggatctatagggacaaagtttccaatgaaccaaagggtgatgctacagtcacttatgaggatccacatgctgcttcagctgctgtggaatggttcaataacaaggatttccacgggagcactattcaggttcacatagctgagtcaaaaagcaaagatgctttcgataaccccacaaatttgaacaccattgctggtgtcagtgaacaagatgaagtggataacggagcaggcagaggtagagggcgtggtgatggtcccggcaaggcttggcagcaagatggggactggatgtgtccaaatacaagttgtggcaatgtaaattttgccttccgtggtgtttgtaatcgctgtggagctgcacgccctgccggtgctggtggaactggtggtggaggtggcggtaggggtagaggccgtggtaactctgatgcaagaggaagcagtcgtgcgggtgctggtgctgctactggtggtggtccacctggattatttggcccaaatgattggccatgtccaatgtgcggcaacatcaactgggctaagcgtaccaaatgtaatatatgtaacacctccaagcctggtaccaatgaaggtgaaactggctcaaaggaggtgcagtgccactttggcccattgccaattgttgtttgcattgccatttttcttcattttaggggtggccgtggtggtgggtacaaagagctcgatgaagaagaactagaggaagttaaaaaacgccggaaagaggctgaggaggatgatggagagatctatgatgaatttggcaacctgaaaaagaaatttcgctctaaagctctgcatactggaagtgcgcagacacttcctgggtctggacgtgctggatgggaagttgagcatcgtggttctagtgaaagggaaggcagggagaggagcagggatcgtggtagggacgactatgatgaaaaggaaaccaggagcatagatagaggtgatcatggaagggaccagcgccggagccaagaccgcgaaagggaaaaggggagggagagaagagaccatgagtatgagagaagtagggagcgtgaccggcgccacaggtgaagagagaaatgacagggctttctgttcttacatcgcatttgccactttttgtagccatggaacccgtggtcttgtgttagtatctgggggcgtgcattgattctcagaatctgatttttgctttgaatgtttcgctgcattggcactttattcagatatgccgttccttctgttactacttttatgtttgtgaaacacgt

SEQ ID NO: 20370 - DNA, 4054 bp, Zea Mays
cgtcactcctgcacacgatggagcccgagtccttgcaggacgagtttgagcttcaacctgactagataagtgtggcgttctggcaagttagaaaccaaacaggccaaaccttccagaaacgagcgaaaaagcgtccccgatccagcacagacagacacacaccggaaggaggcgcaccttcccccagccccactatacgacgaccgccgcggtcgaaccaaaacagcttcctcctcccggcgtcgcctccgcgacgatcctttccgccgccccatagggttctgctgctcccgatccgggcgccagatctcgcgtggcgacgcgcggatctcggatttctctagaggcggcggcggcggcggccggagcaggaggagatggcgctctcggggatgcgggggctctcggtcttcatcagcgacgtacgcaactgccacaacaaggagcaggagcgcctccgcgtcgacaaggagctcggcaacatccgtacgcggttcaaaaacgagaagggcttgtcaccatacgagaagaaaaaatatgtatggaaaatgctttacatttatatgctgggttatgatgttgattttgggcatatggaaactgtctcgttgatatctgcaccaaagtatcctgagaagcaggttggttatattgtgacatcttgcttactgaatgagaataacgatttcttaagaatggtaataaatacagtaaggaatgacataatcggacgaaatgagaccttccagtgcttagcattgacaatggtaggtaacattggtgggaaagaattttctgagtcactagccccagatgttcagaaacttcttatttcaagcagttgccgtcctgttgtcagaaagaaggctgctctatgccttctgcggctttataggaagaatcctgatgttgtgaatattgatggctgggctgatcgaatggcacaacttctagatgagcgtgatctaggtgtgctgacatctgtcatgagtctttttgtttcactagtatccaacaattctgaagcatattggaattgtcttccaaaatgtgtaagaatattggagagattagcaagaaatcaagatattccacaagagtacacttattatggaattccatctccttggcttcaggttaagacaatgagagctcttcagtacttccctaccattgaagatcccaacgcaagacgggctttgtttgaggttttacagcgtattttgatgggtactgatgttgttaaaaatgttaacaagaacaatgcctcacatgctgttctctttgaagctcttgctctggtcatgcatctggatgctgagaaggagatgatgtcacagtgtgtggctcttcttgggaagtttattgcagtccgggagccaaacattcggtacctcggtctggaaaacatgactaggatgctgttagtaacagatgtgcaggatatcattagaaggcaccaggcccagatcattacatctttgaaggatccagatatcagcattagacggagggctcttgatttattatatggcatgtgtgatgttacaaacgcgaaagaaattgttgaggagttgttgcagtaccttgatacagctgaatttgcaatgcgtgaagagttgtctctgaaggcagctattcttgcagaaaaatttgctccacaactattgtggtatgttgatgttattcttcagcttatagacaaagctggagattttgtaagtgatgatatatggtatcgagttgtacaatttgtcacgaacaacgaagatctacagtcatatgctgcagctaaggcaagagaatatcttgacaagcctgctttacatgagacaatggtcaaggtgagtgcctaccttcttggggagtatggccatcttttggcccggagacctggctgtagccctaaggaattgtttgctattataaatgataaacttccgacagtatcgacaagtactgtagctattcttctctcaacctatgccaagatattgatccacactcaacctcctgatgttggactgcagcaacaaatcctcacaatatttaaaaagtacgagagctatattgatgttgaaatacaacagagagcagttgagtattttgaactaagcaggaaaggccctgctttggcagatgtgttggctgaaatgccaaaattccctgagcgtgagtctgcacttctgaagaaggctgaagacgctgagattgacacagcagagcaaagtgctataaagctacgcagtcagcaacaaacttccagtgctcttgttgtagctgatcactcccctgcaaatggatctgcaccaccagctaatcatctcactcttgtgaagatgccaagccaaattgtttctgacactcaggagagtggggtaattcatgaagaagttcctaatcctcctgttgaagctcccaaagaaaatgggactcccgtcgaagtggaaagcagggacacaaacattactggaatcaacaatgaggttaaaactgaaccaccctctacatcgcattctacctctcccgcggacctcctggcagatcttttgggtcctcttgcgatagagggccctcctgccgtagagcaaaatcctacccaaggattgaatagtaatcaaagtccagttggtgacttggcacttgctacccttgatgatcaatccaactcagttcagccaattgtcaacgtcgaggaaaagttccatatattgtgcacaaaagatagcggagtgctgtacgaggatcctcacattcagattggtatgaaagcagagtggcgtgcccatcatggccgtcttgttcttttcctgggtaacaaaaatacttcagcccttacgtcagtgcgggtgctgattttgcctcctagtcatttgaaaatggaactttcgtctgttcccgatactattcctccaagggcgcaggtgcaagttccacttgaggttgcaaatctccgtgcaagtagagatgttgcggttttagatctctcatatacttttggaacttcactggtggatggcaaacttcgacttcctgttgtattgaataaatttttgcagcctataactcttacccctgaagaatttttcctccagtggaaagcgctgactgttcacttgctgaaggttcaagaagtggttaaaggtgtgaaaccaatgcctctttctgagatggctaatcttttcatgagccttcacttggcggtcgctcctggacttgataacaacccgaacaatctggttgcatgcacgacattcttttctgaagcaacacgggccatgctttgtctgataagacttgaaacagatccacaagacaggacccaactgcggctgacagttgcctcgggcgatcaacatttgacattcgagttgaaagagttcgtcaaggaacatttgattgatatcccaaggactcaggctgccccacctatggcaatggtccagccacagttgcttactgcagcacctgccacatacaatgaccctggtgccatgcttgctggattgctatgagaagtaaaaaaacaaaagccatagtgttttgatgtacatgacagatgttgatctaacatctccaaaagcatcttgctgccaagacgaacacgtggagcaacgaaagggctggcggagtagtcttcagctggattctaaaccgagaaaaagctagattcttttgggcggtttgaaggcctccttcccctccatggagcagtccccatattgtgtctgttggtggacagtcggtagttatgtgtgttaatataaggtgctaggttttccaccatgccggttgtaaagttgagttggtgcgcattgcattacgatttgtaccaataaggtcgaaatagggaaaggaaattaatagggttttgttttgtgcattttatacggtctgcatagttccgatcccttggactgtctgtttctttcctggtggcggtgggtgtgtgatggcacaagcacgaggttcacgaggctcgattacataatctaacctggttgacaccggcgcgtcatctttttgcctctttgaagattctaatttctcgttg

SEQ ID NO: 20371 - DNA, 58 bp, Zea Mays
aacagatcacgtcatatcacctatttctatgcagccctactaatttattaaatatatg

SEQ ID NO: 20372 - DNA, 1153 bp, Zea Mays
gtacgggtagctgccttcgcttcgcttccataccactccactccgctgctccgctcgctcagccccctcgagcgtgcagcgcggcggcgatgcccgagctcgcggcggaccacgggccgcgggggcgcaggcggaggcagcgcgggagcgggtgatgcaggaggcggcgacggcgaccgggtgccgccgttcatgggcaacaaccgcgaccacaacccgcgggagctgcgctcctgggcgcgccgcacggggttccacccctcggccttcttctcgggggagtccaactcctccttcgcctcctccgccgcgccgcaggccccgccgccgccgccgcctcccccggtctcctcgcgtcgcccgccgccggcacgggagcgggaacccgaaccggacacggaggacgaccttgttcccgcgccgccactggaattagagcgcggcgggcccgcccccgtccgcggacgcggcggacgcccgcgccgccgcatcgacctccgcggcgagctcgtgatcccaccgggcttcggccgcgaggaggcggaaccggacgcgggaaaggggcgcgcgcgcggggacgccaggaggaggaacttcggcgtcgagatggatcagacgccggccaatgcgggccggaacgggaacggagcgctcgcggacgcggagtcgaggaagaagtccgaggaggcggaggcggacgcgaagcggaaggcggaggaggccgaggcgaggaggaagaaggaggaggaggagagggacgccgagctggctgcgtactaccaggaacagtgggcgaacgaggatgagggagctgccgacgctgccgcggccgagacggccccgctgtatgaggcgtcgggactacggtgcggtgtaaccgataacccagggtgggaaattcaagcacataatgagggaactacagggggctatacttgttggttcagtgttccagataatattaggatacactggtcttatgtcactgtttctgaggttaataaatccagtagtggtggcaccaactattgctgcagtgggtttggcattttttagttatggtttccctcaggctggcagctgtgtagaaatcagcatgcccctcattctgttggttcttctgtgcactttgtacatgagaaaaatatccttg

SEQ ID NO: 20373 - DNA, 5287 bp, Zea Mays
ctccctctcccctcctttacgtcgccgcctccgaatccccacctctttgctcctccgccatcctcctccgcggccgatgtgtgtgccccgccggcccaaaaccctagaggttacgagcaggtaagggtttcgatcggagatggcggctgcggctgcggcgatggccgcacatagagccagcttcccgctgcgcctgcagcagatccttgctggcagccgcgccgtctcacctgcgatcaagatcgagtctgagccgcctgcaaacatcaaagcatttattgatcgagtagtcaatattccactacatgacattgccataccgctatcaggcttctgttgggagttcaataagggaaatttccaccattggaggcctttatttattcattttgacacctatttcaagacatacatttcttctcggaaggatcttcttttatctgatgatatgaccgaggctgaccctatgccaaagaatgccatcttgaaaatcttaagagttatgcagattattttggagaactgccagaatagaagttcttttactggtcttgcgcatcttaagcttctcctggcatcgtcagaccctgagatagttgtagcagctttggaaactcttgttgccttggtcaaaataaatccttcaaagttgcatatgaatggaaagctaattagctgcggacctataaacacccatcttctatcattggcccaaggatggggcagcaaggaggaaggtcttggcatatattcttgtgttgtggcaaatgaaggaaaccatcaggggggtttgtccttgttccctgtagacttggagaacaaatatggtggcacacaacatcgtcttggttcaactcttcattttgagtataatttgggtcctgcacagtatcctggccaaactagtgacaaggagaatcttgttgagatggctttctctgatcgaaaccatgaaagtagctcctctcgtttggatgctatattccgcagcttgcgaagtggacgtaatggacaccgctttaatatgtggctagatgacggtccacaacgtaatggatctgctgcccctgcagtacctgaaggcattgaagaattgctgatctctcatctgagacggcccactcctcaacctgatggccagagaacacctgttggtggtgctcaagaaaatgaccagcccaaccatggatcagatgctgaggcaagggaagtagcaccagctcagcaaaatgagaacagtgaaagtacactgaatcctctagatctgtcagaatgtgctggccctgcacctcctgatagtgatgcacttcaaagagatgtgtccaatgcaagtgagcttgctacagagatgcagtatgaacgtagtgatgctataacacgtgacgttgaagcagtgagccaagcaagcagtggcagtggtgctactttaggggagagcctcagaagtttagaggttgaaataggaagtgttgaagggcatgatgatggtgaccggcatggaacttcaggcacctcagaacgtttacctttgggtgatattcaagcagctgctcgatcacggaggccatctggaaatgctgtgccagtaagcagtagagatatgtctctggagagtgttagtgaggttcctcaaaatccagaccaagaacctgatcagaatgctagtgaggggaatcaggagcctaccagagcggcaggtgctgactcaattgatcctacatttttggaggctcttcctgaggacttgcgagctgaagttctttcttcacgtcaaaatcaagtaactcagacttctaatgaccaacctcaggatgatggtgatattgatcctgaattccttgctgcacttccccctgatataagagaggaggtgctagctcagcaacgtactcaaaggatgcaacaacaatcacaagaattagaaggacaacctgttgaaatggatgctgtttcaattattgcaacattcccttcagaaatccgggaagaggtgcttttgacatctcctgacacactactagccacactcacgcctgcactagttgctgaggccaacatgttaagggagagatttgctcatcggtatcacagtagctccctttttggtatgaactccaggaacaggagaggtgagtcctcccgacgtgacataatggcagcaggacttgatagaaacacaggtgatccctccagatcaactagcaagccaattgagactgaaggtgctcctcttgtcgatgaagatggccttaaagctcttattcggttacttcgagttgttcagcctctatacaagggtcagctgcagaagctacttgtgaatctttgtactcatcggggtagcagacaggccttggttcaaattctagtggacatgcttatgcttgatctgcaggggttttcaaagaaatcaatagatgcacctgagccaccatttaggttgtatggttgccatgcaaatatcgcatattcacgccctcaatcttcggatggtcttcctccattagtctcacgtcgtgtgctcgaaacgctcacgaacttggcaagaagccatccaaatgttgctaaactcttgctctttcttgaattcccttgcccatcaagatgtttccccgaagcacatgatcataggcatggcaaggctgttctcctagatgatgttactaaaccttcttgacgttgtcatgcacaatgctgagaatgaaattaagcaagctaagctagaagcatcatctgagaagccatctgcacctgataatgcagtgcaagatggtaaaaataactccgacatttctgtatcatatggatcagagttgaatcctgaggatggcagcaaagcccctgctgttgacaacagaagtaacttgcaagctgttttgcgaagtcttcctcaaccagagcttagattgctatgttcattgcttgcgcatgatggattgtcggacagcgcttatctccttgtaggtgaagtgttgaaaaagattgtggctcttgcccctttcttctgttgccatttcataaatgagcttgcacgttcaatgcaaaacttgacacttcgtgcaatgaaggagcttcatttgtacgagaattctgaaaaggctcttcttagctcttcatcagccaatggtactgcagttcttagagtagtgcaggctttgagctctcttgtcaatactcttcaagagagaaaggatccagaacagcctgctgaaaaggaccattcggacgcagtttcccagatttctgaaattaacacagcattggattctctgtggttggaattgagcaactgcataagcaagatagaaagctcttcagagtatgcatcaaatctaagtcctgcttctgcaagtgcagctatgttaacaacaggagtagcacctccattgcctgcaggaactcaaaacttattaccatatatagaatcattttttgtgacatgtgagaagttgcgtcctgggcaacctgatgctgtacaagatgcttcaacttctgatatggaagatgcttcgacatctagtggtgggcagagatcatctgcttgtcaagctagtcttgatgaaaagcaaaatgcttttgtgaaattctcagagaagcacagaagattgctgaatgcattcatccgtcaaaactctggattgctggaaaagtcattctcgctgatgttgaaaattcctcgcctgattgattttgacaataaacgtgcatattttcggtctaaaatcaagcatcagtatgatcatcatcatcatagccctgttagaatttctgtgcgtcgtccatatattcttgaggactcctacaatcagcttaggatgcgatctcctcaggatttgaagggtaggctcactgtccaatttcaaggagaagaaggaattgatgctggtgggctgacaagggaatggtaccagtcgatatcacgagtcattgttgacaagagtgcccttctgtttacgacagtcgggaatgatttgacgtttcaaccgaatcctaattctgtgtatcaaactgagcacctctcatacttcaaatttgttggacgagtggttggcaaagctctcttcgatggtcagcttttagatgcccacttcactagatctttctacaaacacatacttggtgtcaaggttacataccatgacattgaagccatcgatccttcgtactacaaaaacttgaaatggatgcttgagcatggatgcagacgaagagaaactgatattgtacgagaaggcagaggtcactgattgtgagttgattcctggagggcgtaacatcagggttactgaggagaataagcatgaatatgtcgaccgggtagcagagcatagattgaccactgccatcaggcctcagattaatgccttcctggaagggtttaatgaactcattccacgggagctgatatctatcttcaacgacaaagagcttgagcttctgattagtggtcttccagatattgacttggacgatttgaaaacaaatacagaatattctggctacagcatagcctctccagtcgtccagtggttctgggaaatcgttcaggggttcagcaaggaagacaaagctcggttcctccagttcgtcactggcacttcaaaggtaccgttggaaggttttagtgaacttcaagggatctctgggccacaaaggtttcagatacacaaggcatacggcagcacgaaccatctgccttcagctcatacttgctttaaccaactagacttgcctgagtacacgtccaaagagcagctccaggagaggttactgttggcaatccacgaagcaaatgaaggtttcggatttggctaatcagtcatgctcgtttgtccgtgagagtctgtacagatactgagcattgcaatgggcgagcagcacgtgtgtgctgatccttaccacattctgaactccacgtgtttgatggccggggagaacatagaagaatctccgtgggagaggtactgatgagagagagcgactattttgtgttcataatattcattacctttttttagcttttttcggtcgttgccccgttcgtagtttttgccttacattggacttcgctccgattttttttctctgcttttccttcatagactggtgtaagatgtaaccgaacactatgtcaaatgcaaatcatcttagggccccttcgattattactgaatggaggcatggaataatttctagccgtactgtttctctactatattaaagcatcagttttagttacacgattgtcctgcatctataaaaaaactaaaattatacataattagct

SEQ ID NO: 20374 - DNA, 2289 bp, Zea Mays
atgacctcatcgggagtcgacacgcagccggaagcacagcaggcgcactacctagagtcacactccccagcaacacagtgccactccactccaaggaagtgcttgcctcccgctctctacctctcctaccaatttcagctcagctctgttctgctcccgcagcaccagtacagaacaccccagaggcagcgagtcctgttcggtgtccggctggaaggccatgggggctagggctacctcccctccgccatggaggcgtcactgcctctgccgcgccctccacttcctcgttctcttgctctggggtacttccgaggcaaacaaagaacaggccatgttgcctccaagagggtggaactcgtatgattctttttcatggattgtagacgaaaatgcatacctgcaaaatgcacagatcatgacagagaagttactcccacatggatatcagtatgcagttattgatttcctctggtaccggaaatatgttgacggtgcatacacagattcctatggatttgacaacattgatgaatggggtcgaccttttccggaccttcaaagatttccatcgtctagagttgatagagggttcagtcaaattgccagtaaggttcatggaatgggcttgaaatttggcatccatttgatgaaagggataagtgtgcaggctgttaatgctgacacgcctatcttggacataaagacgggaaaaccatatctagaggatggccgtcagtggacagcacgagacataggtctcagtcacagaacttgtgcgtggatgactcatggatttatgagtgttaatacaaatattggagctggaagggccttcttaagatctctttatcgacaatatgctgattggggtgttgattttgtaaaggtcgattgtatcttcggcacagattatagcccagaagaaatcatcactatttcagaggaactgcagttactccagcattagctgagaatattagtgatcatgttaacatgtataggataactggagatgattgggacaactggaaggatgtgagctcgcattttggtgtatcaagttccttcgctactgctaagaagattggggccactgggttgcgaggaagatcttggccagacttagacatgcttccatttggatggcttactgatccaagtgtaaatcagggccctcacaggaaatgtaaccttactcttgatgaacagaaagcacagatggcactttggtcaatgactaaatcacctctcatgtatggaggagatttgaggaatcttgacgatagtacattaaacataattaccaattctggtttgttgaagataaaccactatagtagaaataacatggagttccattatgtgcacagtgaaaggacatcaaatggagaacattctggtcactttaggtctccttatcctgttcgtgttaccaagaatgatggcatatttgtcagtctcactgcttgcagcgacgatgcagctaaaggatggtatatgtttccacaagatgggaaaccagatcatatatgcaggaactatgaaatactgaatgataaaaatgtctcattttgcctcggaaaaacaaaacgttttcttgcatcggatgtccttaccatggacaccaaggaacaccaatcaaagtttcatatttcagttacaaacactgatgatacttgtttggatgcatctgctggtcgaaggcagactgcctcagagatcaggcttcctatgttctctgcatgcaggtggcatgcaaaacagatgtgggagttaaatgcgaatggaaatcttgtgagcagctattcaaggttatgtgccacagtggaatcaagggacgaaggaggtaccagtggaggtcgggcatggattgcaactggaagtgaaggagaaatctatctcgcattcttcaatctcgactccatgagcaggaagatgaccgttcaaatatcagaccttggaaaggttctcggaagaaaccttttggagaaaaacccatgtagctacactgaagtttggagcgggaagaatttcggcccggtgaaggaagagatttcagcggtggttcattcgcatggctccatggtgttcgaaatcatatgttgagattgcagtactgggcaagttgttcgagaagtttgcagtgataatttagttgtaagctccattcctgttgatccttttttacccttagtccggagatggaagagatacgttgatgaaccattaactagatgtctgctggatttgacttcaatgaataacaaaacaaacaaacaaacaaac

SEQ ID NO: 20375 - DNA, 2946 bp, Zea Mays
aattgtatgattcatgccaagagagttttcagctgttgtacaattggaggtcaggggtcacgaaggttttcggtagaccatggcttggcagacagcagactactactagcaacaaaatcagtcattaaatcgatccgatcggttcacatcccgcgagataatccatggctgggtgctagggtttacggcttcctccattcgcacgcacccctgggcgctgcgggctcgcggagcaggatcgatcagttcggatggaggatggggagacggaggaggcgcagcgggacgcgatcacggcgaggatgcgggcccaggactacgcgggcgcgagggcgctgctgctgcggacgcttcagacgaaccccaggctggagggtgccctggagatgctcccggtgctcgaggtcctctgctgcgccgccgccggccgtgggggcgtggactggtacagagtcctccaggtgctgcctgtggatgacgccgccaggatcgaggcgcgctacaagagcatcgtggcccaggtggagccggccatgggggctctgcccggcgccgaattggccctcaagctcgtcgacgaggcttacgcggtgctgtctgatccagagaagcgagaggggtttgattcgagcaacgttttcacccggttcgttcggtccggtgtcgttgatgctccaccgcccggtggcacactcgtccgtcctgacagggtgagcagccttcacacaaacaagattatggcgttaaatggtacgagcaatgcagtctcgcgtaccaaccacgccgacaggccatgctttgatggaagggattcccgtctttcaaatgtggcgagttcatccgggactaagaggatggatccttgctttcttgctgatgacggtgagttgcagtcacctgatggcactcatgttaacaaggggcaaaagagtgtcagtgaaaaggatgtttattgcatgtctccctcacaggaaaactgggatacctgctttgatgatccatcacatgctaaggaagaagatttggatgcctgctttgatgatccatctggtaccaaagaaggtgagctatgcagtagcaagtcgtatgaataccataattttgaagaagatcgagcgatcgagaattttgctcctggccaggtttgggcagcatatgactgggggaggtttcctcgtagatatgcactgattgttaaagtactgacggataaaatgcagttgtatgtctcatggttcatgccctgtccgcaaactcctgaagagaagaaatggtcccttgtggggttgccattggtttgtggaactttcgttgcagatgaacaccgaatctcgttaacatgtccaactatgttctgtcaccaaatttccaacaacaacatgaatcaagatcttgaagtgtatccacaggaaggtgaaatatgggccatttatagaaattgggatatcggatggtacactgatcctaggatgtggaagaatagtgacttctctattgttgaaattcttactagctattctaatgaatcaggttacactgttgcacatttgacaaaggtggatggttatggaagtgttttccagaggcattttaagagtggaacagaacatttgttacacatacatggtcaaaatcttatcatgttttctcacaggatcccttctttcaaatttactcatgatgctggaactatgttcgagcttgatcattctgcagttccagaaaaaatgcaccaaaaaaatacatctgcgtgtatttctcatttgtctgagctttcaggtttacctgatgacacagatggcttccctgaaactgctgttgcacaattctcaaatccttcagcaacaagcaaaatggaagcaggttccccgacgcaagccatgatgagctacaataccaagtggtttcccaaggattttctagagggccaaatatgggctgtatttgattctcgggaccggatgcctaggtcttatgtcaggataatccatgtggtttcatctacttcagtttttgtattgaagttggaacctcaccctatgcttaatgaagagatacagtgggttgaagatggtctaccggttgcttctggagtatttcgcgctggtactgaaactacttacaaggatatctgggaattctcacaccctgtagagtgtgactggagtgcaaaaagatctttttaccgtatattcccccaaaagggggaaatatgggcaatgctaaaaaattggaggatcaccttgaataccactgacattgacaaatgtgaacctcgcatggttgagatcctctcggaatactctgatgaaaatggagtaaatgtttgcagcttggctcgggtaaaaggttgctttaccttttttcatagggtagcagtggaggatttctgtttgacaaggtggattccaaggtctgaaatgctcagcttttcccaccgtgttcctgcttttgacattgttgacatcaaagatcatgatataccacaagggtcatggtatctggaaccaagtgcccttcctacaaggatcatacattaacacatgtatagtagcagaagtagccatagccctattgtaatgaactaatgactccacccttctctatccctccattttgaattgttctacttatctccattaatcatcttgtacttactgactcatttgtgaagagaactgtttgatcaactcttcaaaattcccatgtatgaccaattgcagatcaggtctgacaagtgttaaaatttggaaatgaactcttttaccatgaaatacaaaacgagaaagtaacgtaacttaaagtaaggtttactgcatctgtatttgagatttgaccgctgccatcgactgccaattggtgctgctacaggctccctggttgtccaaattatcgtttttgcttgtcactgctctggagaggtgatttgtcttgatatcagaatat

SEQ ID NO: 20376 - DNA, 696 bp, Zea Mays
ccgcgccggagcagtttgcactctgaagcgggttacagggagaaaggacatagtttagcaggtccatctcacccaattccccagccttccgcccttgtttcagcagacaccgaacattgtggaggagctcaaacttgcaagggacatttatgagcatgctgttgttttgagtgtgaaacttgaggaccaagatgcgtttgaacgcgatttctgccagctgaagccttattacatggatacatgtggcataattcccgcctcgccagaggagtacccaattttgggactcaatcttctgaggctgttggttcagaatagaattgccgaattccacactgagctggagcttttacctgccaaggcactcgagcatccttgcatcaagcatgctgtagagcttgagcaatccttcatggagggtgcctacaaccgagtgttaagcgctcggcaggctgtgccacatgagacctacgtttacttcatcgaccttctcgccaaaacagttagagatgagatcgctgggtgcagcgaaaaggggtatgattctctatctgtgagtgatgcaaagcaaatgcttatgttcagttctgaccaagatctgcacgagtacatcactgagctaaagctggtctgcaagccaaacacttgaaaagctatgcaactttaaagatgagctattttactttgaagttcgtg

SEQ ID NO: 20377 - DNA, 1533 bp, Zea Mays
tgtaaaaatataaaagacccgtctccgtctcgggggagcaggagagggggagaggccaagaacccagccgcgaagccaagcccatctgatccggcccctgctgccctgccccagctcgtctctcaggtcgccttgccgttgccggttccgcgcccgggcccggctcagagtcgcgagctcgtctcgcagatccggcttcgcttgcttgaattctgttctttgggagcaaagaggtgctggccggtggcgtggcttggtgctctggggccggcgagtttttttttttgcgtccgctcgctctgcctgtagtcttcttgctgcggcggcggggtggagatgggggtggcgggggagaagttccagctggggacggtgggggcactcagcctctcggtggtgtcctccgtctccatcgtcatctgcaacaaggctctcatgagctcccttggcttcaacttcgccactactttgacaagctggcatctcctggttacattctgttctctccatgtggcattatgtatgaagctgtttgagcacaaacctttcgatgcaaggactgtcatgggattcggagtgctcaatggcatatctattggacttcttaacttgagtctgggtttcaattctgttggtttctatcagatgacaaagctggccataattccctgtactgttatactggagacccttttcttccggaagaaatttagccggaatatcaagctttcccttagtgtgctccttcttggtgttggtgttgcaactgtaactgatctgcaactcaacgttatgggatctgtactgtccctactggcaatcatcacaacctgcatcgctcagatcatgacaaatacaatacagaagaagttcaaggtatcttcaacacagctcctgtaccagtcatgcccataccaggcattgacgttgttccttgtcggtccattcctcgatggatttttgaccaaccaaaatgtctttgctttcgactacacaactcaagttctgtttttcatcgtgctgtcgtgcctgatttcagtctcggtgaacttcagcacttttctcgtgatcgggaagacgtctcctgtaacctaccaagtccttggccatctgaaaacatgcttggtcctcacctttggctatgtcctgcttcacgacccgtttagctggagaaacatacttgggatcctaatcgcggtaatcgggatggttctgtactcgtacttctgcactagagagactcagcaaaaaccagcagaagcctccccgcaagccgttcaggcaaaggagggtgaatcgaacccgctgatctcggactccctgagcgctgccgaaaatggaggcagtgccaccgacgatgaacctctgaaggtaccaatgtggagctcgaagtactcgaaggcgtgaagtggctgttctggtattagtgcacacggtgctatacagaattcagcgtggctcgcaactgatgctcaacctgtgattgcttgcaactttcaaggccacaatctgactacaatgtttccagtttcc

SEQ ID NO: 20378 - DNA, 2040 bp, Zea Mays
ccttgacatttatcaccaagggacaaagcacactaactgctttatactctgggacataaatactagggatcttgtgaagacataggatggttgcaaagaactcgggcatcacttcgttcagttgatgggacaggtcacttcaaggagattttgcatgagataaggtggaacaatcacttctcatcacaggttttggatatgaacatgatgatgctaggatgaccaatataaatttgtttaaggaatttactgccctaagcagggaccatcgatgacctcaagaagctggtggtggcgtagatgggaacgcaccccgagaagatttgcatctagaggtggtgaccccacctctgtcctcaaccgccacctcgtacctcgtcttcggcgccgccggctcctgccccccttggcacgccttcggggtcctcgctggcggcaagcacctccgtcccggaggcatctgccgctgcagcatagaccaccgcgtcctcgctcagcagcaccgatgtcgatgatggcaacaaggaggacggctccgcgagcacccccgagatctgctgctgccactcccacgcagctcttgcttgtgagatctgtgtgcaggttgatgtcctcgtggcgccacgccgacctcaccgccaccaagcgcgccacccatgtcctcaccgacctcgccaaaaactataagaataggtgtagtcactgtcggggtgtacatccaattgagttttgagttggtgtttagctttcccttaccagggacggatcaaagcaccgtaataagtgtcgatatagctctttcaattgcgcctattgttttgtgcgggctatatggatcaaggaaccctctttgcagcagaggtttgttttgtgttctgctgctagtagtcgcatgtcagtttaatcttttgagttctggaagctgttggtcccttaggtgtttgggagatccttttgaatcgaagcacacacactcaggtgctatgacctttggcatttcatagttgcatatttaactggtgtgcgaagagcaccaggatagcacccttgcagcaggaacttacttttggttgcttttctgttgcctgtcatatcccgatatttgtttcctgcaaatttactttgtttaattgtattctattgattttacagcttttgtacttgtacagttacattgtcatctggtttctattgcacgtgtagctgattagttgtagtcactatcttgcaagcatagatattagggaggtattatgtccagtcaagttttgtgttggctatgtgtagcgaattaggattgcttttcctgggatggatcagagcacatgtactgtggcgatatagttgtttcaatagtatagttgccaaattttatgtgtgtgctatatagaccagggaacccacttagaagcagaaaattttctgtgtgcgcgcgaaattttctgtgtgtgctaacaaattgcaggcaaccatcttaacaacaaaagaggctcgtacaatagcagagatgatgctaaaccacttgtgcatgcaaagtatcaaaaaggagaccagacacatgttgatgaaacatctaaaaaggtcctggaatctgaatgcacaaatgtggagaccttatagaaaagggcacaagcacacatgcatcttgctgatcttgatttggcggaggcagacatcaagaaagctctagataaactacagatccagacatgttaatcatatgtactactgaagttggcttaatgaaatcttttgagaataacttgcctatttaacttgtgtcctttttgatggtggcgttgtttgttagctacaaaatcatcaatcaaagattgtaattatatcatatcactgttttctattaatttttaagctgccgtagcaaggcacgggcatcctactagttcccgtatatggtacaaaatgcaacattcgtctcaggatttatgtttctcgactatggtgacaggcctgttttcatccttctttcttcgttgtcttgtattctttttgtcaagttgggcatccaagtatctgcca

SEQ ID NO: 20379 - DNA, 4594 bp, Zea Mays
gcactagcacacctcccctctcaggctctcagcgccccgccgccgccacgcaattgccagtcctcgcgatatgggcgcgcaagaggaggcagtggacgagatgctgcgcgccgccgccgccgaggtttcaacctcctcggtgaagcgccgcctccgcatcttccaccacaccctacctcctctcatcgcgaaggccatagagtcaccgtcagatactgtattgttagtcgatctcattttccagacattgccaatatatgacgatcgagcatcacgaaaagcagtagacgatttggttattcaggctcttggtgaacccaccttcatgaagccctttgctgcggtacttgtacaatctatggaaaagaatctaaaggttacaaacccccttacaagcttaaagcttctcagatggtcacactatcttctgaaatggagtcagtttgccacacttacaaaaggcgcctttaccagactggccaatgcacaagcagtcttatgtcaagtccttatggatgggtccttccgtcggcgccggacttgcaaacagttattcattcatctcttctccgagcacagtggaatatataagatgtacatagaggagctcagagatttaaggatttccatgagagattctcctgcatttttgaatctaatactggattttaccattacctctccatcattatccactcagtaccagtcagtattccttgatttgtatgtcaaaatcatcttgagttcaaaagatcggccaccgaaagcagccactgaagcttttaagcctcttttcttgaacattgggcatgaggattttaagaatactattataccatcatgcataaagatgctgaaaagaaatcctgaaatcgtactacagtctattggatatcttcttaagacagtccatttagacctaagcaagtattccatggagtttatgccagttgttctgcatcaagctcggcattcagatgaagagaggaggattaatgctttgagtattataggaacactaagtgagaagtcaagtgatccagatgctctaccttccatggtcaatgctatcaaagctgttttaggaggctcagaaggaaaactatcacttctataccagagaattggaatgataaatgctttagagcagctatcaagatctcctccaaagcaaataggcagacttgccccctcagtatcaactttccttctaacgtgttacaaggatgatggtatcgaggaagtgaaattggcgattctatcagcaatagggtcctgggctttggtatcagctgaagctgtccaaccagatgttgtttcatttattgctgcaggcttgaaagagaaagacactttaaggaaggggcatctgaaatttttacgagttatatgcaaaaactctgagtctttaacaaaggttgcttctttattggatcatttgattcagttgtcaaaaactggcttcagcaaggcaacacagcggttggatggaatctatgcactctttgcagtatcaaggcttgctgctgttgatacaaaagcagatggtgccattctgaaggagaaactgtggacattgattgctcaaaatgaaccctcattgatctctttacagttgcttcccaaactagcagatgatgattgcttagccgtcctggatcttgttcaatcactgtttgtagaacagttcttcagggttcgagaatatttttcaatccattcattgctgcagctgctaatatatctactttgccatccaagctgggaagttagaaaggtagcttacgatgttaccaagaaaattttctcaagctccagtggtctagccgaagatattctatttttattcacagactggttgtcactggttggagagagactgtcaatattgaaacaaggtgatatggatagcccttcggattctcagctaccattctttccatctaccgaggtccttgtcaagtgtttgtttttgattgcaccttatgctgttgtgcatagtctgagatcatattctcgaattattttgtgctcccaccacccttgccttaccagctcctcaagcccagctggcgtatataagaggttgcaaagaaggcttagacaagaacagatcttttttgttgacttaattactcccaacatctctgttatctgcaaggaattactttcacaggatggtctatttagttccaacaatcaagtacagagtgcagcattatgttcgctatcaacacttatgacaattactcccaacgacacatttctagagtttgagaagcacttcataggactccaggagcgcaccttgcacgattccttctctgagagtgatattaagatattctatactccagaggggcagttgtcaaccgagcaaggagtttacattgctgaggctgttgctaacaaaaatacaaaacttgcaaaggggcgtttccgtgcatatgatgatcagatgcagagacagctcggtctattgtccctgcaaagaatgagaagaaagaatcctcaggcattggcaagcgagaaactgggaaatctacaaaaaggactgctcctatagacaaggctaagactgctaaagaggaggccagagagttgctcttgaaggaggaagcatctgtgcgtatgaaggttgggcaagtgcagaaggatctctccttaatgttggatgctcttggcaagttggctattgctaatcctatatttactcatggtcaactgccgtcactggtaaactatgttgaacctttgctaagttctccaatagtaagcgatgctgcattttgtacaatgttgaggctagcacgttgcacagcccctcctctttgcaattgggcgctcgacattgctgctgcgattcgtgtgatatctgttggtgattttgaaatggttttggatcttacacctgtgatcatggaagatgatagtaagaagccatcatctggcatctttgaacaaatagtaaatgggctgactattgcgtgcaaagcgggtcctcttccagcagattcatttactttcgtctttccgatcatggaaaggatccttctatcttcaaaaaagacatgtcttcatgatgatgtgcttcacatactatctatgcatatggatccaatactaccacttcctcgacctaggatgttatcagttctttatcatgtgctaagcactgttcctgcctatcaaccttcagttgggcctatgctgaatgagctatgcctaggtctaagaggccatgagttagcacaggctcttgtcggtgtatatgcaaaagaactgcatgttaggcttgcctgcttaactgctataaaatgtgttcctgtgcactctgtgcaacgagatttgcaggtgtcaacaagcctctggattgctgctcatgatccggagaaggtggttgctgaattagcagaggaattatgggaccgctttggttttgatgccatcactgattactctggtattttcaatgcactttcccataaaaattacaatgttcgtgctgcatctgctgaggctctggctgcggcattggatgaaaatcaagacaaaatgcaagatgcactttctacccttttctctctgtacattcgtgatattggcactagtgttgaatttggagatgcacactggctcggaaggcagggtattgcattagcactccactctatcgctgacgttttggcctctaaagatcttcctgttgtcatgacatttctcatctcacgcgccctggctgatccaaacgtcgatgttcgtggtagaatgattaatgctggcatccttattattgacaggcatggaaaggaaaatgttcctttgctatttcctatttttgagagctacttgaataaaagggcatcagatgagaaaacatatgatcttgtgagggaaggtgttgttatttttactggtgctctggcgaaacatctatcaaaggatgatcccaaagttcacagtgtcattgaaaagttgttagatgtccttaacaccccatcagaggcagttcaacgtgctgtctcagattgtttgtccccacttatggtatccaaacaggaagagggtcaggctcttgtttctagactcttggatcggatgatgaaatgtgaaaagtatggtgagcgacgaggtgcagcctttggccttgctggtgtggttaaaggatttggaatttcttccttgaaaaaatatggcatcgctgtgacattgcagaaaaatttggaagacagaatgtctgcaaaatctcgtgaaggagctttacttggatttgagtgcctgtgtgagaagcttggcaaactatttgagccgtatgtcattcaaatgcttccgttcctacttgtgtgtttctctgatcaagtcctagcagtgcgcgaagctgctgagtgtgctgctcgggcaatgatgtctcagctcactggtcctggtgtgaagcttgttcttccgtcacttcttaaggtatcaatatatcttatttgatgctatcaaatcataacatttattgtgtccaaatgttctggagaatacaagtgtccagttcatctagttatatattgaaatctgacaaccacttaacttctgctgaatatttagg

SEQ ID NO: 20380 - DNA, 2330 bp, Zea Mays
agaaagactaccaagtcagcggcatcacagttatgtggaagtggaacagtcatgtgcgattttctttctcaaaaacagtgaagatgctcaggctgtctgtgactctgggtgactcttgtcttccacatcgccacgccactgattggctcgcgattatgtgatccgtgaaccttcttgccatggggatgtctgcagcgtctcatctctgtgctccttcatccctgcgagctttaaccgtgttgtttgtgttggcagcttttgtttcagatgtagaggggcgacatcatcgtcatgtctgtccacatttctcctgcggtggtcttagcaatatatcttatccatttcgtcggcaaggtgatccatctgggtgcggtgtccaatcgtatgagctggtttgcacggatacagatgctacaattcgcatcggcagtggaacatacaaggtgcttagcatcaactccacatattcttacttctgggtcgttgatgccaacctggacatccagagcagttgcccccttccccggtgggattaccatgctaggaggaccagtcgtaatcgtaacttacatcgtcggaggattgagttcagccatgatttttccaattctactccgacgatgtgggtttacgcttacttttaccctgattggaccagtagcaactcatatcgtcagagggttgagttcagccatgatacccctttttcttcttatatggattattcggggtgggctatctttgtgaattgttctcagccaatagagaacaatgatactgataaatatcatatatatgagccggtgtcttgcttgagcaattcttcttttatctacttgctggtaactgactactggtatgatgacaatgtttctgctggggatctggagccttcatgcggttacctagccatgactcctttgggtggtccaggcatgccggtgcccatgaatacaagctatccagatgttgttaagttcatgaggaatggatttgcccttcggtttcctctttcgattgaatattaccccaacatcagagaatgtctcgcagagaatatgcgtgctttccatgaagaaccaagaaatagtacaggcatcagggaacagatcttggacattcttacgttcgagacattatggttttgtgttattgaacaacttggatcaagtaataatggtgtcaaatctgttctcatcaacatcatcgtcagaataataccatatgttctgtggggtctaaaatctgcacatgttatttgcaggtttgtattgatgccgttagcagtatttgtcttcctagcctataaatactggaaaacacggataacaatagatgcagttgagaagttcctgcgaatgcaacatatgctcgttccgatgagatatgcatacacaaacatcattgctatcaccgcccatttcagagacaagctcggacaaggaggctacggtactgtatacaagggggtgctacagccaggtgaagttcatgttgctgtcaagatgctgggcaactcaaactgtaacggagaagagttcatcagtgaggtggccaccattggaaagatccaccatgtcaatgttgtgcgcctcattgggttttgctccgaggaaaatatcagggcacttatctatgagttcatgccccgtggatctctcgataagtacatcttctcgtcggagaagacattctcatgggacaaactcaacgagatcgctctgggcattgctagaggtcttaactacctgcatcacgggtgtgatatgcagatagtacactttgacatcaagccacacaacatccttcttgatagcagctttgttccaaaagttgctgattttgggctagccaaactgttcccaaaagatgacaatttcgtgccactgagcgctatgcggggaacgattggctatatagctcgagagatggtatctcgaagctttggtgtcatatctagcaaatccgatgtgtacagcttcaggatgctactattggagatgacgggcgggcgaagaaacgcagatcctcatgcaggaagctccagtcaagcatactacccatccttggtgtacaagcagctgagccagggtgatgcgaataggattagtgaaggtgttgatatgcacgagttagagaagaagctatgtatcattgggctttggtgcatccagatgaagccgcaagatcggccgacgatgagcgaggtcatagagatgcttgaagctggtgtcgatggcatccaaatgcctccaaggccatacttttgtgatgaagagggtgacagttcttactctacaatctctgagctcgatacaatagaagagtag

SEQ ID NO: 20381 - DNA, 2976 bp, Zea Mays
acgcgcgatgcctctgtagctgtactgcttgctcctcagtccagctatccgcatagacttcgcaccaacccatctcccagtctcacacaccaaagaggaaaaaaagccttgttttttttcttcggagaaaggagagggggagaaaattatactactctcttctgtccagtccagccgcggacaccaaggcacagaggcaggcaggcggacagggtaggcaagaggcgagctcggcgaaggcgcggagaggggagacagccagccgctgcattgcgctacattgggcaggagggctcgccgccgggggaggctcggatcttgcgtctctggccgtggctgccgcgtgcttgcttcgtttggtggcgctgcgcccattggcgggcggcctcggtccagcgcggcgtgatctggcgcgcgccgccgactccactcgcgtggggaggcctggatcttgacgctctgctgtcgctgccgcgagaccctgggggagccacgctgtgctcagtcgcccgcagtccgctgagctgccgagtgcgtccggcgggcgggagatctggccgacggcgcggcgctgcagatcccctgcctgcgcgggcacggctcactgctgctgtggaggctgttgcgcgcggtggtgccgatgggctacgggtacgtggatcccttcccgccccctcagcagccacaacaggcggcatacgtcgcgccgcagcagggggactacgggcagccgcagccgcagccggctccgcggccaccggcttgcccgtactcgtcgtccgcctccgctccgccgggctccgcgtcctatcatttttcgcctccggcaccgtcccctccgccggtaagtagcccacctccggcgtcccctttaccggagccatcggcgccacctgcaccattgctgccatcgccgccgcctcctgcaccattgccgccatcgcctccgccgccagcattgtcgcctcctccgccggacgccctccctccgtcgcttccaccgtcaccgctgccatatccaacccgatcaccacctcaagccccgccgcccccgctgacgacggatcagccgcgcgttcagccccgcgtatacccatcaccgccaccgccgtccctccctcctccgccgcctcccaccgtctcgccgccagcgccggctccatccaattcgccgtcgccgtcgcctgctccagctgcacaagctccgggtcccgcgcgtgttgctgcctattcgcctcccccgcctagaatcgcccctccgccgcctccgcactatcacggcaagtcgcattacacgccgcactcgcccgtgaagtcgcattcgaactcgagccatgcagctagtggcagtggcaagaacatcgagatatcgagggaagcggccaccaccattgtagcactggccggtctcgccatgctcagctttattggcgcgaccatttggttcgtcaagaaaaagcgccggcgcatagagcctccggctacattgcctacacagcaaccagctcctccgccaccgcccaactacattccatcttcggctggatcctcgctagcatcagacggattctacttgagatcgccagggtatcctttcatgaggtacagcactgggagccatggttttccatactccccagccgactctgggattgggtattcccatatgctgttcacaccagagaatttggcagctatcacagatgactttgcagaagataaccttttgggagaaggtggatttgggtgtgtgttcaagggcattttgccggatggtcgccctgtcgccgtcaagaagctcaagattgggaatgggcaaggcgagcgtgagttcaaggctgaggtcgatactatcagcagagtacatcataggcatttggtttctctagtaggctattgcattgcggagggccagcgaatgcttgtttatgattttgttcccaacaacacactatattaccacctccatgtaagtgaaacatcactggattggcggacaagggttaagattgcagctggagcagcccgagggattggttacctccatgaagattgtcatccacgtattattcatagagatattaaatcatccaatattttgttggacaacaactttgaagctcaggtttctgattttggacttgcaaggttagcggctgattccaatacacatgttaccacacgtgtcatggggacatttgggtatttggctccagagtatgcattgtcaggaaagttaacagcaaagtctgatgtatattcttttggggttgttcttttggagctgatcacaggaagaaaacctgttgatgcttctcagccgttgggagatgaaagtctggttgaatgggcccgctccgttctgacgaaggcgatcgagcatcgggagttcggggaccttcctgaccccaggatggagaacaggttcgacgaaaacgagatgtttcacatgatagtagccgcggccgcatgcatccggcactcggcggcaatgaggccacggatggggcaggtggttagagcactagatagcttagcggactctaatctgaacaacggcctccagcccgggcgctgcgaggtgttcttggagccgcagtccgaggagatcaggctgttccggctgagggagttcggcagcccggacggtagcgaggagctgagccaggcgagctggaggagccggagagacctgtgaacagacacactcggtacaaggtcattaacattcttttttttttgggggccattctttacatgtaattatctcgtttacatgattctttcttccttcttacttttcgtttgttactttactcctccctgaggcaattcttgttcctggtggaatagattttgcattttcgttcgggagataagtaaatgaatcctctgtcttttctctctctctctctctctctccagtgaatagtacacagaaagtttggttcctggcattctttctctgataagtac

SEQ ID NO: 20382 - DNA, 1987 bp, Zea Mays
gtttgtgtgcgatttgtcaccaggttttgaagggtgctcaagtcacgatgaacgtagagaccataagtcagactttgaagtctctgaagatgaaaagaagacaagaataagctctttgaagaaaaaagcaatagatgcatcaacaaagattaggcactcattaaaaaagactagaaggaagagtggtagtagggtcctttctgtgtctattgaggatgtgcgcgatctagaggagctgcaagctgttgaagcatttagacaagcattactcttggatgagctgttgcctgcaaggcatgacgactatcatatgatgctgagatttctgaaggcaaggaaatttgatatcgataaagccaagcaaatgtggattgatatgcttcagtggcggagggagtatggcactgatacaattgtggaggacttcgaatacactgagttgagcaccgttttgcaatattatcctcatggttatcatggagttgacaaagaggggagacctgtttacattgaaaggcttggaaaggttgaccctagcaaacttatgaatgtcacaacgatggatcgatacgtgcgataccatgtgaaggagtttgagaggagcttcttgattaaatttccagcttgctctcttgctgcaaaaaggcacattgattccagcacgacaattctggatgtccacggagtggggttgaaaaatttcagcaaaactgcacgcgaattaattcaacgactgcagaaaattgacaatgataactacccagagactctataccaaatgtttatcgtcaatgctggtccgggcttccggttactatggaacactgtgaagtccttccttgatcccaaaacgaccgccaagatacatatagtccaaagtggtggggttcattgtgctcgtcaaattgtaactatttccaatggtgaggaaaaatttattacttacgccaaaccgaagcgccacgcaatgagagggagtgacacatcaactgctgagtctggttcagaagctgatgatgctgtgtcccccaaagctctcagaagttacatatcacatcctaagttgaccccagttcgtgaagaggtcaaaatggtcagggctactagcttttctactcgtgtccctgaatatgatgtacctgttgttgacaaggccgtggatgctacatggaagagagagcaaccacgaaaggcaccatccgtgccccaagatgcagactcatctgtgaaaactgcatccaagccatctggccgcccctgggataagatcgctgcaaatctgatggcttgtcttatggctattgtaatgttggttcgatcaatcaaagatcttgccacaatgagattgtcatctaaaggcgggtcagaagaaagctactgtacattgtacccggactccgtccagaaagaggaattccgtcctccttcgccattccctgggttcgctgaagccgacctattcgccgtggtcttgcaaaggctgggagagcttgaagagaaggtccagatgcttcaagaaaagccttctgaaatgccttgcgagaaagaagagttgcttaacgctgctgtgcgtcgtgtggatgcattggaagctgaactaattgtaacaaagaaggctttgcacgaggctcttatcaggcaagaggaactgctcgcgaacatcgacagcaaggagattgccagggctcagagaaagaagaaaacaatgttctgctactaggacaacacctgcttccgtgaggagatgacaaacgcggcggaccccttcatttttctgacacttgtgaatcaacaggtttccgttgtaaatcaacaaaattctggcataaataaaatgttttttttttaaaaattgcaatcctgagcattgctgcctcctcccggtctcgcaatctggttgttgttagttgcagcataactgcataattggttggttagccgcgccgatgataattggttggtttcttagctgatgcgtatcgtcaag

SEQ ID NO: 20383 - DNA, 2915 bp, Zea Mays
atggatctactaggagatcgtgaagatgctcttagccttgtttcatggtgcaggagcgaggagaaagaagatccctggagacccggtgagagggtagagcggctcgtcactcttcccaaactgtccctgcctccatttcttttccttttgtttgtcgcctctcccttcgctcgccctgtctgcgctttcgctttcctttcgcctcccaccaccaaaaagaggagcagaggagaggtttgtgtgacagcgtgagcgagcgagtgatgattaacacctcagccggcagacagccgccaaagcagtagcgtaagaaagagagttagtagagcccagatcgagggagggaggagtagcaccgagcacgagcatctccactccacgcgcgccccatgcccgtccgctccacctccatgagcgtcagctgagcaagacaaggaaggggaatctctccctcattcgccttgccgtcttgatctgtcggctcccggcggcaacaccctacaggtttcatctatggggcaagatgctggcttcaaacgcgaggatcattctggattgggatcaggtcctcaaactttgaaggtctcctgctgcactagtgaagaaaacgagagtcgaaacagaagataccatcagttgaaatgctcagagagcaactcgaggcagttgcacctggactacgtcccaaatttccactgcaggagcttgccaacgagaagccgcaagacgaatgctgagcaaagcaccgtggggaagcgtggttctatgtaccagagctccagcgaaataagcaggatcagaaagatccaggagggcaggaggaaaatagattctgcattcgatggggacgcgttcctgtcctttgatattgtcgatgcatcctctcgccctagcacaagtggagcttatctgcattcccatcagaatcggaggtcgggcgctaagccttctgtggacaccgctaagcgagcgtcaaaggacttcctggaccttcagttccgtgaacatcctgatgagaattttaagctagatcgaccacgcttggatagtaccttgttgaaaaacgatgatggtttcttggagatttctctcgagaaagagatagcaaagggtggcccgtgcagaaatgcagctcctatcctgctaaacactgggtcaggcaaatgcactgacctgcaaaagatgaatggatgccccagtgagaacaactgtggtgacaaggggagagattcagcaagcagttccaaatcaacgcctgtgaaagtaagctcctttgacggatcctgccaatctgacggtgctcaacaccatatcacagagaacaacactaaagctcgatcaagccccttcaagaagatgctggaccctattatgaagtccaaatctcctaggagcccatctatcatggaaagaggaggctccaactccgcaactgggccaggaagcaggaaaaactccgtgtctcgaaaatcactgctgggtgatttttcaagaagtgaacaagcatctaattgccagcccaatgggcaaacacagaagcgtgtaaacaaatctgctttgtcacctgctcatctccaagcggttcttagattggattccaagaacggtgtccaggtttttgaattctgtgttgacggcccaggagaatccatttccgccaggaattggaaaaacggtgatgagttgagctctatatacaccttccatagtggcgggaaacggtccagtgctgctggaaggatctccaaagatggaggctgggatttacccccaatcgttgggcaggtgcaggtttcatcatacttatgctctgaagttggaaaagacggtacggtgaataactctgtcgtcaccgagtttgtttcgtacgacattggtcatgcgaggcggattgttgaggagaagacaggggcacttcaacagccacagaggactagtctgacggaagagaacaagactgggagaaataactcagatgtatcgacatcttgcccgtggtccgaagaagaccttcatccttatttggagattgcggcgactgtgatagaggttccgtttagcagatacaagtccgaagaggtgaagaatggttcatctccttgtactgtcaaagttgttgcacctagtggactgcatggttcgccgagtgacgatgaagccggcggcccatctcccttgctagatagatggaggtacggtgggggttgcgactgtggcggatgggacatggcttgccccatcgacgttattggcaacacatatgataatagctgggctgagtctatagctaccaatgtgaaacatcccatggagctctttgttcagggtagcaaagaagagctccccgtcctttctatgaaggagaacgggagagggcagtttgtggtggatttccatgggcgactatcagcgttacaggcgttttcagtatgcatctctctgctgcactgttctgaagcttcgatcgccatcagcctcaagaaggggaagcagaagctgtattccagctcgctcaagttgctcctcgaggaggacgtgaggcacctgatcgaggcagtcacagctgaagagaagaagaagaagaagcggagtagagaaaaggcgcctcctccgtctgttctgcttgacccgcctttttctcccatcggaagagtgtagtgtagccaccaggcattgaagaacccattgcattgtttatgatttgtcttgatgttcatattttccttttaggatttcatacttgcatggagtgttagattctagcaggcagtaaggttcataatgtactgttgagatgttgaatagaagggggggaaataaagtaggaggagccagttttcttgtgaatggacgaagctaagactacctccaatcatatcgtcatctctcttatatatcatcagcctcctctaaag

SEQ ID NO: 20384 - DNA, 5821 bp, Zea Mays
cgcaactgccatcgtcctctgctcgtcgcgtcgttctcctctcgaccgcatcgcgcccgtggcggggaacgagccatcgacgccgcgtcgcgtgcctttcttcttcgtcccccccctgcctgcctagctgtctcaggctgccgcccgcccagccccaaaacattcggcagccgagtcaaccgagaacacgagccatccacccaccctgtcccttccccggctttcccccgtcctcggctccaccaattgctctcgcgtcagtggaaggaaaaaccaagggcgagggagggaggagcgcatctccgccccgcccgcgttcccgtaccccgatccgccacatgatctgacaccgcattgccgccgaggtgacccctcccgcccccagaatggaggcgctcaacgagctctgcgacctggtggccgcgcacccggatctcctcctcgccgacaagcttgcatggctctcctcccgctgcgccgccgccccgggtgccgccgccccgcagcgtgcgtcgagggcgcaccttcattcgctcctcgcgttggcgcgcctcctcccggcgggtggcgccggtgccggtgccgaaggcgatgcggcgcccccggccccactcctattcttcctcgcgtcccacgccttcctctcgccggccttctggccccagtctttcgccccggcgccgtttctcgctaggctcctcccgctcctcgccgcggccccatcctcccccgccctttcttccgcgctctccgccgccctcctcgcggcgctcgacgtcgccgacccgacctccgcgccgctcgcccgcgcgtttctctccgccgccgctgccgcggcgcccctgccgctcctccccgcggatgccgcgcccatcgctgcccggctgctcctcgagtttcttggctccgaggaggagccgatcagggccaaggggaagggagaggacaccttgggcgaggaaaacggtggggcaaaggaggtagtgcggaggttcgaggaggaggaggatggcaaaggaaaagaggcagttccagttattcgacttaatgtcatacgccttttggctgagttatgtgtttgcttgaaaaaatgggaagttgtggacatgattttaccccttttcattgaacatctagaagagggtgatgcttcatctccaagttcattgcgtttacgattattagatgcaatatctcgtgttgcgtgcttgggttttgaaaaatcatatcgtgagagtattgtcttgatgacaagaagctatcttgacaaagttaaagctctaggggcttcagaaaacaatacagttccatcagaagcaacaactgagcgaacagaaactcttcctgcaggctttctgcttgttgcttccaaccttacaagcacaaaactcaggtctgattatcgtcataggttactgtctctgtgctcagatgtggggctagttgctgaatctaaaagtgggaggagtggtgctgatttgatgggtccgttacttcctgcagttgctgatatatgttctgattttgatccagtgtccactgttgagccatcattattgaaactattccgaaacctttggttctacgttgtattgtttgggctagctccacccatacagaataatgaggcacctacaaaaccggtttccacttcattaggtacagcagaaagcagcagtgctatagcccttcaagctgtagctggaccatacatgtggaacagccaatggtctgtagcagtgcaacgtattgcgcaaggaacacctcctctggttgttagttctgtaaaatggcttgaagatgagctagagttaaacactctacacaacccaggtagtcgtggtggtaatggtaatgaaaattctgctgttgggcagagagctgcactttctgctgctttgggaggtcgagttgaggtagcagcaatgaacactatttcaggggtaaaagctacgtacctacttgcagttgctttcctggagatactacgttttagttgcaatggtggcatactctcggctacatctacattgaatagatcaaacagtgctttcagttgtgtatttgaatacctgctcactccaaatttgacaccagcagtaactcagtgtttgacggcagttgcacatagagcttttgaaacagtgctgtcgtggctggatgatcgcatatctgacataggtgaaggagctgatgttagagaatcggttctttctgttcatgcttgctttctgataaaaagcatgtcccagagagacgagcatgttcgtgatgtgagtgttaagcttttaacgcagctgaaggaaaagttcccacaggtcctctggaactcttcatgcttggatttacttcttatttctgttcacaatgagttgacttctggtccagtcagtgatcctgcttgggttgcaactgtacgctcactgtatcaaaagatcgctagggaatggttaacaagtgctctttcatatgctccatgtaccacacaaggccttatacaggaaaatttttgcaagccaagtggagtacaaagaacacaacatacagcagatgttgtttcacttttatctgagatacgtatttgtagtggaaagaatgattggaacggtattaggacggccaatgttcctgcagttatggactcagcagcagcagcatcgggagccaaaaaagaagcacctgacttcactttggaagtactctctactgcagtagtgagtgcaactgtgaagtgcaatcatgctggtgagattgctggtatgagaaggctgtttagtactatgggaggcataaacatgggcatgtctcctcctgggacacaatctttgcacccccatcagtcatttgatgaagtttttgtctccaagtttgtcagtcttcttcagaactttgttgttgcagctgagaaacaaccaatagataattcacaatttcgtgaaacatgttctcaagctacagcattacttcttgatcatatggtgtctgattctagagcaaacctggaagggttttctcagcttatacggcttctatgttggtgtcctgcttatatttctacccctgatgcaatggaaactggaatctacatctggacatggctagtatcggctgcgccttctttaggtcctcttgtgcttgcggaacttgttgatgcatggctgtggaccatagatacaaagcgtggattgtttgcatcagatatgaattactgtggcccagatgcaaaattgaggccgcatcttatcgctggtgagcctgaggcaccaccagaaaaggacccagtagaagcaataatagcccatagactctggcttggcttcttcattgatcggtttgaggtggttcggcatgacagcattgaacaacttctacttctaggtcgaatgttacaaggaacaatgaagtctccagctcatttttctcaccatcctgctgctactggcactttctttactgcgatgctccttggattgaagttttgctcatgccagtctcaatctaacttgcagaagtgtaatatggggcttcagttgttagaggacagggtataccgtgctgctttgggatggttttcttatgcgcctgagtggtatgaatctccaaacaaaacttatgctcagagagaagctcaatctgtgtcagtatttgttcattttctacaaaatgagcgcaccagtggtcctgtcgattcggtttcaaagttacagggacgtgaaggtgaacctagcatggcagatcacattcatcctgtttggggctgtgttgacaactacacaaatgcaagggaaaagcgtaaacagttacttctgacactttctcagaatgaggcagacagacttgaagtctgggcacaaccaatacatacaaaagatacaacgacttttcgcggtaaaatcagctcggataaatggattgatcatgtcagaactgcttttgctgttgatcctcgaattgctctttctatgcctttgaggtttccaacgaatgctacaatgcaatctgagattactcagttggtacagacacgattactggagcttcgtacaattcctgaagcattaccctttttcattactccaaaagcagtagatgaaaattcagtgctgttacagcaactaccacactgggctccatgttctgttacacaggcattggagtttcttactcctccttataaaggacatccacgtgttatggcctatgtccttcgtgtcttggagacttacccccctgagactgttaccttttttatgccacaattggtacaatctctcagatatgatgaagggaaactggttgaagggtacttgcttggagctactcgaagaagtaatatatttgctcatatcttgatatggcatctgcagggagaatatgttgatgaatctgagaaagatgcagctgctctgaagggcagtgcattccagtccttgctcccagctgttaaggacaaaattatagagagttttactccagaggctcgtgacatgtttgaaagagaatttgatttctttgacaaagtcacatctatttctggtgttcttttccctctccccaaggacgagcggagagcgggtataagaagggaactggagaagatttctattccaggtgatgacctctacctacctactgcaacaaacaagctagtacggggtatacagttggacagcggtattcctctccagtctgctgcaaaagttccaataatgattacttttaacgttgttgaccgtgacggggacccaaatgatgtaaaaccacaggcttgtatttttaaggttggtgatgactgtagacaagatgtgctggcgctgcaagtgattgctctattaagggatgtatttcaagctgtcggattaaacctgtatctttttccatatggtgttttgcctactggaccaggccgaggcataattgaggtggtcccagatactcgaagtagaaatcaaatgggtgaaacaactgatggtggtttattagagatatttcagcaagattatggtcctgtaggttcaccttcttttgaaactgctcgagaaatgtttatgatcagtagtgctggatatgctgttgctagcttactccttcaaccgaaggatcggcataatggcaatcttctctttgatagccatgggagattagttcacattgattttggttttattttggagatttcacctggaggtaacatggggtttgagagtgcacatttcaagctaagccacgagatgactcaattgctggatccatctggaactatgaagagtgatacatggaaccaatttctcaggttgtgtgtcaaaggatacctagcagcaaggaggcatatgaatgggattttaagtacagtcaacctaatggtggacagtggccttccttgctttagcaggggagatcctatcaataatcttcggaagcggtttcatccagagatgaatgaacgtgaggccgctaacttcatggtacgaacatgtgctgatgcttacaacaagtggactaccgcagggtatgacttgattcagtacttgcagcagggtattgagaaatagtttgtttctcgttttttaagtggcgttcgtgtacatcaattgtatgtagccactatctttttatgtagaatttattttttgagttgtatcatcgggcaaggatggaattcatgtgattaacgtaggatgcttggtgcaaagaggcaattctttttttttcttgcactgtaaaactgccaagaaagtagctagtaagttgatcaagattctgtattgctgtcgcagaatgcattttcgtttactagacatgtatgattcgcatttttatc

SEQ ID NO: 20385 - DNA, 164 bp, Zea Mays
ggaaattctatagatggaaaacaacacctctgttgaaacaaacatgtaaaactgttccagaattgcatttcttcaatggcaatgagattgcagttgcgtcttctaaactcagatagttagtaaggttgagaaaaagttccccgaggataacacctttggttgat

SEQ ID NO: 20386 - DNA, 1032 bp, Zea Mays
atgctttccatgctgtcatgacggaccggataagcctagtatgcgcttctaacacttgcatatttggatggatgatgtatatggacggatagaggtcttcccccaacactttgtaccatcaaaagaagctatggagacacctgacggtctatcaacaagtaagaatagcctggatagtccaccaagttcatgtaagcgttcctggactccaagacgagttaagggagctgcatccattttgcatttattgtccattccccgcataagatggtctacaagcaatgaggatgatgacaagattgaattatctagagccgaagtagaaactttacgaaccgaaatagcgggtgccgaggaaagggaatctcacttaaaagctcggttggaaaacattgatgaagttttgagatatgcacggctttctggctatctctacattagaagtcgatggacccaactccctggtgaaccacctatattagatgatgctgatgtggatgactggcttcctcgctttgttgttctacaagggcagtgtttatactattatctgaaatgtacagatctgagcccacaggaatctacactcttatgtgatgttgttgaagtagggcagcttccagactttgtgccagaagatgaaaagacgagatatgcgttttacctgttgacccgtcaagggttgaggtttgaatgctccagtacctccgaaatacaggttgattcatgggtaagagcactgtcaagtgactgcaaattgcaggatggcgctggtgatgataagatgatgaatacgaggagtagccaagtagaagctgggtcatcatggtagacgatgtatggagtgctgtacagtacaatagtcaatgaaatgtacatacattacatgcatgtaaagggagcaacatagtagacgcattcaacacgagatgacatgttgctcgtggtatttttcaacttttagggagcacacaaatgatgtatttctgtagcaaaaaatccgtcgtccgtttgagtttgatagaccgtaag

SEQ ID NO: 20387 - DNA, 2482 bp, Zea Mays
gagctgcagcccgacacggaagacaaccatattttcggcttagcgtcagatgaatattctgggagtccaaaaaatttgaaggatctacgagttctgctgagccctggtataacacaccattttcagttgaaaatgtcactccttcagttatacaggaatggattgaaaaagctcctactgaaaaactccatcttccaaaacctaatattttcataccaaaggatttatctcttaaagaagtgcatgaaaaggttacttttccaacagtgttaaggaagagcccactttcacagttgtggtataagcctgatatgctgttctccacaccaaaggttcacattatcattgatttccactgtccattatccagccactcccctgaagcagttgttgctactgagctctttgttgatttgttagtagattatttgaatgcttatgcttatgatgctcaaattgctggtttattctattcaatatatgttacttcagctggattccaggtttctttaggtggttacaatgacaagatgagagttctcttaaatgccatactagtgcaaattgtgaaatttgaagttaagccaaacagattttctgcactgaaggaaacttctgtcaaggactaccagaatttcaatttccgacaaccttattctcaagcgtcatactatgtctctttgatattgggagataaaaaatggcctgtagctgagaaacttgaagctctttctaagcttgaatcagattattttgcaaagttcgtaccacacctactgtcaaaaacatttttggaatgttatgttcaagggaacattgaaccaagtgaagcaaaatctatcgtagaagaaatcgaaaacactatatttactacgcccaattctttgttcaaatccatgtctccatcagaatatctgattaaaagggtcatcatgcttgaaaatgacttgaaatgctactaccaaactgagggattaaaccagaagaatgagaattcatcagttatccaatatattcaggtgcatcaagatgacgccattttgaatatcaaacttgagctgttctctctaatagcaaaacagccagccttcaaccagctacgaactgttgaacaacttgggtatataacaagtctttctctgagatccgactatggagtcctggcactccaggttgttatccagtccacagtaaaggatccttcatacctcgatgttagagttgatgagttctttaagatgtttgaaagcaaaatctatgaactctccgacaaggatttcaagagaaatgtgaaatcattaattgattctaaactggagaagtttaaaaacttatgggaggaatctcatttctactggggagagattgaggcaggaactctgaagtttgatagggtcgagtctgaggtcgctatgctaagagagctcaagaaagaagaattcatcgagtacttcaaccagtatataaaagtggacgcgcctcaaaggaggacactaagcgtgcaagtcttcggcggcaaccatttggtagagttcaagaaggcaatcaacgaagccaacccgcccaaaatgtacagaattacagacatattcggcttcaaacgatcgaggccgctgtacagctcactcaagggaggtccgggcaggatcaccatggactgacagccggcaatagcatgccttgtttttcatgtatgtagtgtaatggccagtgcatacgaatgatgaattcgattctgaatcctgctcctgcatcagattcggttgcatgattgatctatacttcactgtgggtttcacgaccagcgtgtcactttctgggcaaaatctagggagctgtataaagtcatgtatgttcacatgtttgtttgcgtttcttctcacagctatgcagtttgtacagttacatatccacagtgaactagaactagaagcgcgtcttctacacaccaatatacagcttgagcctggctgaccgtgcccgacgccggccgagaaccgtcaaggtgccgtcatgcgcacatgcaccaccggccgtccggtttcagcacgccccggcgtgttcgcaaacgcccgccggcgcccccactcgaagccgttgcggtgccaccggcacctgaacgagccccggtgcgtcgtgggcgagcacacgcagtagtagtgcggcgacgcctggcgcgcccgtggcacagatggtgggggcgacggtgccacggtcgcctgctgctcccgccgcctgactgcgcagtccggcggcagaggcggcagccctggatggcacatgcttctaggctacaaaagggtgatgcgatcggcagctccaccagctataaaacagatggcgccgaagaatggaatcgggttctggcgttttcggatggtgggagatgactagacgtggggaaagggcggggaatatgtgtgggctagggtggtaatgtatggtatggtagcccgcaggcgatggtttttgcgagctggtg

SEQ ID NO: 20388 - DNA, 2037 bp, Zea Mays
aaaccctaacaacgcatttcgctccccacagcggctcggccacaacccacagccagaaggtctcgagctggatctctaccgttccagcagacagcagtgcgcgctctctctctccctcgtggcgacgactgggcgaccgctgccgctgccgctgccgctgccgctgcccttgtgccccggtctccgtcggtccgttcgccaggtctcctgcgggctcttcgtcgtcgacaagctccgcctggttgctgtgtgaagtccaaggttgtcacatggattcagcacaagatttccaacccaggacattctctataaagttgtggccaccaagtgaaagcacacggatcatgcttgttgacaggatgacaaacaatctgtccacagagtccattttctctcgcaaatatcgccttttgggaaagcaagaggctcatgagaatgcaaaaacgattgaagaactttgctttgccttggctgatgagcatttcagagaggagccagatggtgatgggagttctgctgtccagctatatgcaaaggaaacgagcaagatgatgttggaagttctgaaaaaaggcccaaggactactgcagaactggaggcacctgtagctgacacacctcttgtgtctgctgatactgtactagatatatctggtggcaagcgtgcttttattgaggcagatgaagcaaaggaactgctgagtccacttaccaaaccaggaaattcatataaaagaatttgctttagcaacaggagctttggaaggtctgaggatgaagcccttgatgtgatgcgcatattctccaaagcattagatggttctgtcctgagatatctgaacatctctgacaatgctttgggcgagaagggtgtcagggcattcagtgagctcctgaaatcgcaagaatccctggaagaactttatgtgatgaatgatggcatatcagaggaagctgcaaaagctctatctgagcttattcctgcaactgagaagcttaaggttcttcacttccacaacaatatgactggagatgaaggtgctatgtatattgctgaaatggttaagcgttctccaaatgtagagagtttcaggtgctcagcaacaaggataggatctgatggtggagtcgcattgtctgaggcattggggacatgcactcgtctgaagaaacttgatcttagggacaacttgtttggtgttgatgcagggttagctctcagcgaaacccttccaaaactacctgatcttgttgagctttatctcagtgatctcaatcttgagaacaagggtactatagcaattgcaaaagccctcaaacagtcagcactgcagttggaggtccttgaaattgctggaaatgaaataaatgccaaagcagccccagatttggctgaatgtctagcagtaatgcagtcactcaagaagctgaccttggctgaaaatgaactgaaggacaatggtgctgtgataattgcaaaatcattggaagatggccactcagatctcaaggaacttgatgtgagcacgaacatgctgcagagggttggagctcggtgctttacgcgggcagtcgcaaataaaccagattttgtgcagctgaacatcaatggaaattttatctctgatgaaggggttgatgaggtgaaggaaattctgaaggctggtaagaaatctctggatgtgctgggcccactagacgagaatgaacctgatggagagcctgatgatgaggatgctgaggacgatgaggacgagctggatttgaagctgcagagtgtgaaggttgagcaggatgaggatgattgacgatccttaggttaaatatctttagctactcagtaatcatttggatgtccatgagctacgcaaacttttaattaaaaagaatgtactgaggcttttgcattgtcctgagccttttgcaagggtcatacttacattgtctgtagccttttgggtccccggtaaagaggatgttttgacctctcgttgatagataaacccccttgtttaattgataaatatgttgtggcga

SEQ ID NO: 20389 - DNA, 1563 bp, Zea Mays
ttttttgaaagaaagtactctatgttttcacacaccaatccgctccatcaagatgtatttaagagcgtagcaaacatggaagctgaagtcgttgcaatgacagcggctttacttggcagcaaagaaaaatcatctggtggacaaatttgcggcaacatgacatcaggtggaactgaaagcatattattagcagtcaaaacatcacgtgactatatgcgatcaaagaaaggaattacaaggcctgaaatgataattgctgaatcagcacattctgcatatgacaaagctgctcaatacttcaatattaaagtgcggcgtgtacctgtgaacaaagagtttcttgcagatgtgaaaggattcaaacgatgcataaatggaaacaccataatgatggttggatctacaccaggatttccgcatggtttaattgatcctattgaggaacttggggaactggcttcgcgctatgacatttgcttgcatgttgatttatgccttggtggctttgtgctgccttttgctcataagcttgggtaccctattcctccctttgatttttctgtcaagggtgttacatccatctcatctgatgttcataagtacggattagcaccaaaaggcacaagcattgtcctgtacagaaatcatgaaattagaaagcatcagtttgttgctgttactgagtggaccggtggcctttacgtttctcccacaattgctggaagcaggccaggtggattgatagcgggagcttgggctgctatgatgtctctcggactgaacggctacttggacagtacaagccgtatcatggatgtttcaaagaaaatacaaagagggattggagagatcccagggttgtttgtgatagggaaaccggatatgaccgttgtggcgttcggctcagacgttgtcgacatatttgaggtgaacgacataatgtcatcaaaaggttggcatctcaatgctctgcagagacctaacagcttgcatatctgtgtgacccttcaacacacgactgtttacgaccaattcctgaaggatctgcaagactctgtcaacactgtgaaagcaaacccaggcccgattagcggcggaaaggctcctatctacggcgccgcagggaagatgccggacagaggcacggtgagggagctgctcgtggagttcatggacagctcttgctgaattcattatggcttgtgagaagaatttgttcttgtacatgaaacttctatttctttttcaactgaaaaggcagagctcctaccatttgtttaaaaaaaaaacattatggcttgtgaaaaacagtcgcagggctgtgatttgttggcctaggtatacaaagttgtcattaggaaaagcggggaaagtcattgaggcgatacaaccacatgtattcacgattacaagaagtttgtccgtatgattgtatatcaatatcacagcatgcatacgcaatgtgtctggttatatatttatctgttcctataaaacattggttgcatttcacgcgtactcacccccgtgaattctcggtaaaataaagatagaaatgactaa

SEQ ID NO: 20390 - DNA, 1046 bp, Zea Mays
agaaaagagaagacttggaagtggagcagaattgcattggcattttgctggaagggttcttgaagatcgagaacctgactctcatcacgcccccagcgttgcttctgccatggaatgctgacttgagcttattcggtctcgagtcctcaggtatcaggtggaagccagagcgcggatcatcttcttcgacgaggcagaggccgcccatcttcatgttcagacaagtgcgtcgctgccccaaggtgagccagcacggagcatgagcaaggagcacagcggcttgctcagctggcccgagagcttccggaggtctcgtggcagcctaggcttagcagctgagatgctgccgggcggcttgtcttccagggccctgcaactgagcatgtacgggggcagcgtggtgagcctctcctccggccagcagggtcaccggcggcagaggccacgtcatcgcgtgcaggcggccacgacgatgacaaaccagaagaagcacagctcttcctaccccaggatgccatccatatccaaggagcggcatctgctctccgtgcagtcggagggctccaacatgaagagagtggcagctctacctgaggttgctgccaccgctcctgctccggcaggggcagcacaggggcagcggagggctatgaacttgcaggaggaatacaactcgagcgaagactccgccggcgaagaagtcatcgtcagagttgactcgcccagcatgctctctttccgtgagtccaccgccgtgcctccgccccaggagcagtagctggatgcctggatgtggtcttctcttctcgtgtattgtattgtactgtatgtattgtatcagggaagctttggcgcagtggtgtggtgtggtgtggtgtggtaaacaaaataaataaaacacatttccgcgttccatattttctcttcatgatcaccgaataaataaaagaaacagagacaatgatgcggaagaaaaatgcgctctttctgtctggacccgccgccgcctcaacttacgagaccaacaaaaactgggtgcaacccat

SEQ ID NO: 20391 - DNA, 499 bp, Zea Mays
catacaaagcaaccaaacgtccagaatgtagcgacttgagtattgtacacatcttgcgggcaaaacatataaaccaattaacagatgcaagctaggtcgcccgtacctgcaaaagaagtagcttaggcgtcgcaaggggagcaccacggcggtggcgtccgccacgttgtggcattccctcaccgtgacgccagagatgaaactgcctttagcccttcacgacataccacgtgctccacatcaccgttgtggatggccagatgacgggagatacggcggccgcggtgagcgcggggccgaaggctggacgagcggagcagccgaggcgtggggccgcaggatggaggagccgaggtgctcgggcggagggtggaggccatgcagtggaggaacggaagacggcggatgagcggacgagcggaggaggcggagctggggtcggccgcgcgggttacggggcggcggcgggactatgctattttggcgctcgcgttgtgtt

SEQ ID NO: 20392 - DNA, 2994 bp, Zea Mays
aaacctccaccgccgtcaatataagcgacagctgcaggagggcccgggccgggcccgcagttgaaaccgccagccgttccttcccacgctcctccccgcccccggtccgccccccacctcaattccacaccccgcggcgaggccgcggggcgcccgcgcccaaacgccaaaaccctagctccccacccacccaccccaagcaccgcggggccgccgcgcgctcgcccacggtcgccacggatgcgcgcggcccgctcgcggacctcgacgacaccccgctcgcttgccgcggctgttccgccatggacgagcccgagaaagtgaggggcagggaggatgcggcgtcgggccgcgaggctggcggcgccgaggaggccggggatgggttccagctcgtgatccatggcaagaagaagaagagggcggccagcggccaggactgcgggactgctggctctggctctggcgctggcgccgggccagtgcgggcgttgaccagggagaagggagccgcgccggcgccgggggccaaggccaaggtgcctttccacgatccaagcattccccggccgcaggacgtatacaaaatcagagtggataactacaagccattcgagcatgtctggctggagcgcagcgaagacggcacccgacgtgttcacccgctggaaaacctgcctgttgaacagttcgttgacagaaatgttcctgacagagaaccagtgaagccagctgatttagaggatacaccatttacgctggttcaagatcacaaaggcttaacagaattagctaagaagttgaagagcgtaactgaatttgctgtagatctggagcataatcaatataggtcatttcagggcttgacctgcttgatgcagatttcaacaagaacagaagactttattgtggacactcttaagctacgcatatacattggtctctatttgcaagagcctttcaaagatccaacaaagagaaaggtaatgcatggtgcggatcgtgatataatgtggctccagcgggacttccacatctatgtgtgcaatctttttgacacaggacaggcttcaagggtcttacagatggagagaaacagccttgagcacctattgcttcatttttgtggagtaacagcaaagaaggagtatcaaaatgcagactggaggtcgagaccacttcctgatgaaatgatcaagtatgctagagaagatacacactatctgttgtacatatatgatttaatgagacagagactacagagggagtcaacatttgaaaatgatcttcttctagaggtccataagcgcagtaatgaaatttgcttacagttctatgagaaggagcttctgacagatacatcctatctccacatatacgggttgcaggaacatgaactggatgcaagacagctggctgttgttgctgctctacatgagtggagagatcgtatagctcgtcaggaagatgagagtactggttatatactgccaaataaggctttaattgagatagcaaagcagatgcctacagatgttggacatttgaaaagaattgtgaaatcaaaatatccatatgttgagagcaatcttgagctaattgcttacactgtctggaatgcacttgagtattcttatgccttcgaaggaatagctgagcaactaaagaaggaacggctggaacaggtggcactgaaaagtggtcagaccagtgatgaagtgactcctttggatgctgacattgataggagtaattttgattcatctgatcagtctgcaaatgtcaatgttgcttctggtagtagggctggttttatgagtgaagcagctttgatcagcagcatccacctagaggacaaaactcaaaccatgtcctcagttaagacctctcagaccttgctaggccagatcagaccagtgaataaggatgtcctgagcaataatatacatcagcaggctattcaggacctaagtctcactttaaaagctctaaaaggaaacttggcatctggaggagagtcaaatgagcagactagaagaattagtgaattttcctgaggtccgaatgaagatttcgggggtgaagattgtagttgctccttggaactcccaagcgacagcaaaagcaaggctccacactgcttggattcgtgctgaaaatgttccagaagagattcagaattaccaagcgatatgtgaattgggttctaccattggtgcggtggaagagattgatgtagaagctctggagacaaaggacattgttagattcaaagtgaatgtaaaaagtgtatcaatgattccctcggttatagaaattggtattaaaccttttctatacgacatttttttcaaagtggagtcattagatgaagaacgatggaatgatgatactgtttgcttgggaaaaagagctactatcgagtctcttcaattagatgataatattactgagaatttgatgaaaaaagtcaagagtgaaaaagggaaggggatggcagatcatatgcttactggcattttggaagataactctttcaaaggtgggaagtcaggtaatgctcagaaagtgagtaaagatggtgagaaagggattgagggttatagtgaagagaaggtggatttcgatgggagtggggatgatctccttagctctcatgagcttgaagatctggtgaaagaggcaaatattgagatgagtgcttcacaagagattgcaggtgtagacaatacagatcctgggatgtccaaagagttgcaagctgccaagattaaaaaaggcaaagggaagatgattgaactagtggaagggactagaaagagcagcagattggaaaccaatggagatatcaaggtcactgagaaagtcatatccagagccgagtacaaggacgccttcttacacaaaagagagggaaagagagaagctggcggcaggaagttggtgcatcaaaaaaatggctaaagaaatcttcagtcgtgacttgggctggcg

SEQ ID NO: 20393 - DNA, 1026 bp, Zea Mays
gcctggcccattgcaatctcgagaagcaactccgtcgcgccgcactcaatcgcctccgattctgcggagactcagcatcggaatggcggcggcggctcgtgccgggttccggcggctcttctccgtctcggccttcgctgcaccgcctcctcctgccgcgcgccccgcggcgaacccttgcaacaacctcttcgtctcaggatccaagttctagcaaatagcacaattgccactgtactggttgtgatatttgcactaatgactggagggcaagatcagtgcatggactcaaatggttcaaagcttataactggcatcataggtggtatcattggccactactgttgctgcaatggagatacttggtcatctgaaatcggtgtgcttagtaatgaacaaccaaggcttattacatcccttaaggaagggtacaaatggtgcagtcaccttacaaggacttcttgctgccacaggaggaggccttatcattggtctcactttcgttgttgttggactgttgactgctgaatgttcttccgatatggccatcaggcagctcctagtactacccatctctgctgcagctggtttgcttgggagtctaattgattcattgctgggagctacacttgaattcagtgggtattgcagtgttcggaagaaggtggtcagcaaaaggggccctacggttacaaagatttctgggatgactatcctggacaacgatgctgttaatgcagtatctattctgctaacaactgtacttacagcttatgtatgcatttgcatcttttaaaaaactagttgggtaaatcttgagttgaaccctatttttcattgagcaatgtattgtgaccttagcctgcacggttcctggaaatggaacagcctgcaacttctctgtgtattggtacaatttgtattatggcacagaaaggccgattcatctccagcttgatactaatggttcactggaaactttttatattcccattgcaaaatgttacgatattggaatcacccttc

SEQ ID NO: 20394 - DNA, 1322 bp, Zea Mays
gcccgggattcactgatgcacagttacaggcagaatctgacacctttagtgaaaatggacacaagagcttccttgcaatggctgattatctggtcactgacaaaatcactgcattcataatgcaaatgcagcgtgcagcaacagaagtcctaaaagagaagccactgaaggaccgtatgaacatggaccaagtattgcaaacagtaatacaaatattggacacgttcatggatctttgtgaagctaactcatggataaattatcttgtacctgagaatccccctgtttatgcacagttgatggctgtgtccagtagtggctttgatgattcatcactcctaaatgatttcagaaagctagaccaactaatgtctgagacacgaatagtactggcaagtgatgatttcagaaatatcatggagaggtcattgaggaagatagcagaagtggtggtaggggacctggctgtgcagacaactctaggatcaggattacccttagcaactctcttgcccaaagttggtcatctgagttccccattgcttgaggagccaaacaataacaaatacatccagatcatcagaagtatgcctgaagtggaactcttctacacattcctgtacgcaaacatgccaccagaaacatgatctgtacattgatgcgaaaagaacacttgcttctgaattttggctccaaagatctggtggtacatgtggatgatgttcaaccgtctgaaatcaggaaaccaacaaacgcagacagactggatttctgcccttgtatatactgagatattccgttgttgctagcaggaaccgagtaaagctccttccatttcgattctttctttctttgaagtttcggttgtgcacgtttagatagtcacacgcactggggctgctatttcgctatatttttgatcgatgacagatgttccagaagttttacttgccacaagtggctaatgtatacattgcaagtctgttgaatcctgtgttgggtgaatgaatattcgagcccacagtttgcgatcctgcaggcatatgattgcttgtgtagttttgctttaggaagaactggattgcctgaatgtttgaaacagctgagtttcttgcattatgtaattttcttcgtgacgcttgaaaacttttgtcattttttcttgctgttcggtaatgaaattcagttcgaccgagtacagtaataatattcggtggagcgtgaagcttcagcttcattagtgctgcttggaaatgtcatgtcatgaggtcatcttcagaccgtgtatatggatatataaatcagcagaccttgtatatgga

SEQ ID NO: 20395 - DNA, 1014 bp, Zea Mays
gacaatgaactgattcaaatttgttccttttaggtgactcttaaagttatccgtggacctctatttgatgaagtccatcaacaattcagctcgtggatttatcagattacacgactctacaagaacaaggagcatgctgaagttgaatacacgattgggccaatccctgttgacgatgacgtaggaaaggaggttatcacacagttgacagcaaatatgagtacaaacagtacattttatacagattccaatggaagggatttcctcaaaagggtgagaaactacagggaggattggaaccttcaagtgactcaaccagttgcaggaaattactacccggccaggggcacttactatatcaatgtcgagaagctaggccatggagctcattggcgccgtacatatggccagcaagtctactctccctttctccttgcttttactcatgaggatgcgacaagctcaaaaccctacagtgtggccaaagatagtatgatggatgggaattacagccttcctgacaacgttgcgattgtcactttgcagaatcttgatgatggtaccacactactccgcttggcccatcttttccaagctggcgaggacccgagatattcagaggtagcagaggttgatctgaaaaaggtctttggaaagagaactatcaaggaactgaccgagactaacctctccgcaaatcaaaagaagtcagagatgaagcagctcaactggagagttattgaggacgctgaaagtggtcctgccccggtaaaaggtggcccagttgattgtcgtgctctggtcgttgcgctgggacccatggagatacgcaccttcttgctgaaattttaatcgcatttaccgtgcttgtaattgtaaagaaaaaacaatgataaatggagaacttgctatcgttatttccttttgtaaaaaaaagatgaaatacccaaatagaacgttaaatttgcgcaaggtatgtacaatctacatcatgtgttttctattatatggttg

SEQ ID NO: 20396 - DNA, 1056 bp, Zea Mays
catgtattgctatttttcatgcactcctattgaaggctaaatctttgggattccactgcctctggaggtctcctttggatatgtccgaaccatatcaaacagtattggacaagcttatgtgtgatcccatcctctttcaccaaaagtgaaccagatgagattcacaagatatgcaatgtcatcggtagtccagatgagcaatcttggcctcaaggattgtctcttgcagaagcaatgaagtatcagttcccacagaccaaaggcagtcaattgtctgaggtgatgacaacagctagtagcgaggcaattgacctcatctcatcactatgctcatgggatcctagcaagagaccaaaggccacagaagtcctccagcataccttcttccagggttgtacatgtgttccgcttcctgtccgtcggaaagcttcatcgcttcctaaaacacctccatgtgttggatcaaagagaatttccgagaacagtgttgctagaagattctcgaccgggactctatctacgatgaaatctcatagcaatgcacctgcaaaatcaaacggtttatctaggactggtgtacaaagaaaacttcacttggatcgtcagccaccgcagaagagtacaaaaccgaccgagaacagcaataagctagctacaaatcgggtcccagcccggaacagcccagggaatcctgtacttaggcattcacgcagcttgcctgaaactggtcgacgagcagtacagaaggtctcatcaatcacagagaaactgtcgcaaatgtcggtgacctccagaacacgaagcgccgtgaagcctgccgccccgacgatgaaggccggacatggcaagtcagacttcctggggaagtctgacgatatccctccggcaaagaggctgacgagaaaattggtcagctaaacaagggtacagtgcacaggtgagaacaccgtaaaatgccaatttcacgtactgtatgcacatgagttgtcactctccaatatggataaagtattataccaagtggcgctagaaaataccaatgtggatgattggaaa

SEQ ID NO: 20397 - DNA, 1690 bp, Zea Mays
aagactggtttgccaatttgactcggacaattgaaggtcacaagggagaccagagatagattttgcaacatgcatctatttccttggataagttattaaaatccaaaggtgcaagagctggagagtctaatggacctatcaaggttgctccacagctgtcaatacagccatctagcaactctgttcgcactccagtcaaaactgagctcgtaaagcaatctcaatcaggcagccttcaagtccttagccgtgagcagaatggtactgtaaatactgctgccaaagacatcaccagcaacaatcctgtgagccctgttttgggtcgatcttcttcaatggaacctatgagaaagtctattgtcaacccaaagcttaaggttggtactaatggccgttctttgcatcctctgcaaggttcatttgcagacagaaaagcaagtgcaaaagacaagtacaaattttttgagttgttgcgaagtaagtctgtaaatggttcaagcgctgctattgagtctccatctagcctgactgatgatcagcagaactctagtcctgaattgcctttcaagtttattgaaaatgggaacagttcctgtgaagaagcaaattcttgtgagggatcacagcgacacttgtcggacaatgaggaaattattccaccttcagaatctcatgacgttttagatgagggatctctggggattcaagttgacgacaagggttccagctcttcaccagtacttggcacacaagatatatcttccaagaagccccaggaagacaatgttgatattgttgtacctgtttatgtaaatgatggttctgtgatgcccaattctgttgacaatgaagcaagattgctgttggaggaagccaatcctgctcaagtgttacagcacattgatgcaagggaggagaatccctgtcctgctcaagagttcgagtccataggggcaggtggggaggaagagttgaacctcctgagatctatgggctgggatgagaatgaagaggttcagcctcttcagcaggaggagattgctgattgtgtaaggcagaacgtcaggctgcagcagaagcttcaggaatgcaggggctgatcgccgaatcaatggagcaacgtcactgtgcgtcaccatgctgagaagatgtgggccgcgtggagggagctgggttttggacttttggtaccttccgggcaaccgatcagataatgattgtctctagcttagcaaatggagagttttgtttttgttaatgcttgttcagcattgtgggggaaggtttcctggtagagctgacaattttcccccattgagaagaggttttagggtttctcttcctcattttcccagaaggaatacaccaaatggaagtcttgtctggtgttggaggcacataggtgtgcgttgctctcaaagaagaataggttgtctcttacttttcgccgctatgttttcttttttggaaaaaagggaaaaaagaatgatccagcttaacatgaaaaaggtgcacagggattgccttggtctttaatcttgctttatttgcgatctttaaagagaacgatcgagcttaacacttaaatagatgactgtcgaaatgatagcagcttgagttgctcaccgaaccaacacattcgtatattgtgataagaagctcccccatgaaaggttctctacttttgttc

SEQ ID NO: 20398 - DNA, 1336 bp, Zea Mays
ctcctatctataaaacaccacgccggaccggaccacacgcacagcggcatcaccagctacagctagcatagcaaggaccacgacgtgccgacggcagagaagcgcaactcaactcgtcgggcttcctttttcccgttctttgaggcgcaaaggaaaaaccaagcaagagggagaaggctacctaacctagctagctaaggacgagcaatggaggtggccgcagcagcgagctacagctactacggcttggaggcggccgacgacgacgtcgacaacctcagggccacggagctcaggctcggcctgccgggcacggaggcggcggaggaggaggaggaggcccggcaggcccagaaggtggcggcgccgccgccgtccacgcccaggggcaagaagcgcgacggcgtcagcggcgggatcgacgccgcgccgccggccgccaaggctcaggtggtggggtggccgccggtgaggtcgtacaggaagagctgcttccagcagcagcaggcgggcgccaagggcaagccagcggcggcggatgagggtgctccgggtccggcgggcggcggggtgttcgtgaaggtgagcatggacggcgcgccctacctcaggaaggtggacctcggcacgtgcgggggctaccgccagctgcgggaggcgctggaagccatgttcctctgcttctccgggccgggctcgggcgacgcgtccggcggcggcggcggcggcagcccctccgacttcgccgtcacctacgaggacaaggacggcgacctcatgctcgtcggcgacgtgcccttcagaccactttggattcataccattactatctcacttacatgtgggttcacatgagtcaatgacatgtggggtccatggtatatatctaaaatttggatcttttaatggtatagatccaattgttcctttttttttctccgcagcatgttcatcggcacctgcaagcggctgaggatcatgaaggggtctgaggccagactaggcctcgggtcagccaagaacaacgactgagggagagggagacgacgaccattgtgcagacccgaccgagatccacgcacacggcggcttgtgcacgcgtgagcgggggattgttgtgcgtccgaggcatggggtagtatgggcttgtgttgtaccatcccctcctcgtctgccatcaatgagaagatgaagctgcttgcttggattggaacgaggggacggagatggagagagatagaaaagctttaatttgtgcatccaaccaagtggagtggagtggaatgatgtgtggtcgctttgttcttttgttttttttttattttgaactttggtt

SEQ ID NO: 20399 - DNA, 4733 bp, Zea Mays
cagcgagcaagctgaaggtgaaagccacagcagctcgtccccttccccccacttcttcctcagataaggagaggccccaggccagagaaaaaagcatcgaatttccccccgttaattggcctgagccctcagccgtctaccagcagcagctagaggcagacaagctaggttttactgcttcattgagcacaaagatccgctgacctcttgctcttgatgattggatcagtggtttcaggcttcggggggttcgatcagatgttgtatgaataatagcaggattgcttgagagactatagtttgggtactgtttgcttctgtatttactggtacggtttcctactgatctgcggctgcgcaggaaggcattctcttttttgccgtaccatggatgcaccggatgttcaacagagcatgggatataaggagtccaggggtggtatgcctaagtttttccatgcccttggaccagcactcctgatttcaatgggttacattgatctcgggaagtgggtggcagccgttgaagctggttcttgttttggattcgacctggtgttgctggctctccttttcaatttcactgccattgtatgtcagtaccttgctgcttgcattggcactgtcacagggaagaatcttgcagagatatgccaccaagagtacaaccagccaacatgtatattccttggtgttcaagctggattgtctttgttgacgtcagagctgactatgatttttggcatagcactcggattcaacctcctgtttgaatatgatgatctcatcacagggatatgctttgcaacagtggtacctaatctgctaccatatgctatatcccacctgggaaagaagatggaagggacaataaatgcctgcatagcaggatttgcacttcttagttatgtgcttggcttattggttagccagccacaaattcctctcacgatgaatgtaatattccccaagatcagtggtgagagtgcttactctctgatggcgcttcttggtgcaaacataatggcacacaacttctacattcattcatcagttgtccagggtcagaaaaagtcatctgcagttggtcttggagccttatttcacgaccaccttttttcaatattgttcatttttactggaatctttatggtgaactatgttctaatgaactctgcagcagcggaatctactaatactcttctcattaccttccaagatgttgtagagctaatgaatcagatatttgtaaaccctctggcaccaactatatttttagtggttcttctcttctccagccacatcatctcgctgacatctgctatcggtagccaagtgatttcacaccatttattcggtataaaccttcctctttctggacatcgtctcctactgaaggtttttgccatagttcctactctgtactgggcgaaagttgcaggagctgaagggatataccaattattaattatatgccagattattcaagccatgcttcttccatcttcagtcgtcccactttttcgtgttgcttcatcaagatcaataatgggagcccatagagtgtctttgcatctggagatactggtttttcttgcatttctccttatgctattttcaaatatcatatttgtggcagaaatgctatttggcgacagtgggtggatgaacaatctgaaaggatatactggaagccctgtggtgctcccatataccgttttagttttagttgcacttatatctgtggctttttcactgtacctggctgttacaccattgagatctggaagtcatgaagctgaatcccatgaatggtctgtgcattctcagagagaactcttgaatacttctcaagaaagggaagatgttaaggtggacaatgttacatatgaggaagatcaaagatcagatgttgtcccttctcccagggatgtgcctgacagccatccggaactggccttggactatattgatacttctgacactgctgtagaatctgatcacgactctcaacaatctactgcttatgcatccactgctcctgaaacctgctcctccccgtcgtttactcgcgaggagtcaaaatcagttgttgcagtcaactggccggagcctttggagaaggttcctacttctactgtgatggaggaaagcacagtagaaaatgtggtctctaggatcacgactgaaagagatgttttagtagaaacagatgttgtctcgggcaaggataaggaagatatccgtactttggagtctgagaagtcaattgttgatagcaccccatatgtgtctgatgacggtccgccatcccttactttcagcaggggaaagggctcagatgcaggaaatggcagtggtagtctctcaaggttatctggtttgggccgtgcagcaaggagacagctagctgctactcttgatgagttctgggggcatctgtttgattaccatggtaagctcactcaagaagctagcaccaaaaagtttggtatcttgcttgggatagaccttagaacacctagcacatctgtaagaacggataaacaagctgctgaaatacttaagagcccactggtgagagactcaatgcggggggcagcttttttgtcaagctcagtggacatgatgtcccctaagaatgaaacgtcgaatttggaacttgcatatgggcttcagaggggacctggcatgggattgtcaagctggtctcagggtatgcagctaccaaatacacagctgcagagctcaagcaatagcctacttgagcagagtgcaagattaaactcaaattttagttcatcttattcagacaacaatcagttctaccaacctgcaacaattcatggataccagctcacatcttacctgaaacagatgaatgccagcccaagcctttactctagcatgccgctggacccacaacggcttccaaaatcatctgtgtctgctgtgccaaactatgctgattccatgatgcatgctcgtaatcataacctgcttgcttcactgggtggtactactacacagcttcctgcaacatcccgcgtaggctcaatgatgcctgaaagatcgtattatgatccttccagcgttgatgggaatgaaaacgctggttcacctgcttactcaaaaaagtaccacagctcacctgatatgtctggaataatcgctgcaagtagagctgcactcttgaatgaagcaaagttgggtgctgccattggaccacagtcatacctcagcaggctggcggcagaaagatctcaatatgcaagctcaacagccaggcccgcggctccattagcatttgacgagctttcacctcctaagctccagagtgatatcttctcggcgcagtcaagcatgagaccaagtgctagatccctttgggctaagcaaccatttgagcaattgttcggcatgtcaagtgcagagctcagtaaaggtgacttcaatcttccaggcagatcaggtggcgtggccaaggatgatttctcttataaggaatctgagacgaagcttcttcagtccctcaggctctgcatcatgaagctccttaagctagagggatcagggtggctgttcaagcaaaatggtggttgtgatgaagatctaatcgaccgagtcgctgcagccgagaagctattgatgcaagggactgccgagaatcaactgctgcttcatggtggtgatctccagcaacattcttccgaccaggccggcatccagtacatgcgcacgcttcccaactgcggggaggactgtgtttggcgcgcgtcactcgtcgttagtttcggtgtctggtgtgtccgccgagtgctggacatgtctctggtggaaagcaggccagaactttggggcaagtatacctatgtccttaaccgtcttcaggggatcttggaccctgcgttctccaagcctcggggtgctctgacaatatgcacctgccttcagaaagacaccagagtgcgcaatagcccaccccacagtgggctaacagccatgggcccggtccccacaccgatccggggcgccttcacgaccgcaggcgtggttctggagatgatcaaggacgtggaggctgcggtctcaggccgcaagggcaggagcggcacggcggcgggcgacgtcgccttccccaaggggaaggagaacctggcctccgtgctgaagcggtacaagcggcggctcgccagcaagggccagtagcgcgcgggtgtcagacaggcaggcgatcgcaagcaatgttaggaggagcctgactattgttctccaggggggctgccactggcgccggcctccctgagccctggattttttcgttgcacgacgttcctagggaccggtggttgcccgatggtcgtcttggtcccttccagcaggttttttttttccttccctctttctgttggtttctttttgttggctttgtgatgttttgtaaggggcaactagggtatgtgctcagaaggactcaagatgtacacgcgaagatgtactagtctgctgatgcagcgttgtaaagtccacactctgcaggttaaccctttttggggccgtcaagtgttagtgcgtgccctatgtatgttaatcacccctgcagagaggttgcgaatactgaactactcacagacctgcacctgtcgagatcgtttgtaatatccgacgtcttgttcagaattgttctcactcttttttgcccgttgtgtaatttaccctgaagggacttcaag

SEQ ID NO: 20400 - DNA, 4087 bp, Zea Mays
agcgacttcgtctgcttcgcatttccccccaattctctcccgcccaaagccccaaaccaccacccaaaatcctctctgccgcccgccgatggccaccgccgccgccatggccgatgacgacgacttcgcctcgccgccgctcgccccgcgtgcgcgggaggaaggaggaggcagaggcgtgtaccaggtgggcggcgtgccggtggagttcccctacaagccctacgggacgcagctggcgttcatgggacgggtcatcgcgacgctcgaccgtgcccggcggcaggggcgctcccacgcgctcctcgagtcgcccacaggcaccggaaagtcgctctccctcctctgctccgcgctcgcctggcagcggcactacccgctccgttcccctcccgcccccgatccattgctccacggcggaggattcgtcccagatgatacgcagccgcagccgacgccagtcgtcccggagaaggctgtcaagaagaagaacgccccgataatctattacgcgacgaggacgcacgcgcagataagccaggttgtccgggagtaccgcaagacgtcgtaccgagtgcgcatggccatcttggcctcaaggaagcactactgtgtcaataaatttgcttgcgcgagcgacaacattgatgagaaatggaatgcacagaaactaagtcggcatccatcccttcagattggtggctgctatgaagttcacgatattgaggatcttgtcagagttggacagaaagcaaaaggatgtccgtattttgctgcacaacacatggcagaagcagcccaattggttttctgcccatataactacctgattagtccggttgtcaggagagcaatggacatcgatatcagtggttccatcattattcttgacgaggcacacaacatagaagatatagcacgtgatgctggcagtattgacatcgatgaagaatcactttgctatttaaaacagatgctaaagctaattcactatggcgaagtgttgcagggagaacttcaaaacctggccgctaatgaggccgttgcaatgatataccaacccttgcacgatattattcaggctcttattggttggattgctgagagggaggacaatttgcataatcatgagttcggacatccggcttcatattggactggtgaaaaggcaatgaatgaacttcagcgggctggtatttctccaatgtatttcccggtattgcaagaatgtgcaacaaaggcaattaaagctgcttcagatactgaatcagatggttcacacttaagtggtggtagtgctatgacactagagagtctattctcttcgttgagctacttttttgctcagaaaggacgcaattcatgtgattatcaacttgctttgcagcgttttgttaaaaaggaaggcaaggacgtaatttcttcaacatgcacaatgagtttgtggtgtctcaatcctgctgttgtttttcaagaaattgcagatcgaacactttcggtaattctgacttctggaacactttcaccaatgggttcctttacatctgaacttggtgtccagtttgaggcctgcatggaagctcctcatgtaattaatgctgattctcaggtttttgcagctgtgctatcatctggtccaacaaggcagatattgaatgctagctataaaactgcggacaattcatctttccaggatgaacttggagcttcactagaggaaatatgcagaattgtgcctggtggtgctctagtgttttttcctagctacaagttgatggacaaattgcaagtgcgctggtctcagacaggtcaatgggcacggcttaatgctcaaaaacatgtgtttgttgagcctaagggaagtagtgaggaactggatcctgttttaaaagggtactatgacgcaatccttggtaaagctcctgtcaagaaaggcagaggtggttcaaaacaaatagcgaagaatcgagtgacaaaaaaatcatcacaggaatcagtgaaagcaggagctgctcttcttgcagtttgccgtgggaaggtatctgaagggattgacttcgctgatgacaatgctagagttgtggttattgttggaattccttttccaaatataaacgatgttcaagtaaagctgaaaaggagatataatgattcatacaaatcatcaaaacatctgttaagtgggagtgaatggtactgtcatcaggcatttcgtgctttaaaccaagctgcaggtcgttgcattcgtcataaatctgattacggaggcataattctgattgatgagcgatatcaggatgacagaaatgttctctacatttccaaatggcttaggaatgcaatcaagaagtatgatagcttccaggagacaatggctaagttgcaaaagttctttcagaatgctcaggaaaaaataaaaattaaagattgtggcatcttccccaaggttaagttggataatgaagcacctcaatctttcagtgatgataaaagaaagttgccgtggccagaattgagttcctcaaaccactcagtatcacgatgtaatcagaaggtaaagactgaatgtcttagtcagaggattccagacattgatggtgtggcggtaaaccaaaaagttgtgggtgtagccaatactggagcaaattatggagtcaaaacagaaattataaaattggaggaggatgattttaaacctaggtatgcagagatcactatcttaaatccattagaagacaggtcacggcaacctactcttgttgagggaacttctgcagcgactccagtagctagtccaagcaactatgctgaggtaaacacctcagtaaatatcaacaatggagatcagattgcagacatgtccatttctcctttttcaacaaacagaaatctttcttccctgtccacactggcagctactcctgaaaggaccacagacaaagactgtcatgattcttttattaacagaagtgtaaattctcactatgagaaaaagagaaggttgagctccccaatgagttgtacttacacgacgcagtctagtcctccaagcaaatcattctgccacactggttctgttatgcctggggatttgaatagaaattctgaattgtgttgtaaaaatataggattgtccaggtgtgaaaatgtcaagtttgaaagaaactacagtccagaagaggtttcagcaaagaagtctatgcaaaagaaacttcttataaattgcattagatgcaaaacagctcttgggttagaagaagatgggtttcttgttacttgtacacaatattattcatcaaaattgtacttggcatatcttttgaaacatgggctatcaacttttggcatcctggaggatgatttttcagcatcgacaccaacagaggtacacgtagtgcagtgtgaagcttcgtcactcaacaaaaatgtatttggcaaattcagcagccagggtcatgtttggtttgcaaaggatggatgtgtatacaacgcaatgacctgttctttgtgctcttctgaaaacacaagtgccatggtcctcggtgtgcaagttcttgcaactgataggtcaaatcaacaattggtggaaaaggtgctcttgttcagtgatcgtttggatgtccagtctgagccatcaaagggacagatttcaagaactcgaagagatgctagtaacatctgccagcaatctgtgatcgaccttgattcttttgcatataaaccattaaagaaagatcctgtggcgctgaactcaagaaggtctaagcttaggttacctgccccgaacaaatccaccactggtacataatttgatggagagtttgagacaatggcgatctttgccgtgaagcattgggaagaactttgttctgtgagatatgacatgcggggagatgcagatgttacgtcgccatggagatttatagtttcaaacatccacatggattagagaagttccctgagctgaagtagggtgtaaaatgcatggcctggcagtagaaaattaggatgctgatgtctatatccatttacatgcgtcccattgtcgattatatctatgaacagtttttgcgttctgaaatttcgc

SEQ ID NO: 20401 - DNA, 1576 bp, Zea Mays
gacttgagttcaccggtactatttatgtaccgtacataaagtaaagtttaacgaaaagaaaagcacgggagacgggacgggaccgctgggcgcgccgggccgcgccgagccgagcgagtcgtccactctccactccgcccgccacgcccacgccccgtcctcgcttccgtctcccacaatccaaggacaccgagcagcaggcggcggaagcaacccgctgtgggggcggcgtggagtccagttttgctcggctcgtcgctgggatccgccggccggcgaagcggggaagggaagaggagcggagattggagagtacaagcaggggaagatgtcagacgcgctgatcaacggcctcgccggcgccggcggcgggatcatcgcccagctccttacctacccgctccagaccgttgtgaagaacgaggggtgggagcgcctgtatggcgggcttatgccctctctcgtcggcaccgctgcctcccagggtgtctactactacttctaccaaatattccggaacagggccgaggcaagggcccttgagcgatccaggagagggcttggcgatgggtctgtcggcatgctccagtctctcactgtcgctgccctgtctggctgtgtcaatgtactgctcacaaacccgatttgggttgttgttacacgaatgcaaactcacagaaaggcaaacaaacagcaaagacctcagggtttgaattgtgctcttgataagccccttgaagctgctacagctgaaaacgctccatacaaaacgattgatgtttttcaggaactctacaaagaatctggagttcttggcttctggaaaggggtaattccggctcttatcatggttagcaatcccgcaattcagttcatgctatatgagactcttctgaagaaattgaagaagagacgagcctctaattttaagggagctgatggattgactgctcttgaaatttttcttcttggtgctgttgcgaaacttggtgcaaccgtcgttacgtatccccttctagttgttaaggcaagacttcaggcaaagcacatgattaacgatgacaagaggcatcgctacaaaggtacacttgatgcgttcacaaagatggtacgatatgagggtctgtcagggatgtacaaaggaatgggcacaaaaattgtgcaaagtgtttttgcttctgctttgctttttatgattaaggaggagctggtgaagggtgctcgactattggtaactggtaacactagtctggttaagaaactaccatcaaagtcatcaagatgaactacgggcatcgcaagcgttagtatatcatcctaaaaagccatttattatccgcataaaccgtaaacaaggtcgacaagctatagagctcgcctctgctttggatatgtcaactgtaggttacacaatagccagtatgattcacgtagggaccaaagactatgttggatagatatttgtatcattcatgtagaatgtatcgtggaagatcgaaacagaagaaaataaataagtatgataatttgaacttcggccatctgctctaaacttctgatttcctgacttgctttt

SEQ ID NO: 20402 - DNA, 213 bp, Zea Mays
aaagacctggataacagtagaagctttagcattctttaagtgccgcaacctctgaactgctaagatatagcgaatcccagactggatcacaagagaagcagaacgaagacgcaaatatgcacaacgacacaaccatcttctagcatatctttcaactgaaacagctgcggctatctgtctcttagcttcaagcacatttcgtgctaaacaccc

SEQ ID NO: 20403 - DNA, 2358 bp, Zea Mays
cggaaagaacagaacgagagaggactcagggggtggcgccatctagcccgcgaaaggagggagaaggcaacgggaaagcgatagcccgtgccgtggcgcgtggtgggattggcggcaaagcaagcgggggcgatcggagagagagatgggagaaattacgcgtcgaccagcagcagccgccgcaaccagcagcccgcccaaccctacccgcgcgcccgtccccctccccgtcctcgcccgcgtcatcgacccggcacccccccttctcgtcttcccctccacctcgtcacgccgcacgggcccggcccaaataccctcgccctcgcgctcccacctctcgcactccacaaaccctaaccctagctcgctgccgcctctggtccctcgtcgtcggcccactgtctgagataaacctctcgccgccgcggttgctggcagcggcggcggagttggctggcgcggaggtcacttggtcgagttaagcgcgtgttgtaatggaggggctcaacgccactgatgctgtgatcaagaagccaaggagtgttgcattcaggaagccaaggtccatgaagcagctcacggttgagtgcaatggcatttgcctgccatctcggagtgctcgtcatgacgatgacactggcgtcgaagctggtgggcagcggaggaaagagctacacctaaatagccctgaaatgaagggctccatgactcataggagtgacgtgcccagtaagataagaagggatgataaatctggaggtgactatgatggtcatggtcggagcagaaaaacgaaggatgccgccaagcatggaagtgaaagtgttcttgccctggagtgcacagcaagaaacattgaatcccttgacaatccacagttggtccccagagatgactctttgcctggtgaaaataggccgagaaaagtaaagttcaaatttaatcggacccaacgtaccaaaaatggccaggatgatggtggcagtggcattcctgccacgtcggcctgctttattaatcagtacaagcaaaaggattctggtggccacacaaccaaagatacccatggtaatcgtgctgaaggaaaacatggtaacaagcatggcaattctctgtctcctgaccttgtttgcaagagcaaaaggattcctaagaaaagaacacttgacgaagattctgatgatggagatggtgaaatacgctatctacaaaaactcaaaggggcaaaagttgcaccagatcctgtgaacactggtcataaagcttatgatttcgttgatgacgcactcaagaaaaaagagctaaccaagctttctaaaaataagagcatcccatatgaagtggacgaagacttcagaatgtctcggtctggcaggaatggtaggaagaagttaggggatgacaatgagtttatagaagatgaggaatctgagatggaggaaaagagtgggctaaagaaagctgattcacctcaagatgtgaagattgaaacccctggtcttacaacaagacagcgagcccttcaaagcaggggtgggaatggtgaaagctttattgaatttcccgatggattaccagcagcttcgtcaagaaagcaaaaggagaagctctcagatgtggagctacaagccaaaaaggcagaagctgcacagagacgtaagatgcaagttgagaaggcagagaaagaacaacaggctgaagcaatgaggaagatactgggtctagattctgagaagaaaaaggaagagaagaagctgaaagaacgggaaaacagggaaaaacaagcgaaattggaagaatgcaagaaaaactgcgtccggactgtcatgggcccaaccggaactgtgattacattccctgagagcatggggcttcctagcatatttaactccaagcctgtcagctatccacctccaagggagaagtgtgcaggcccgtcgtgcacaaacccgtacaagtaccgcgactccaagacgctgctccctctctgcagcctggcgtgctacaaggctgtccagggccgccctcctgaccagggaaccgacgctgcccaggggagtggaggtggccaggaaagcgctgggaagcaagcatgatgaatctagctacctgacgcgattgaaccgtgaccgtcagttggctggagaagtgtatgttaacatgtccagctcgctggtgtgtggtttcctttggcagtagtctaacaatcaacctgacaaaagatggggtgatcgcctgcccgtcgtgaaccaagccgggttttgttaatggcggttcgagtttaaacccatggtgtggtcggatcggtgtatgagactagtcgagaaatatgaagggggaaaaaaacttgtacagcaa

SEQ ID NO: 20404 - DNA, 1627 bp, Zea Mays
gcagaagggtgattggtgagccacgctcgagggcacaacggggagagcgcaacagataaatcctctatttggacccgtcgctgcttcccgtcgccattgctgcctcttctcctccttcctccgtccctccctccctcgctctcccatcctcctctgttctcacaatttttgcttctgaatttcctgccggtgtgccggcatcttctttctactgaggcgtagaccaaggaggagagtaattggcgagcggttggagaacgaatacgagacggctccggcggccggaggcccattttttgatgcgtggtgccgtcgaggtccacacgattcgcagagacgtcgccacgccgagtcccctgaggctcagagaccctccggcattggacatgatgaggtaccaaaggctgagcccggactgcctcccgctcggcaacggcggtggcggaggcggaggcgccgtgccccgcaagcaggcgtccagatcctcctacatcagagaggacgacgccccggccgtggccacggatggctcccgcctcgcatcgtacctggcggcctcctcgcacgagcccaagccgctgcgggcccgcgcgccgcagccggcgcctctctcctcggtggccggccggagcccagcgcgcgaccacgcacaccaccaccacacctccgactcctccgacaccgcctccccgccgccgccagccgccacgcgtggatctaacttgcggtcggcgtcctccttcccgtcccgcgcctccgcctccaccgctgccaccggcagccaccacccgccccaccaccacaggaccgtcgaggatcgatcaggcgggcagaagcggtcgtcgccggacaagacgcataggtccaccatggatggcgtctaccaccatcaccaccaccaagagtcgccgttgacgggcaacggcgtcgccaccgccggtgagaagctaggcgtggagcggttcgagctgccgctgatctacatctcgctgtcgcggaaggagaaggaagacgatttccttgcgatgaagggcaccaagctgccccagcggcccaagaaaagggctaagaacgtggacaagaccctccaatttgtcttcccgggtatgtggttgtccgatttgacgaggggacggtacgaggtgcgggagaagaaatgcgtgaagaagaagcgaagagggctgaaagggatggagagcatggacagcgactcggagtaataaggtggaggcgcggcgcagccatcttccatgggggtgggagtcgaggaagaaggggccctagagaaggaggaaaggaggagacgttgagggcaagagtgagcggtcgcgcctgctcaccttgagccgccgccgcgctggaagcgtcggaggacggcggtgcttgccacacacagggctgtgtttctggcggtcgtgaggtttttttgttccttgatgctgagctgcgtctccgcggccgctgtttgcagcatgtaaccctgaaactctgcgatccgtctatctctgccttcttcattttttctcatgcgctttcgagccacctgaaacgagacggttggattcattcgattgcaccggtgacggtaaggtgaaaacgacacaccaccggtggctagttgttggac

SEQ ID NO: 20405 - DNA, 3515 bp, Zea Mays
gtcctgtcaacgatccagatcgtcctgtcgccctcgtccttccaatccgggtatagggtttttagcgccgcctcccacctccaggtccccctctcttccgcggttccgccatcgcgtcgcgaacggcggccagaaaaaagaaaaagaaaaaaaaaacagctcgccgcaccaatctcccctaccatatcgatcgaccctgcaaggtttaatccaacagaattccaccggaaatttggtgaagtgctaatcgcttgcggcttgcctgcccggtctcgtggctttgtgctgctcccgctgtggtgaggaaccctaggatggcgggggtttcgatggcggcggcgcctgagggggtgctgcaccgccggattgagtttcatcttgcacggagaccgcatggctctgtggcggtgggcggcggcgggttccggatggagacgctgaacccggacgccggagaagggagacagtggcgggatcgatccggagctcagcgtcgcaaggatctacctcgggagaattggtgctggattggaaaatcttgggaatacctgctatctcaactcagttctgcaatgcttgacgtacacggagccgttcgctgcctatttgcagagcgggaagcacacgtcctcatgtcgcacatccggattttgtgcattatgtgctcttcagatacatgtcaagactgctctagaatcaactggaaaaatagtgacaccatttcgtattgtcaagaacttgcgctgcatttctcgcactttccgaaattcaagacaagaagatgcacacgagttaatggttaatttgcttgaatccatgcataaatgctgtttaccttctggggtatcgactgagtctcaaagtgcttatgacaaaagcttagttcacaaaatatttggtggccgccttagaagtcaggtcaaatgcacacgttgcttacattgctccaataaatttgatcctttcttggatctcagtcttgagattgccaaggccacgactttggtgcgggcacttgaaaattttaccgaggatgagctactagacgagggtcaaaaggaatacgagtgtgaacgctgcaggcagaaagttgtagcaaagaaacgacttacaattgataaagcccccaatgtcttgacaattcatctgaagcgcttcagccctttcaatcctcgtgagaagattgacaaaaaagtggacttccaatcaattcttgatttgaaaccatttgttagtgactctaaaggaacagattttaaatacagcctttatggtgtcctagtccatacaggttggagcactcaatcaggccattactattgctacgttcgtacatccagcgggatgtggcacaatcttgatgataaagaggtgcgccaagttcgtgaagcagacgtattgaagcagaaggcttatatgttattttatgtacgtaacagtattgggaagtcggtggtgtgcaaagataataatgctgctaatttgctcaagaagaaaacctctgaaaaaatctcaagtttgaatggtattgcacaaaccaatgtaagagcacaaaatttgaatggtgtgtctccatttggtgataagacgcacggcacaatcattggctactctacaatttccagcaagactaaaacaatccactgttcaaagaatgaggtcaaagctgaagatgctccagcctctcaaaacaatgctctaccttccacacaagcccccatagctcgaaatgatgttggtatcttgccaactaaaccaatgcagtttgctgtaaaaaatgaggagaaaacctcatcccaccaacctgcgccatttacaaatacttgtggtgaacaaacagttgttgggaggcccttgcaggaaatggaacctaaggctggtgcaggggaaaatacttctgttgtctctgctgttgctaatgatgccgctacattgtccaaggcagacaaactaacttctcagcctcaaacagctccatcttccaagccaactgccaatgtaaaggacacagctactgagtttgctacactgtctttatcaaagaaggattctgttgtttcaaatggtgctgtgcttagcattggatgtctcacatccggtgagaaagcaatgaacttatcagaatctgtggatcaagctaatgaaatcacaaaggcacttcctacgagtcagaacaatactgcaccagtaattgctcaagcagattgtggagtagagatcagctctggtgtcatcatgcacgttgctgtgtctgcttcatgcaatggaactacagagaaaaaggtgaattcgaagtcaaagaagtttgtgaggtatcctgttgtgaacatgtggttagggtccagacatctaaagccagggaagaaagcgaaccgcaagagaagtaaaatgataagacgtgttgtagcctgcaaggacgcggcaaatttatcttgtttgagtgagcagctgacgtcaacatcgtccactgcatgctctgaaaccgtagaatgtacctccagccatcagaaacggtcacatgctagtgcaaggtccaaagatgacgcccagtcctcgcaaaacaagcagaaggtcgacggagctcgtgtcggtgctggcacaagtgcaccttcttgcagtgccggcgttccaaagtctgatccgaacccttccacagatgctaaggttgtagcgacccagcctgccagtattcgcgcaacggacctgatggaagctaccgttccgcgctgggatgacgtagacatgccaaacataaaggtcgctgagccgcagtccaaacgcaagagcggtggctacatcttagatgagtgggacgaggagtacgaccgagggaagacgaagaaggtgcggaggtcaaagcaagactttggcgggccaaacccgttccaggaggaggcggactacgtatcgcagcggaggacgaagcagaaatcctaccgaggcaagtcttggaacaagcgggcctaacacggtagagaggggggagttgagagaatacgagagagagagagagagagagagaatccccggacgcacatgctgtttgttgttacgttttagcacccattggtgagggagatttacgtttaaaaaccatatccgtcgtcggtacggtagtccccattagttgtcgacgatgtgacgttttgggcagttttcgtagaacatttgaaacatttgttcggttgtaacggagtgctgtttagttgagttggggggaacaaaattggcgagactattttgctgcattctgctctgctgtttttagttactgatgaagaataaaacgatggtggtgatcagttttatgattcagtgcttgccaatgcgatctttatccttttgggaaggaaaaaaaaaatccatctttgcaatttggaatgtaattctcctcctttttctttttgactgtgctgtaactgtaagtgcagtagaaggccgcaaggcaaggaaaccagaccggtggcgcggtgttgtagttgtagctggcgatcccacttgtttttattgttttt

SEQ ID NO: 20406 - DNA, 1930 bp, Zea Mays
ctgtgatctgtactgccccctctcctgtgtatcttgccatcctgaaggcagcattttggtgttttttcaatactttttcgtcagacaaatgtaatatggattatattttttgctgccaatggagctatcacatacgtaaaagacttgtatcccaaggataatgcttctcatgagaacagtgaaccaatacatcagtcaaaaaaagcttctgccagggataacaaaactagtgttcaaagcttgagaagacggcgaatcaatagtcccataaataaggtcattgtttgtgaatctgctaacccttacaacagtcttacagaggaagtgtgtgacatcagcttgaagttatggaactcaaagtgtgaaattttgattgcatttgcaccatttgtagttgtcatggcggcattcgtagcattcataatctggaatggtggtatagtactaggtgctaaggaagctcatgttgtttcgccacactttgcacagtttctgtactttggccttgtgtcagctgctgccctccttccatggcatttcactcccaaccgagtattggatctattccacttgtctggaaagaacaaaacctgtggttctctggcagtattaatgggtcttggtttaagctttgtcgctgtacattttttcaggtttattacctaggtgcttccttcatgacttttttttgtccaagcatgagaactgccacaatgacttcacactaaacctttagatgtttaccagtgatggctaaatgttttgttaaaaccataatgaagcgacaaggacagtagcaaagcagtttcaccaccttaatgcttcattttaagggcagagttagagttgtagtgcaatatatgccacaggaaccttgactctctttttttcttttagttagacaatgatgtttatcttctttatttgttcccaaattataatgaaccgatcatcttttgatgcagcattgcccatccgtatcttcttgctgacaatagacactataccttctatatttggaggaaggttatccaagtaaactggatgatgaagtacatgttgattccactttatgtgtactcatggctctcaatcatcaacatcttagggaaatcacagacaaggatttgggtgttatcatttgtgctgtcagttgcactggtccttgtacctgccccgctggttgaattcagatactacacaattccattcgtgatactggttcttcactctccatcaattggcaatggcaaattgcttgccatgggatcgctttatgcagccgttgacttgtctaccctggtgatgtttctgttccgaccattccgttgggaacatgagcctggaacacaaaggtttatgtggtagtttaggataaagcacgggaagttgggaatagagcaaaaccttcattgtaccgtcgttttggttcgaacttctaacaggacgattaagcatacatgtgtcaggcttatttggatccttgagtgaatttaatggtaggagtcaaaacaatagcgctgagtatcgtcattttctttttgccagcctttatgtattctaggcattctaatcaacgattgcacaagtcaaaaataggcagtggatacattgtttgatcacacggcttttaagggcaacagcaattatatggattgatattgaacaggaagtgcagtgttccttgcgatgagaggtggtgttgtgtgagctaatattcttgtattgttctccaaatcactgtcgtaattgaagaaatgtttgcaccgtcaacagaaactaactgggatcttgtgatggttttaacattagtttcgaatttgggttttggctgtatccaaattgagcatatttatcatgtttgtcgaatatgttggactggtttcttaggtcgattttccaattacacagagttcatggacaatctaaa

SEQ ID NO: 20407 - DNA, 1952 bp, Zea Mays
atttgcattgggctgtccgcagtatggcgtcgcctccgactcgtcttgtgttctccccgtcgctgcgtcgcagccgtcgtcgggcttctcctctttcttgcactttcagtcgagtccagacctgcggaatatagatctaccaatcgaccgacccggatccttcccttccgtctgacgctgcttgctcgggacgggaaccggagttggattgcgatggcgctgcagtacgtggaggcgcagcggcaggcgcgcccggacctcgccgactggtatgcttccctcgccgacctctaccagcagaagctatggcaccagctcaccctcaagctcgaccaattcctacagctccaggccgcacagaccggagacactatcattcagctctacaacaatttcatcactgattttgagaccaagattaatctgctcaagcttgcccattttgcggtgatagcttctcgccagtaccctgataaggatgctgcaattaccttcttagagggggtgatcacaaagctgcgtgatacaagagagtcacggattaatgaaccgattctctatgtgaagatgcaaattgcagctattaatcttgagaaaggaaaccaaaaagagtgcaagaattcgttggaggatgggaaaaccaccctggatagtatgactgatgtcgatcccacagttcatgctagcttttactggatatcatctcaataccacaagtcatgccaagaatttgcagagttctataagaacgctcttctctatctggcctacacaactgtggagtctctatctgagtcattcaagctagacttggcttttgatctttctctagcagccttgctgggtgataacatttataattttggagagttattagctcacccgattatcaatagtcttattggaaccaaggtggagtgggtttatcatatgttacaagcattcaacacgggcaaccttgctttctaccaagaactttgcagggttcacaatgctgctcttactgcacaaccagctttggtgcaggatgagaggaagctgcttgagaaaatcaatattctttgtctgatggagataatctttagtcggccatctgaagatagaactattccattaagtgttattgctgagcagactaagctttcaatcagtgatgtggagtatctccttatgaagagcctctcggttcatcttattgagggaataattgatgaagtggacagtacagttcatgtttcgtgggtccagcccagagtgcttggaatcccacaggttaaggctttgcgcgaccgcctggatgcctgggttggaaaggtgcatactacattgctttcagttgaggcagaaacacctgatcttgttgctgcctaatttagcacctgttacacttccgcgagaggcttggtcagcaaggtgatgagatgcattgtgacacttgtagtcattttctggataatgaacctgctgccctgagcgtttgtcagcctgcgtcctgatcggggcctgtaatttcttttttgatgtcctctggacatggatgggtacaacttcacgcagtgtcacggaaacgggaccaaatgattgaaatttttatactagtagggtgttactgtagttttcccagttgaatttaatttgtaactgagtttgtactctgctggacatggatgcaggagaatcttgctggaaatttagttgtgcttgatgtttgcatgttgcattgcgataagacgtggatcatcattaatgtattcttattctcagacattgcgttctgggctcggatggaattgtgcttagtttgggacgtttttatggctatgcttggttcagcgtctggggtgcttatagtcgccagaagatggaagccaaaccaaacacctggcttctggtggatgcgctttcgctcgcagcccctttagcactggccgtgagaatcggcctgaagcccg

SEQ ID NO: 20408 - DNA, 193 bp, Zea Mays
tccatccctgccaccgggatagatggtcgagagggttactgcttccgtaggagaagaccaggaggagtagcgtggccggatttcgccatgttactcggttttctccattagttatttccgctgcactaaaaatattgttactgcttttaaaactccgataatgtaatcagtattgatacttgttaaatttgtg
